United States Patent Application Publication US 2004/0214272 A1 - sequence listing, part 13

SEQ ID NO: 51626 - DNA, 644 bp, Zea mays
  unsure (1)..(644): unsure at all n locations
  Clone ID: MRT4577_147078C.1
cgggatttcactcgcatggatcttatagactactatcttcttgtcaagtcattcataagcgcagcatccgagagagcaaccgtggtcatcctgacgaggagctcttatatttatcgtacagtctgcgttgtgagatcatactcgttagcctgtactatgatccaatcgtgcaagggctccgtgtcgactaacaaaactcaagtcatgaactaccaggcgatcgatgtgattcccatgtcctacttccaataggttctccacagcgtgagacagaccacgttcagcattgcatgcctcagtgtgcgtgtactctggttgcataggcgactgattcatagtttgatgtaattctatatagtgaatcccttgatgaggttctttgtatcctggcttgaagctattgctagatttgattcatccaggatagatgtccatggtctacaatttcgctcattattacttgtctgaggtggtcatcccctctaggttgctcgcacacgacatgcgtatcgtttttcctaattctccatctgaatgctttttagcacaagatgcccacgatgaataggtagcgcacaactgttaaaccgtgcctatgnngagagtactatcctgcaactgcaatcacagaagagaccctccgt

SEQ ID NO: 51627 - DNA, 969 bp, Zea mays
  Clone ID: MRT4577_147079C.1
cctgtgcggcgctcaggcggcgggtttcctcctccaattaaaccgccggcgcctccacttcgcgttctcgcctcatctcctcccgctcaggatccgccggcgaaggtaaggcaagatgtacaccgcgaggaagaagatccagaaggataagggccttgagccctctgagttcgaggactctgtcgcccaggctttcttcgacctggagaacggtaaccaggagctcaagagcgacctcaaggacctttacatcaacggtgctatccagctggatgttgccgggagcaggaaggctgttgtgatccacgtcccataccgcttgcgcaaggccttcaggaagatccatgtcaggatcgtcagggagctggagaagaaattcagcggcaaggatgtggtaattgttgccacaaggaggatcgtgcggccgcccaagaagggttcagctgttcagcgccctcgctccaggactctgactgctgtccacgatggcatcttggaggatgttgtcttcccagctgagattgtggggaagcgagtcaggtaccgtctggatggtgccaagatcatcaagatcttcttggacccaaaggagaggaacaacaccgaatacaagctggacacctacactacggtctaccgcaggctgtgtgggaaagatgtggtctttgagtaccctatgaccgaaaatgcataaatatgacgccccggatatccccatttcatttcgttgaatctgggtgtttctttggggtctcaactagactgctccgtatgtacttcaaaaaccatagttttgatgccaaagttgcctaggaatttggtactcgggaattggcagcggacgtgaacaatgttaagttttgagcatttaaatttacctttgccatgatagcatgtttcgattttttatttaattgctggacgtgtttgatgtcaaaaaagcgaaaaaaaaaaaaaaaaaggccccta

SEQ ID NO: 51628 - DNA, 315 bp, Zea mays
  Clone ID: MRT4577_14707C.1
agcaggaaaaattatgttttccctagcggggaaaaagatacccatgaaggacttttttcctttaagggggccggatccatttttccttttatacaagaaccgaccccttaacaaaattcccaggactttcatttaaagaacacaacattccaccaacttttattccatcttgagccttcgcactctgaaattctggttaaccaacgccaggcccgccccctacttggttaattgggggaccttgccctaagcaggcggggagcttttaaaagctcaacccaataatttggccaggggagggggcaattgggcagg

SEQ ID NO: 51629 - DNA, 1080 bp, Zea mays
  Clone ID: MRT4577_147080C.1
cccacgcgtccgaattaaaccgccggcgcctccacttcgcgttctcgcctcatctcctcccgctcaggatccggcggcgaaggtaaggcaagatgtacaccgcgaggaagaagatccagaaggataagggccttgagccctctgagttcgaggactctgtcgcccaggctttcttcgacctggagaacggtaaccaggagctcaagagcgacctcaaggacctttacatcaacggtgctatccagctggatgttgccgggagcaggaaggctgttgtgatccacgtcccataccgcctgcgcaaggccttcaggaagatccatgtcaggatcgtcagggagctggagaagaaattcagcggcaaggatgtggtaattgttgctacacggaggattgtgaggccacccaagaagggttcagctgttctgcgccctcgcaccaggactctgactgctgttcacgatggcatcttggaggatgttgtctacccagctgagattgtggggaagcgtgtcagataccgtctggatggttccaagattatcaagattttcttggacccaaaggagaggaacaacactgaatacaagctggagacctgcactgcggtctaccgcaggctgtgtgggaaagatgtggtctttgagtaccctatgaccgaaaatgcataaatatgatgccctctggatatctccactctatttcgttgattctgaatgttatgttgggtctccctatgtacttcaaaaaacatagttttgatgctaaagttgcctaggaatttggtacggggaagtggcagtggacgtgaacaatgttaagttttgagcatttaaattaaacctttgccctgataacgttgcgagttatttaatttcttgctttgttcgcggcttgtcagtctgttaaactgtttattttatttggcatagcctgaaggagtgaaatcaacagttgtcgtagttgtaactgttttttcttcttgccatgtcatataatacagtatgtttcaataaaatctcttaagaaaagtcgatgtccctcaaaaaaaaaaaaaaagggcggccgccgactagtgag

SEQ ID NO: 51630 - DNA, 1364 bp, Zea mays
  Clone ID: MRT4577_147081C.1
cagggtccggcggcgaagggaaggcaagatgtacaccgcgaggaagaagatccagaaggagaagggccttgagccctccgagttcgaggactccgttgcccaggtgagcatagcgccaacccacctcctctctcctccttttactgcgtttattttccttgaactgctgctctgtttgtttgtggttcccaatgtgtcggggttgtgatgtgctttttggcttgttgtacctgcatgctttatttgatctggagaacgggaaccaggagctcaagagcgacctcaaggacctgtacatcaacaatgctatccagatggatgttaccgggagcaggaaggctgttgtcatccacgtcccataccgcctgcgcaaggcctttaggaagatccatgtcagactcgtcagggagctggagaagaaattcagcggcaagctcctttctatcaagaggtttgacatggtagatctgccattatcagaacaagatgaattaatggacatgctttggaatatctcttgattgaaacaccccagtatgcagaaaatggctctcttgatgatattttgtttacaccagctagaagatctagggctttcaagatcgcagcgatgagatgccctcttccccgaccaccagatcacagcgatggagctggatccggtcgccgctggggcatcctcctcgccagccagtcgcagatgtccctgatggcaagcttcagcaatcgtcaagtacaaagacatcctcccgtgcaaaattcaatttgcccaatcctaatctcttctatatagcctcacagatcgcagcgatggagccggatctggtcgccgctggggcatcctcctcgccgccgccttcaccggtgtcggccacgtccccgccgtggcaaatgcgagttgaacaagtggagcttatcaagagtttcagaattcgggtatgccagggtgcatgccacaagaggtgatatgctggttcagtttgtaagctcaagtacgatggaggttttggaccaatttagaattgtgaagcctgatccggcaaggaggctatggaacaagccagtttaaccatagctgtagtgcatgcaaaagatggagctggagctacttccttatattattgttatgctatataaaagatggcgttgaattacacatcagcgtgttgtctaagttctatacttatctgtgtggtgtatggttctttatgacatttccacatgatagttctttctccctctgtaaaatatattgatcgacaagtgtcattttatagttgtagctaacatcctaacaagggctcctgaacttgagttataatttacagttttgtcagttctaaatttctgaaactacaggaagt

SEQ ID NO: 51631 - DNA, 895 bp, Zea mays
  Clone ID: MRT4577_147082C.1
aaaaaaaaaaaaactccaattaaaccgccggcgcctccgcttcgcgttctcgcctcatctcctcacgctcaggatccggcggcgaaggtaaggcaagatgtacaccgcgaggaagaagatccagaaggataagggccttgagccctccgagttcgaggactccgtcgcccaggctttcttcgacctggagaacggtaaccaggagctcaagagcgacctcaaggacctttacatcaacggtgctatccagctggatgttgccgggagcaggaaggctgttgtgatccacgtcccataccgcttgcgcaaggccttcaggaagatccatgtcaggatcgtcagggagctggagaagaaattcagcggcaaggatgtggtaattgttgccacaaggaggatcgtgcggccgcccaagaagggttcagctgttcagcgccctcgcaccaggactctaactgctgtccacgatggcatcttggaggatgttgtcttcccagctgagattgtggggaagcgtgtcaggtaccgtctggatggtgccaagatcatcaagatcttcttggacccaaaggagaggaacaacaccgaatacaagctggacacctacactacggtctaccgcaggctgtgtgggaaagatgtggtctttgagtaccctatgaccgaaaatgcataaacatgacgccccggatatccccatttcatttcgttgaatctggatgtttctttggggtctcaactagactgctccgtatgtacttcaaaaaccatagttttgatgccaaagttgttgcctaggaatttggtactcgggaattggcagcggacgtgaacaatgttaagttttgagcatttaaatttacctttgccaaaaaaaaaaaaaaaaaaaaaaaaa

SEQ ID NO: 51632 - DNA, 1370 bp, Zea mays
  unsure (1)..(1370): unsure at all n locations
  Clone ID: MRT4577_147083C.1
aaacattatttttaatataatataaataaataccattcaatatatcataaataagcattgtcaaacaacgcatacataagtgtactttaaatctaaactaaaatacaactgtttgcactaatgttaagcctaactttatataaattcaagtctccacacttttgcgaccaccaaatattaattgaagttggaggcatcaatggcgaagcaatcttgttgtcccctatgacttcagtattaacaccatcctctttgtcattctcatcaagagaatacttcaatctgttagccagcgcctgaaatgtgatgtacagtgaaatataaacatccaccaatatatgaaacatttgcaagttgcaactgttctaccatgaacattgcattaccacttcatgtgtactctgaacaactctaatctcttgccaatattcatctggtgacttggagagaatgaagcattgttcttccttcttccttttaaatgattccatccgagctctactgccagcttcaggaagatgcctgtcagggatgtatcttgctgacaagtaaactgctgcattgatcccttctaaagtgtatttgcatttatggtaagtctcatatttctcacgcagaccaagtaatatcttgacagcgtcctcctggctaggctcattcaccaatactggctggaatctgcgagccaaagccttatccttctcaaaatgcactgtgagcaaagacaaaaataaccatagggaaagaaaacaaatctcaggcacctgggtggctcatgaaacacttaatattctatcacagattggaaaacctgttttacctcaagcagaagtgtctttcataaaaccaaatctcattcaagtgacaaagcatacactacagtgtaacaatagcaatacaatagtggtgggcatataattaatcaatgaccaaagataccatagatcaataccatataatacaatatgtagtctagataccatagatcaatacttattaggccaaactagtgaaactagtcttttcggaaggaagccatccattcggaataaagtaatagcactagtagaaattggtcaatttgaatgtgcttgtgctagatcaattgcagatcacataattactaaaacaaatgacagaattcaagtaatcataacccccgttgtacaacatgtagaaaattgttggtgctctttctgatcccacgccatgatcctctccaagcattatttgaatagtcaaacaaaattagttcagggaaatcagatagtaaaaggatggtaagaaggaccgtatctttgttgtagcgagatgtgaaggnntcaacaanntatagtcactanngnagttatcacctnntgagcacccgg

SEQ ID NO: 51633 - DNA, 350 bp, Zea mays
  Clone ID: MRT4577_147084C.1
aaagctctctcacttttgcgatttccacgggttgtttcctattaatacacatatccactcacttacaaatcaaattgatcccttcagaaaaaaaaactgcaaagaacgaattctgttcgaaaacagggaagcaccattactgaaccatattaagaccccccgtgttcagagattatatagcaaatactgtcctgaaatttcacagacaaaaagacagtcgtgccaagggaatcctggctccaccccaggcacaaaataatgcaaaagtttgtgcacattaaaacacatttagtgcttaacacacatctattttttggggtgtacaccacggccccctcttccctaaaatc

SEQ ID NO: 51634 - DNA, 276 bp, Zea mays
  unsure (1)..(276): unsure at all n locations
  Clone ID: MRT4577_147085C.1
gttcntataatcgcgagcgggcgacccttgggtgtgtggggggggtgtgaacgtttaacattgctttcagggcacactatcgatcacctcgcgacaccagcagttaatacatcagcctcgtcctagcgtagtaccgtacggtgaacgctgaagggcattcgccatttactcacagcgaccacacgaatattcaatacactctggggtgggggggggggcggctgtatcacacactaattactcgaacgtgtcatgcagctgaaagctccttactcc

SEQ ID NO: 51635 - DNA, 851 bp, Zea mays
  Clone ID: MRT4577_147086C.1
tagcgccggcgcctccacttcgcttcctcaccccatctccgctcagggtccggcggcggcgaagggaaggcaagatgtacaccgcgaggaagaagatccagaaggagaagggccttgagccctccgagttcgaggactccgtcgcgcaggcgttcttcgacctggagaacggcaaccaggagctcaagagcgacctcaaggacctgtacatcaacaatgctatccagatggatgttgccgggagcaggaaggctgttgtgatccacgtcccataccgcctgcgcaaggccttcaggaagatccatgtcaggctcgtcagggagctggagaagaaattcagcggcaaggatgtggtaattgttgccacaaggaggatcgtgaggccacccaagaagggttcagctgttcagcgccctcgcaccaggactctgactgctgttcatgatggcatcttggaggatgttgtctacccagctgagattgtggggaagcgtgtcagataccgtctggatggtgccaagatcatcaagatcttcttggacccaaaggaaaggaacaacaccgaatacaagctggagacctacactgcagtgtacccgcaggctgtgtgggaaagaagtggtctttgagtaccctatgaccgaaaatgcataaagatgatgccctggatatctccatttcatttcgttgaatctggatgttttgttggggtttcaactagtttgctccctatgtacttcaaaaaccatagttttgatgccaaagttgcctaggaattcggtactctggaatttgccgtggacgtgaacaatgttaagttttgagcatttaaattaaacctttgccccgtt

SEQ ID NO: 51636 - DNA, 481 bp, Zea mays
  Clone ID: MRT4577_147087C.1
ctcttgccaatattcgtctggtgacttggagagaatggagcattgttcttccttcttccttttaaatgattccatctgagctctactgcctgcttcatctatcagatcaatagccttatcaggaagatacctgtcagggatgtatcttgctgacaagtaaactgctgcattgatcccttctaaagtgtatttgcatttatggtaagtctcatatttctcacgcagaccaagtaatatcttgacagcgtcctcctggctaggctcattcaccaatactggctggaatctgcgagccaaagccttatccttctcaaaatgcacactaatcttgagtatgcaaacagttggtactttgtagcaagtttcgcaatgatccttaccagcaagctccaaaacagttggtaggtgtctgtggaggcggagttggtagatccgaggtgacagcagcggcagtgttctcaggatagttgcgagcagaggc

SEQ ID NO: 51637 - DNA, 147 bp, Zea mays
  Clone ID: MRT4577_147088C.1
aaatcataatataaattcaatttctttatgtaacacacaaaacttaacatgacaggcttcttagacagagcggagggctcctaccctatccacaaaacaaattctacctctctaataactagttacacttacacttttaattcataa

SEQ ID NO: 51638 - DNA, 1112 bp, Zea mays
  Clone ID: MRT4577_147089C.1
gcctcgaaaccctagcgccggcgcctccatttcgttttcctcactctctcctccagctcaggtatccatctccccgcctccgactccaccatcgatcttccctcgcgttctatggctatcatctccccttgcgctggttgctgatcgatcctgctctgcttatcgaatctcctccttggccgcagggtccggcggcgaagggaaggtaagatgtacaccgcgaggaagaagatccagaaggagaagggccttgagccctccgagtttgaggactccgttgcccaggctttctttgatctggagaacgggaaccaggagctcaagagcgacctcaaggacctgtacatcaacaatgctatccagatggatgttaccgggagcaggaaggctgttgtcatccacgtcccataccgcctgcgcaaggccttcaggaagatccatgtcagactcgtcagggagctggagaagaaattcagcggcaaggatgtggtaattgttgctacaaggaggattgtgaggccacccaagaagggttcagctgttctgcgccctcgcaccaggactctgactgctgttcacgatggcatcttggaggatgttgtctacccagctgagattgtggggaagcgtgtcagataccgtctggatggttccaagattatcaagattttcttggacccaaaggagaggaacaacactgaatacaagctggagacctgcactgcggtctaccgcaggctgtgtgggaaagatgtggtctttgagtaccctatgaccgaaaatgcataaatatgatgccctctggatatctccactctatttcgttgattctgaatgttatgttgggtctccctatgtacttcaaaaaacatagttttgatgctaaagttgcctaggaatttggtacggggaagtggcagtggacgtgaacaatgttaagttttgagcatttaaattaaacctttgccctgataacgttgctgagttatttaatttcttgctttgttcgcggcttgtcagtctgttaaactgtttattttatttggcatagcctgaaggagtgaaatcaacagttgtcgtagttgtaaaaaaaaaaaaaaaaaaggccccta

SEQ ID NO: 51639 - DNA, 347 bp, Zea mays
  Clone ID: MRT4577_14708C.1
ttatccaattaaaccatactgggtttggaattcatatccatagccttctggcagcttgagcttatggcggctgaaccaagaatcaccgggctcagccatcacgacactatcacctgtcatcattttctggatgtgtgtgaagagcacatcgactcgcagtggcagcttgacgctggatgggtgccttccgaaattacagagcatgaatacgcagggccagaacatgtagcgtgcgtcgagcattccgctggggtgatgctcgagaccgatgtggtcccgtccaccagtcctccgccactcgtgtcgcgcgggcgaagaattaaggagcctccggtgcaaaacgcggt

SEQ ID NO: 51640 - DNA, 1401 bp, Zea mays
  Clone ID: MRT4577_147090C.1
ctcgaggccggccgggataatatcgcacacagatccccaaacagatcgatcgcctttcatgcccaagagatacgctcgaatttcctgacgccgccttccgttcatcccatcgcacatgcacgacatggagacctcttcctgtggcgtagatggacctgttgagtcttcgattgtagtccaccatgaccacacagtggaaggaggtgaaggccagcagcctgacagacctgccgccggccaaggaagcagcgaggagatacacagtcatgtcgcacatcgcctctcctttgagtcctggttaaatgaatcacgtattacgttgactgaatcatcttcccaaggtttaattacgccaaaaaagcagactgttcctgcagtggtatgattttgttttagctcatgttgttttaatgtcctgtagaaaatatatttgtgagataaaaatatttttttatcgtttaaaaaaaaaaaaaaactcctccaaattaaaccgccggcgcctccacttcgcgttctcgcctcatctcctcccgctcaggatccggcggcgaaggtaaggcaagatgtacaccgcgaggaagaagatccagaaggataagggccttgagccctccgagttcgaggactccgtcgcccaggctttcttcgacctggagaacggtaaccaggagctcaagagcgacctcaaggacctttacatcaacggtgctatccagctggatgttgccgggagcaggaaggctgttgtgatccacgtcccataccgcttgcgcaaggccttcaggaagatccatgtcaggatcgtcagggagctggagaagaaattcagcggcaaggatgtggtaattgttgccacaaggaggatcgtgaggccgcccaagaagggttcagctgttcagcgccctcgcaccaggactctgactgctgtccatgatggcatcctggaggatgttgtcttcccagctgagattgtggggaagcgtgtcaggtaccgtctggatggtgccaagatcatcaagatcttcttggacccaaaggagaggaacaacaccgaatacaagctggacacctacactacggtctaccgcaggctgtgtgggaaagatgtggtctttgagtaccctatggccgaaaatgcataaatatgacgcccggatatccccattttattttgttgaatctggatgtttctttggggtctcaactagactgctccgtatgtacttcaaaaaccatagttttgatgccaaagttgttgcctaggaatttggtactcgggaattggtagcggacgtgaacaatgttaagttttgagcatttaaatttacctttgtcatgataacatgttgcgagtttttatttaattgctggacgtgtttgataaaaaaaaaaaaaaaaaaa

SEQ ID NO: 51641 - DNA, 1920 bp, Zea mays
  unsure (1)..(1920): unsure at all n locations
  Clone ID: MRT4577_147091C.1
cattgggtacctcgaggccggccgggcccctagtctggtcagcccactctccggggctagggttttaacgaagcatataagagctcccacccgtgcagacaaccacacctcctcgaaaccctagcgccggcgcctccacttcgttttcctcactctctcctccagctcagggtccggcggcgaagggaaggcaagatgtacaccgcgaggaagaagatccagaaggagaagggccttgagccctccgagttcgaggactccgttgcccaggctttctttgatctggagaacgggaaccaggagctcaagagcgacctcaaggacctgtacatcaacaatgctatccagatggatgttaccgggagcaggaaggctgttgtcatccacgtcccataccgcctgcgcaaggccttcaggaagatccatgtcagactcgtcagggagctggagaagaaattcagcggcaaggatgtggtaattgttgctacaaggaggattgtgaggccacccaagaagggttcagctgttctgcgccctcgcaccaggactctgactgctgttcacgatggcatcttggaggatgttgtctacccagctgagattgtggggaagcgtgtcagataccgtctggatggttccaagattatcaaggtagatgcttccgtcttcctttcttcagatagtctacatgtcctactgaggaactgaaggatgccactggcatctctactgacaactgtattcacttgtataaaaacatctaaaattttggcttggcattagttacctagaatttctttgtatacatttatggtttgttggctaacatattgcagcaagttacttaaccttctcttgtaatggcattcagattttcttggacccaaaggagaggaacaacactgaatacaagctggagacctgcactgcggtctaccgcaggctgtgtgggaaagatgtggtctttgagtaccctatgaccgaaaatgcataaatatgatgccctctggatatctccactctatttcgttgattctgaatgttatgttgggtctccctatgtacttcaaaaaacatagttttgatgctaaagttgcctaggaatttggtacggggaagtggcagtggacgtgaacaatgttaagttttgagcatttaaattaaacctttgccctgataacgttgcgagttatttaatttcttgctttgttcgcggcttgtcagtctgttaaactgtttattttatttggcatagcctgaaggagtgaaatcaacagttgtcgtagttgtaactgttttttcttcttgccatgtcatataatacagtatgtttcaataaaatctcttaagaaaaaaaaaaaaaaaaaaaaaaaaaaaaaaaaaaaaaaaacaatcagatagagagagcatagtcgatcatgaagggtggcaaaaaggaagtggccggtgcggtggtggccatactgctggttctgcagctcatggcagctccaccgacggccatggccgcccgctcgccgcgcgaagccgtgccgaatggctccctcgccacgacgcccaaggtgacaatgctgtcggccacgctgtgctacacgggggaaacatgcaaatacactccctgcttcactcctgcttgctcctgcagctttagtgatcgcctctgctacgtcatatttactcctgttgcttgagttgaggccattccgcgaagccacaactcttacatgcatgcgccggccgacaacaacaacgctgcctctcgtgagcttctgttcaagtgatgcatgtttcaaggcatccatggatgctttacgtatatgcgtattaattagccgtgtcagggaaccgaaaaaaggggggtgttggtttaatttacgtncttctggtgatcaaataaaggggaaaatatatngttggacg

SEQ ID NO: 51642 - DNA, 756 bp, Zea mays
  Clone ID: MRT4577_147092C.1
tctagttctagatcgcgagctgccgccctttttttttttttttttttttttttttttttttttttttttttttttttttttttttttggtttgatcagcttattttattggccgctccgaacgtgacgtataggacaggttgacaagggtgaacagacagcggacacaaattgctccataggttacaaaagtgtagcggcagccggcaggtatcctgatccatcgccatctgcttacacacagacaaaacaaatagtaacgacactaggcatgaagtcgctggcagcataactattgctagcaaaaaaaaaaaagagacagtacaggcatccgggcgcagttgaaacccagcacagattattcaacaatcaccagccacaaacatgtaatccccccttcattcatttcctcctgagcttcgccttcaacctctcgaccgcggcccgcagcgtgccttcgtccttgctgaaggtgaacctcaccaatttctttccctcttcggggtcgaggtagaacacgctgggcggtatagcgcagacgccgacttcgcggatcaagtactcgcagaactctacgtcgctgtcgaaaccgaacggggtgtggtcgaccatgatgtagtatgtcccactcgatgggtagacgatgaaccctgcggcttcgagtccttccagcaggatagccttcttcgcgctgtagtccctcttcagctcgtcgtagtagctgtccggtgccctcagagccgccgggccgccgcct

SEQ ID NO: 51643 - DNA, 213 bp, Zea mays
  Clone ID: MRT4577_147093C.1
tgctccggtccgcggtggaccacctgtcgcagtactttttcgagggcggccgcggaggccatctgtacgtgcccgatgccaagtggttgacaggcctcctcaacctgaccagccacttaatcctatacctgcaccaagacgacgtcatcctaggctcccaggacgtaggcgagtggtcaattgtggatccccttgatttcttacggaagaggt

SEQ ID NO: 51644 - DNA, 522 bp, Zea mays
  Clone ID: MRT4577_147094C.1
ggccgcttttttttttttttttttcttttttttttttttttttttttttttttttttttttttttttttttttttttttttttttttttggaccctggatgggcccccttttattcatcggatatagagaggggggggggaaaaaaaaaaatacggattgcgaattttttacaaaagccgccggcttaggctgctcaaggagggatgttttttctgggcctttacttagcatccttaaacaaaaaataatgggcccgggggcccccccagggggggagcccatcccccgggtttccccgctggaacccagggggtgcccccattccaaacccgatacacagggggacaacaccaaatttgaagtttttgccccgggggttcatttcattaagaaaagtaggccccccccgggcccctgtggcccccaggggggggccaagggcaacagcgcgtccatttacatttacttgggagcggcccaaccccaacttgtggcacccgggcggcccgaagggaccccaa

SEQ ID NO: 51645 - DNA, 639 bp, Zea mays
  Clone ID: MRT4577_147095C.1
ccggccgggttattatcatgatgcatatgaaatggcaatgaactatgttatcagttctcgaaaaaaaaaaaaaaaaaaaaaaaaaaaaaaaaaaaaaaaaaaaaaaaaaaaaaaaaaaaaaaaaaaaaaaaatcccccccttcacagctggttgggggtcttaataaccgccgaataatatttttttctcctccttaacaccgcgctggtagctggtttttttctgcaacaaggggggctggttcctcctcccaccagctggtggcggggggggtcctgctggcggcgctgctgttgttggtggcgggggccgccacggcgtcggcggcggggagctgcggcggggggacgacgtcgggggggccgcccctcgggtcccccagggggggcggggggtcgccctcctcggggggctgcagcggggggggctccttaaacaaccgcccgtcgtcggcgggggcccgccgggccacctccagctgcctcaaaagcatgacgggccgcctcggggggggcgtcagcatggtcaacgccgccaacatcctgggggggggggggggttccttcggggggcccctcagcccccccgccggctgctcgccgatgaactggtggggggagccctcgtggggggggctc

SEQ ID NO: 51646 - DNA, 801 bp, Zea mays
  Clone ID: MRT4577_147096C.1
attcgacctcgggctgtgcttagctgcacgctcgatcaacaaaacacaacgcgagtctacctcaggaagtagcagataggacatcccgtgtgaagaacagtcgagtgaccatggccgcagcagccaacgatggcctcgccgacgagaaggcgccgaggacgatcggcgtagggcggtacgaggagatggagcaagacggcgcctcgagcaccgcaaagtcgcggctctccggcctcctctggcacggcggctccgcctacgacgcctggttcagctgcgcttccaaccaggtagcccaggtgctgctgaccttgccctactccttctcgcaactggggatgctgagcggcatactgttccagctcttctacggtctcatggggagctgaaccgcgtacctcatcagcatcctctacgtggagtaccggaccaggaaggagagggagaaggccgacttcaggaaccatgtcatccagtggttcgaggtgctggacgggctgctggggaggcactggaggaacgtcggcctcgccttcaactgcaccttcctcctcttcggctccgtcatccagctcatcgcctgcgccaggtacgtgcgtgctcatgggcgttcatcatgaccgatactcatcgatgtttgcttaaaggcggacacctgagaaaaagagagacaaaagtcgatcgtctccaagctcgttttgctgttggctctattgtttcttcgtgtccatggagagtggctcaagagagtgtatgtatgatgcatggtgtgcagcaacatctacctacatcacgaccggc

SEQ ID NO: 51647 - DNA, 265 bp, Zea mays
  Clone ID: MRT4577_147097C.1
tttccaaccaaaccctcggcgccgtccgggggcgttgtttttcgccgcccgccgcgctcctcgtcaggcggcgtggagcccaagatccgccaggtctgcttcttcaccccggatgcctccgcgccgttcgagcccctgccccccgccgcggtggtccaggctccatctgctgtatcataggccgttcacggcatttcctccggctgttagtcgactttttccagggtctattttttccctgtcatgatccgttcctcatgccatg

SEQ ID NO: 51648 - DNA, 659 bp, Zea mays
  Clone ID: MRT4577_147098C.1
cgctccccgcctcgatctccaccgccgcgcgcgctcgtggggtagcagtaacaccagcaccggcggagacctgcgacctgggccatgacgatgaggggccttctccggtgcgtgtcgacgggggcgtgcagggtggcgccgggcgccgtggcggagccggtgccggcgtcgccgggggccaccggcgggaaggtgccggcggggcacgtgccggtggaggtcggcgcggaaggggaggagacgcagcggttcgtcgtccccgccgagctgctgggccggccgcccatcgccgagctcctccgccacgccgcgcaggagtacggctacgcgcgccggggcccgctccgcatcccctgccccgtggccgcgttccgcctcctcctcggcgcgctcgcggggagcggcgccggtggacccgacggggcgctcacgctcgcttacttcgccgtggccgtctgatcgacgagatcccctagctagcgtagcgggttgggttcctccttccttgaggcgtgcgttgtgctgtcagcgttcttgcttctctagattccatctgttccttctactcttctttctctcctttgctttttctcctcccctctttgtgctatgtaaatatgtaattttttcagattgatgagacgtttattattcggtat

SEQ ID NO: 51649 - DNA, 1156 bp, Zea mays
  Clone ID: MRT4577_147099C.1
ggtggagaaatgggaggcggtggtctaggcccgtagtacacaacgataaaggtagcgtcgttggcatagtcgcgttcaagtacgcggacctgcaggacgcgacgaagaaattctcggagaagctaggcgaaggtggctttggctccgtgttcaaagggtgtctaggtgactcgactactaccgtagtagcagtgaagaggctggacggcgctcgacagggagagaagcagttcagggcagaagtgaactcgatcgggatcgtccagcatataaacctagtcagactgatcgggttctgctgcgaaggcgacaggaggctgctcgtgtacgagcacatgccaaacggctccctggactcccatctgttccgaagccatggcggcgccggcgccggggcagctctggactggaacgttaggtacaagatagctgtcggggtcgcgagaggtctggcgtacctgcaccatggctgccgggactgcatcatacactgcgacatcaaaccgcagaacatacttctggacgcgtcgtaccttccgaagatcgccgacttcgggatggccaagttcctcgggagggacttcagccgcgtcgtgacgacgatgcgaggaaccgtcgggtacctcgccccggaatggatcagcgggacaccgatcacttccaagatcgatgtctacagctacgggatggtcttgctggagatcgtatcggggaagaggaactctattactcagcagtcttcaagccataccgaaggccaacaaggggactatttaccagtgcaggttgcgggcaagcttcttcgtggagacgttttgagcgtcgtggatgcagatctgcgtggcgacgtgaacgtggaggaggtcgaaagggtttgcaggatcgcgtgttggtgcatccaggatcgcgaattcgatcggccgacgatggttgaggtggtacagtttctcgaagggatttgcgagccggaaattcctccgatgccaaggctactccatgctattgcaggaggcggctcaaatcagatggccggagtcggagtgtgagtcgtagctttctcggcaaattcaacaatcgtctatgatatgtctgtcagttgttatggcaaataaatttgttttcaggaatatctaacatcttgtcatgtaatatttcg

SEQ ID NO: 51650 - DNA, 189 bp, Zea mays
  unsure (1)..(189): unsure at all n locations
  Clone ID: MRT4577_14709C.1
tctttttcttctctaccttaccctcnactccgggctggttcgtattgccaatagggccgacctttcccaccttccagaccaccttcttatagatctcttcctaaaaacccttaatgctgataagcttacaaataaagttctcaagttttttctagcaacccgttgcgaggatattatattgcctaacta

SEQ ID NO: 51651 - DNA, 2546 bp, Zea mays
  Clone ID: MRT4577_1470C.1
tgactgttgaaattcaaggtgatgctgaatcattggaacggtgcttggatcagttcactgctgttgagtggcttgatggggataataagtacaaatgcgatggatgcaacgactatgtgaaagcacggaagcacctttcagttcagcaagctccaaatatacttactatcactctcaaaagattccagactggtagatttgggaaactaaataagagagttacattccctatggagttagatctgacaccatacatgagttgcactgatggaagtgacctgtatgatctctatgctgtagtcgttcatctggatatgctgaacgcatcattctttggacattatatatgctatatcaaaggttatcaaggaaggtggtataaaattgatgactgcaaggttatggttgttgatgaggaggaagtacatgctcaaggcgcttatatgcttttatatagcaggagaacagctcgtcctaggtcacttcttacagttgatgagtccgtgaaacagcaacaacagtgcaaatcgctcctttccaatgggcaaagccacatgatactagcagatacaacattgaactgtgaatcatctttgaagattccagaagatatgttacaacaggattgtgaatccaataatgaatccttgcatgaaatgggtattaaggaccaggagtcagacatggatctacgtacaagcattgaagatgacaaattcattagcaatggaaatctacgtttaccaggttcactagtatcacatgttcttgaagatactagagctccagattctgtattagaaggctctgtgcaacttggccctcctttagaaggtggtcctactacgatgagctctgtgcagtttggcaactgcacaagtgaagcatcttcggaacattcctttgcagagcaatgtgaggtgcctgcctcatgtattgattcagttgactatatggatgttgatactgaagctggtgcagaagttgagagatgcgacgaacaaagacctgtcttaaatgattcagttggaaggccgaataataacacagcaaccccaactgcgaatggggtgccaggagaacccaaaccatcattttcctctggtttttttgataagccctcaagaaaaagatcttcctttacagaagaggctagtgctggttctcctcgaaagttaaatggctattgcaatggacatatcagcagtctagagcaagaagttctttgcaactctggaagtgaaaagtgcaatggagatgcacccgttacatccagtaatggcaaattctgtgcagctaatgttgatatgcaatctatcgatgattcgttgcatgaagacaagcgagatgtgccttctgtttctcatggctttgagccaagaccttacaagctacaatcagacagcaacaacaattgcggtaggacatgcaatgggaaacctaaagcttgccaaggggacatgtcatttttacctcggggcttccttggaaggtctagttctagaggaatttcagtcaaagcagatgatagcttgccatttagcactgacgcatcatcatcctttgggaatggaaacagtaagtcaagtaacaactcatcttctatgggtggcttgtctcctggtttccttacaagacaccgcagggaatccacagtcataggcacaagctctgacattccaatggataaaaaatctaatggcgccacagtagtgccagatcatgcaggaaaaaaggtttcagattgtacgacgaatggctcttcattccaaataagagcagcctccgaccaccttgattgaaatggccttgcaattttgaccacaaaaaacaacagctgtggacaagaaaatgacagtaatggagccccaggcatgagttatgatgggtctgaacatgatggactgagccgacgaataacctcaatttttttagctggatggtattgatgcccaataaaagcatgactgcattgttatagaatagaggccatttcgagcacacaagtgagaactgagagcctgtgtgatcatgtcatggctggtatataaactgatgaagggctgtgagctacgaagtaaatgctatgcaattagggcaagcattgtttgcttgatagaaatttttcctctttcgccacgtggctccctcatatcagatgggtagaggggtatctgggtttccacacaatttgcagaaacccagatgctcccctaatgccacgctattttgttggcattagcgttaggtacatagctgagcgtaggcctactaccgtccccttaattcatagcttaaataaactggaactgctgactcctccggtgtcctgaaagctgaatcaattgcagagtgataagaggaaattctcatggctttcacctttatattttacattcctttgcctcgcatgaaatattttgctggtgtttactgtgcgatgatggatgaaactctcaacgtgagttcttctgttagcttcaaaatacataagtttctagcgactcaatgatttcctcgcattggcagagtgtgtacattgcctt

SEQ ID NO: 51652 - DNA, 282 bp, Zea mays
  Clone ID: MRT4577_147100C.1
atactgaaatactgggtatatataatagtggcatacggccatggatgggatacaaatacaatacgtagatacatagatagatacatgcacacggttgctctgactgactgacgacgacaaggatgatacgtagtatatagatagagatggtatttaatttatccctcagagagatcagagggcgagcaggagtcccggcagggagttggtggcgctataagtgcagtggctctgccaaacgcacttggcaggtacggcggcggcgaggcgggtgactgtgag

SEQ ID NO: 51653 - DNA, 263 bp, Zea mays
  Clone ID: MRT4577_147101C.1
ggcaaaagcaaaaccgttccttgctcaacacttctgcagggaactaattgggttcacggttggctcacttacatgggcggggccctggaatggggtgtttcaccagccaacttcccgactgatttaaaaaaaccccttccttatcgacagggtttcaatcaccccttttcaggggccaaaggcaataggctcgggcttccactcttatggaggtccctggattttcccgcccttagggggggttttcccagggccccccccac

SEQ ID NO: 51654 - DNA, 600 bp, Zea mays
  Clone ID: MRT4577_147102C.1
gcgcccacgcgtccgcggacgcgtgggttttagtctctctattttatttcgggggtatttggttcttttatggtctgtttggaaccatccagtttttaagaaactgatttatggaaactgagctagttccaaacataccaatttatgcctcagtttatagaaattggattcacggtttcttaaaaaccaaaaacctagcctttcctagctaaaaaataaaaattggattgcttccaaacatgaccatagtcactctactaaactttagtccctagaaatcctatttgaaagacctattttagtcaccacgtttggtattttagggctaatagtgaggtgagaaccaaacatccatttattttagtctctaaattgccaaatacggaaactaaaactctattttagtttagtttccgtatttagtaatttatgagaattactaaaatagaataaaatagagagactaaaaattactgcctagaaaccaaacaccactttagtaggctttcagcgaccatagatcgtccggtgcaattctggaatgagcaaatctgacatccattccctggtcgagactgtctctttccctctttaatgaac

SEQ ID NO: 51655 - DNA, 179 bp, Zea mays
  Clone ID: MRT4577_147103C.1
acccccctaacttcgtgatctgtcgatctcctttgcgctgccggccgcactcgccatcttttttaggtctcggggcgccctcgcgcgtgtgtttgcctcttgtgcctgttgccgtggcgcgacgtgctctagtggtgttgctcctcgttctatgcgtggccagtccttgggctctcctc

SEQ ID NO: 51656 - DNA, 1636 bp, Zea mays
  Clone ID: MRT4577_147105C.1
cattgggtacctcgaggggggccgtcgccgacggccggagatccattcctgtcccgtgtttaccttcacccagcggcgctgcccccgtcgtcgtcttcccgcacgcttccgagcgccgccctccccagccccagccgtccccttctttccccatcgcctcgcttgcactccctctcatctccgtctcccgcgccgacgacctaagtagggtttggccttagggttcaggcaagatgggtgagcgcaaggtgctgaacaagtattacccgccggacttcgacccgtcgaagatcccgcggcggcggcagcccaagaaccagcagatcaaggtgcgcatgatgctccccatgagcatccagtgcggtacctgcgggacatacatatacaagggcactaagttcaactccagaaaggaggacgtcgtcggagagacatacttgggaatacaaatatttaggttttacttcaagtgcactaaatgctctgctgagatcacattcaaaacggaccctcagaattctgactacacagtggaatcgggggctagtcgcaattttgaaccatggcgtgcacaggacgaggcagcagacaaagaaaagattaaacgagatgctgaggagatgggtgatgcaatgaaagcgttggaaaatagagcaatggattcaaagcaggatatggacatccttgcagctttggaagagatgcggtccatgaagtctagacatgctggtgtctctgttgaccagatgcttgaaattttgaagcgttcagctcacgagaaggaggaaaaagcaattgcagagcttgatgaagaagatgaggaacttataaaatcaatcactttccgaaactctggattctatgtaaagcggatagaagatgacgacgacgatgatgatgaggatttggctcctggccaatcaagtagaacaataaagatcaatgaatcttctgaatctgtgactaagccaacagatgttttaagcaaaaataacggatcagaggttgccaataaagaagggagcaagagctggatgcccaaatttattgtgaaaccgaagtctgcaagcgcagatcctcataagagacagaagattgaatccacggctgtccaagacaccgggaaaggccaagatgatgaacaaaaaagtgaacctgcgaagcaaaccaatgttctccagtccctctgccagaactacgatagtgatgatagtgaatgaatgaggacaccgccctcttgaagccataacagtcctggttgccaatgctgtattataccagaggatgttaacacatgtagttccccaaaccactggcattgtaccatcatggcacatgatatttatcacaaatctctgattgtcaatgggccaactacaagtattggctcttacaaatatgggctatccagatagagctgcgttattggataaaaatgatagttgcagaaagtcagatctgcggtttgtacatcaaacagccatacacaagcttgtttatgcagcatcactgaattaatcattgtttgtttgaaaaaagaaaaaaaaaaaaaggggggccccccctataaggacccctccacccgggaatttatttcggggggggtgtgtgatatttacctgcctttgcttgtgcc

SEQ ID NO: 51657 - DNA, 563 bp, Zea mays
  Clone ID: MRT4577_147106C.1
cctcgaggccggccggatacagtatgctccatagcgtctgcctccgatcatcttctacatacacggacgcgagaggataacatcaggtcctgccactacgtccacttcaaacgcaacctcaagagtattcttccttacttgcttgactgcttaactctcatgttgccactcacccctattgtgctactgacgcgcgtccaacagccgctggaagatgggcccaccatacagagacacaaagccaagaacctgtacctcctgctcgagacattcccgttcgcaaactgctctccctcgtagccccaggacttccggaactaccgatccaattactacacattcaaggccctgccatctcttgtctacctacccaaccgccgggatcctcacggcaccacacccccactggatcgaccacctcctactccttccaaggcaccaccgaggagaagctcctattgctgcccgtcgtctagtgcaagctgctctccagccccatcctcaagctgctacgagatgagatcatgaaacaaatcaactgctctacgtacacactgacgatt

SEQ ID NO: 51658 - DNA, 731 bp, Zea mays
  Clone ID: MRT4577_147107C.1
gccggccgggccgggccgtggcacatgcccacaccgtactggggcgctggcgccgccgcgttcccacagacgcccgagcggagcccgaggttcacgggcgacgcccgactggggcactgcgttcatgatgtcgccgagcgctacggctgcgccgaggacgccggagaggtggcccgcgctgcccgcactctggagtacgcacctgcgccgaggcaagagcaggcgaggtggggcggcgaatctgaggcagaagcgcctgcgctttatgaatccggagccgaatcgctccgtccagcttgcctcctcaccgttgcttttgcgctctgcttttcacttgccttgcgtggatcttctcaacgcgcgaaccaccgcctcgccgagaaggagatcgtcatcgtcctctcctctacctccgcggtccccgtcgagagcagtgttgctgtcttcgactagcacaaggaagcaatgttgaggcggctaagcgatgctacaatggaacaatccaataacagtgattcgtctattgacgagaggtccatccagcctcgaaagaatatgaaccccctaccctcataaaggcaaagaccacaactccaaaaatcacattttcactgtcctaaatggactgatggcagcattccctttggatgtactttctgataaactcacaaaaataagcaaggaagctttttgaaacgagagatttcatagcaactggtgtagctagcgcc

SEQ ID NO: 51659 - DNA, 443 bp, Zea mays
  Clone ID: MRT4577_147108C.1
ggaccacggaacagcttagggggaaaaacgggccgggggccccccaggggaaatcagggggcacaggccaacatgggggggccccttggtcccttgaacaaagggcccgggccaaaacaacaaaatacaacaccaattttgcaacccgggacaaagttccaggggtccaaaaccccaaaattggcattattttaagggggggaccttggggcttaacaaggaacggggccatgttccccaaggccttggtcgttcccatcggatggcccccggaatcgtcccccccaatcaaagtttttttaaattagaaaacccccccgggtaggaaacgtccccacccaaaaatccgggaaaaacaaaaaaggcccaaaacaaaaacgggaaccgggataaacggggtcaagggttcaaaaaggcaattcggcaaaccctgggattttgga

SEQ ID NO: 51660 - DNA, 865 bp, Zea mays
  Clone ID: MRT4577_147109C.1
cctcgagccggccgggtacttttctagtccgttcttggatcacaatatgcagatcaattttttagcattctgcaagtgttttgtgatcatgattggtgggcgtctagaaaactattctaacgtttcagttgtctgaaaaactatcttatctttgttgtagccctgcctatgctactaccagcttggatggggcttcttcctgctcagtctgtgactggttcacccattgtgctttgtcctgtcagtaatcgtctaattctttggttattgggttccaaagagtttcatgtttttctgcagtaattaattctactgtggaaccatatattaataagttctttcggaacctggattatagccatacattattcagaagcatccatattccataatcttattcaagcccccctccgtaaaaatctcttaagccctctatcaaactaaatccactccatccttcatatgtgcacttcacaagaaactatggcaccatcaagtgtaaaaagttgcagtgttattatgcctgttaacaaattgtagtagagtttgttgatgcggcaacagctcttctggtcgcatcgcacagtagacaatgagcatggtgttgaaattttgtagcacagtagaatgccatgtttttttttcttttcggtggacatccttttggtgcccataactaattgacgcagtcattgggaattatgagatgtgcatctgttgcagtgggatcctatttggtgtgttttatctcgcatttttgaatggtataaatctactgctgttctgcatgtgtattggtaagaatcatggaagtgctttccctataatcttatccaaaagatgtatagttttccaatggtgttaa

SEQ ID NO: 51661 - DNA, 727 bp, Zea mays
  Clone ID: MRT4577_14710C.1
gacgcccgcggtatcggtccggaattcccgggtcgacccacgcgtccgctccctttccccggccccggccccggcccattcgctgcgcgctctccggctagggaggatgtcgggctcgtcgctccccggcgccctggccctctcgctcttgctggtctctggctcgctccttccagggccaggcgctgctcagaacgaaccaagaattgtcaccagtgaagaggtcattattcgagaaagcctccttcctgtcaccctgcagtgtaacctcacttccagctctcacacccttatgtacagctactggacaaggaatggggtagaactcactgccacccgtaagaatgccagcaacatggagtacaggatcaataagccaagagctgaggattcaggcgaataccactgtgtatatcattttgtcagcgctcctaaagcaaatgccaccattgaagtgaaagctgctcctgacatcactggccataaacgaagtgaaaacaaaaatgaagggcaggatgctatgatgtactgcaagtcagttggctacccccacccagagtggatatggcgcaagaaggagaatggtgtgtttgaggagatttctaatagctctggtcgcttcttcatcaccaacaaggagaattacactgaattgagtattgtgaatctccaaatcacagaagatcctggagagtatgaatgtaatgccaccaactccattggctct

SEQ ID NO: 51662 - DNA, 681 bp, Zea mays
  Clone ID: MRT4577_147110C.1
ccggaccctctgctccctccgcctggccacctccctcctacgcctctctcgccccgccgcgcgctgctcgccatctcctccgtccgccttgcgctctccacccagccccacgtcccatctccgtccccatcccctaccccctcctccgcccgccgcctcccgcatttcctctccttcctcgccgccgccgccgccgccgccgctgggggagcaaccgtcgcgctctgcgactccggcctagatcaccgggtcgggggcaaggacagcgccgatctggtggttcgtggggagcggaagttcgtgccgcaggagttcatcgacgagctcgcgtccttcctcggggacaacatcactctggactacgaggagaggagcttccatggcacgccacagaacagcttccacaaggcggtcaacctgcctgatgtcgtcgtgttcccgagctcgcaagatgaggtacaaaggattgtgatggcctgtaacaagcacaagaaaataaaatccctgaatgttgaggatatggacgtagttgttgaacctggagttggatggatagagctgaacgaatacctgaagccctatggcctattttttgctcttggtccagggcctggggcccaccattgggaggaatggggggctactcggtggttctgggtcattagcttgggagggatgggg

SEQ ID NO: 51663 - DNA, 405 bp, Zea mays
  unsure (1)..(405): unsure at all n locations
  Clone ID: MRT4577_147111C.1
ggggttggggttttataaaaagttacacacccttgtgttttttattaaccccatttacaaaccaaaagaccaacggcgaggggtgtttggtcgctcgcagaagccacaacgcccgcgtcgtgtagaaacacagaaggggccggtcacgaacgtacagagctaccccccaggaagagagaaacagagagaggaacagacgggcgctnaataaaacacgcctctgggggagacaaaaaaatatatttaacgcccttttaaggggcccattttttacaggggcgctgccgaggggacaaaaaaattaccccaaggccaaaaaaaaaaggggttaggggcccagatagctggagccccaatacacccccccatctggggaacaagaaaaaccaaggccccctgggggga

SEQ ID NO: 51664 - DNA, 2220 bp, Zea mays
  Clone ID: MRT4577_147112C.1
gaaaccctccgggcccacaccactctgctccactccgccatggccacctccctcctacgcctctctcgcccccgccgcgcgctgctcgccatctcctccgtccgccttgcgctctccacccagccccacgtcccatctccgtccccatcccctaccccctcctccgcccgccgcctcccgcatttcctctccttcctcgccgccgccgccgccgctgggggagcaaccgtcgcgctctgcgactccggcctagatcaccgggtcgggggcaaggacagcgccgatctggtggttcgtggggagcggaagttcgtgccgcaggagttcatcgacgagctcgcgtccttcctcggggacaacatcactctggactacgaggagaggagcttccatggcacgccacagaacagcttccacaaggcggtcaacctgcctgatgtcgtcgtgttcccgagctcgcaagatgaggtacaaaggattgtgatggcctgtaacaagcacaaggttccaattgtaccatatggtggggctacctcaatagagggtcacacactggcacctcatggtggtgtttgcatcgacatgaccttgatgaagaaaataaaatccctgaatgttgaggatatggacgtagttgttgaacctggagttggatggatagagctgaacgaatacctgaagccctatggcctattttttcctcttgatccagggcctggggccaccattggaggaatgtgtgctactcgttgttctggttcattagctgtgagtttgtaggtatggaacaatgcgggataatgtgattaatcttcgggctgttttgccaaatggtgatgttgtcaagacaggctcccgggctcgaaagagtgcagctgggtatgaccttgctcgtttgatcattgggagtgaaggaactttgggtgtaattacagaagtgactttacgactccaaaagcttccatctcattctgtagttgcaatgtgcaatttcaaaacaattaaggatgctgctgatgttgccattgcaacaatgctttctgggatacaggtttcaagagtggaattgttggacgaggttcagataaaggcaataaatatggcaaatggcaaaaatttgcctgaagtgccgaccttgatgtttgaattcatagggacagaagcatatgctctggaacaaactctcttggttcaaaaaattgccactgaacaccatggatcagattttgtttttgtcgaggagccagatgctaaagcggaactatggaagatcaggaaggaggcactttgggctggttttgctatgaaacctgatcatgaagctatgataacggatgtttgtgtccctctatccagacttgctgaatgcatatctacatcaaagcgattgcttgatgcgtcgccattgacttgtctggttattgctcatgctggtgatggaaattttcacacaattatcctgtttgatccaagccaagaggaccaacgaaaggaagcggagagactaaaccatttcatggttcatacagctctgtctatggaaggtacatgcacaggagagcatggtgttggcacagggaaaatgaagtacctggagaaggagttgggcatcgagtcactcaggacgatgaaaagaataaaggcggcgctggatcccaacaacatcatgaatccgggaaagctgatcccgcctcacgtctgcatatgaccgtcacctgactggaggatcgatccccccatggccatcagtgggcttgttggctcactcatcaaaagctttggttccgcgaggcgtgacgcggtgctctgctgacagttgcaataatgcgctgaactgctctgtgcctgtatggcatgcgttggaggcaaatgcacgtaggcatcacatcaaaactataccggtaccaaaaaaaaaaaaaaaaactgaactgcctcagggaagggatgggaaataatggagcaaacattcgtctcctgacgccgttttaacaggagaaccctttttacgttcgaaaaaaaaaagactggaggatcgatccccccatggccatcagtgggcttgttggctcactcatcaaaagctttggttccgcgaggcgtgacgcggtgctctgctgacagttgcaataatgcgccgaactgctctgtgcctgtatggcatgcgttggaggcaaatgcacgtaggccggtaggcgtcacatcaaaactataccggtaccc

SEQ ID NO: 51665 - DNA, 394 bp, Zea mays
  Clone ID: MRT4577_147113C.1
ttttcagaaatctgggcgcgaacaaatttctatcctctgacgagacatctccgttttctgtggccgcggagcgtaaacatttgccgcgtgtgatgccaatcggatgcatcacgctgaaaccatgcctaagagagatcactggatcaggcttcttttaccgatagcctaccacgtgactcacattagtagcaggttttgtcgtagattcggctcgcccaactgcatggagaccgttgatctggcctacttgtgaatgcagattgattgatacacacaacttcttttgtatttctctcaggacactacgccggacttcccctgctacatgaggactcatgtgtatgtgacgtgtctccacgggagtccttgatgatctctagaggtctacaacgca

SEQ ID NO: 51666 - DNA, 426 bp, Zea mays
  Clone ID: MRT4577_147114C.1
ggggaaaaggaccactttattttttggataaaaagggaaaactgaacgggggggaacaatccacgggggtgggaaaaaaaaaaagctgcctcctcaaatagggcaaaaaaaaagggcccgggtttttatgggggggaccataccaaacattaggcccaacgatttttaaggtgggggaaaaaattttttgggagccggtttttttgcaaaattgaactttttaaaccacttgggtgacccctttatttaacgtttgcagccattgttgcgggaaaaaaaaaaaaagcccaaacgttccgggtagccggaaaaccattcaaaggtgtccaataaagaccaaccgaaggagccctgcacatttgctcccaaggtttttgacttcttaaaaaatgcaaaggggccctggaggaaaagaactcttttggg

SEQ ID NO: 51667 - DNA, 661 bp, Zea mays
  Clone ID: MRT4577_147115C.1
cattgggtgcctcctcgagggccggcatcgcggtcgacaacatcacgaccgtcacgatgccgaaagaagtcaagcaaaagtcaggcctcatcgttggcattaacgccggccacaaggtcactcccaggactcctgctcccaggatctccaggaggaagggtttcctgtccaagcgcactgctttcgtccgtgagatcaccaaggaggttgctggtcttgccccctacgagaagcgcatcattgaattgctccgaaactccaaggacaagcgtgctcgtcgtctagctaagaagaggctcggtaccttcggccgctcaaagagaaaggtcgacgagatgaccaaggtcatcgccgagtcgaggcgcgcgggtcactaaacggtttcatgatgtgcggtggatgtagcaaacacggcgaaacgagcgaccttctttccgattctgtccctgggtgttcggtctcttttttcccaaacgggcggctcgacacaacgatttcggaacgtcacaaagcataccttatatacacaaaaaggatggcacgattatcggagtatggcaaatggtcagtgacggttcctaaacgtacctagcatgtgtcactcaaaatcatgaaatgtgacgattggttcacgccaaaaaaaaaaaaaaaaaagcggcca

SEQ ID NO: 51668 - DNA, 139 bp, Zea mays
  Clone ID: MRT4577_147116C.1
gacgactcgagctctcgtccacattcaaagtacgaacatacacgccggaccaagcactttattgaccgtgatcatgatcactatgaatcttcacaagatcttaaagtgcttctactatggaggggttctgtttaacaac

SEQ ID NO: 51669 - DNA, 257 bp, Zea mays
  Clone ID: MRT4577_147117C.1
ggtgtattttttttttttttttttttttttttttttttttttagtgacaaactgacaatttggggaatatttttataacacaaattgctgttggaaaatacaacgtatttaatggaacacttttgtgtacaaatatgaacggctaggggaaatggccaataacacagattaaaaaagtctacaaatttaaggaaccaagaaacgaaatggctaacccccctctagagctgagaaactcatgttattaaaagaccttt

SEQ ID NO: 51670 - DNA, 674 bp, Zea mays
  Clone ID: MRT4577_147118C.1
cccgcagttctaggccacagccccactcgctcgctctcactctctgctgttcgtccatccatccggatccgtcttcctcggtctccaacgagcagcgaggaggctacagctgggaccggccaatggggaacaaaccgccggagctgtactacgacatcctccacgttgccagggacgcctccccgcagcgggtcagggcggcgtacaggagcctggtccgccaatggcaccccgacaagcaccctccggagtccaggccagcggcggaggcccggttcaaggtcatcaccgaggcctacgaggagctgctgggccagcaggggaacaggtcggcggcgcccgcagtcgcagcgcgcgacggcgggaggagtagccccgccgacaaggcggcggtgtcagccagggcggcgcggagcggaaaggccggcggcgcgccctgcacgccggagcgggaggagccggccttcaagacggtggtgtacagcgtcagcagcagcgtcggcggtggccggggccggcgcgcgctcgccgagttctccagctacgtggtgcgcaaggcgccgccgctggagcggagggtggagtgcaccctcgaggagctctgcagcgggtgccacaaggaggtcaggtacacccgcgacgtcgtcaccaagacggctaccggtggatcaacc

SEQ ID NO: 51671 - DNA, 575 bp, Zea mays
  unsure (1)..(575): unsure at all n locations
  Clone ID: MRT4577_147119C.1
canacaacctcgctcgctctcactctctgctgttcgtccatccatccggnaccgtcttcctcggtctccaacgagcagcgaggaggctacagctgggaccggccaatggggaacaaaccgccggagctgtactacgacatcctccacgttgccagggacgcctccccgcagcgggtcagggcggcgtacaggagcctggtccgccaatggcaccccgacaagcaccctccggagtccaggccagcggcggaggcccggttcaaggtcatcaccgaggcctacgaggtcacactcacaccacaccgccaaaatataaatatatgctcgctcgtgtcgtggccccaacgatttcttgctgctcgtgtcgtggcgccaacgatttcttgctgcgggcgtgcacggtggcgctgataatattgtacatgtaccgtctctggcttccggccgggtgcgtgcaggagctgctgggccagcaggggaacaggtcggcggcgcccgcagtcgcagcgcgcgacggcgggaggagtagccccgccgacaagcggcggtgtcagccagggcggcgcggagcggaa

SEQ ID NO: 51672 - DNA, 611 bp, Zea mays
  Clone ID: MRT4577_14711C.1
ggcgggcctcgaggcctccgtccgagcctatggcagcagcgccggcgcaggcgggcggtggcccagcccgttcaccatcgcctgcggcgccctgctcgccttgtccctgctcgcgccgctgctccccccgctgcggtggctggcggtggcggcggcctgcgtgggctcccagcccatgctgctccgggcgttcgccgcggcgggcaagctgacgctggacatcaacatcctgatgctcatcgcggtcgccgggtccgtggcgctcgggagcttcacggaggccggcgccatcgtgttcctcttcaccgtcgccgagtggctggagacgctggcgtgcagcaaggccagcgccgggatgctgtccctcatgtccacggtgcccaagactgtcgtgctggccgagacggggcaggtcgtcggcatgggcgacgtcgcggtcggcaccgtcgtcgcggtcagggccggcgacgtggtccccgtggacggcgtggtcgtcggcgggcacagcgaggtcgacgagagcagcctcaccggcgagtccttccccgtgccgaagcagccgcagtcggaggtctgggccggcaccatcaacttagacggctacatctccg

SEQ ID NO: 51673 - DNA, 713 bp, Zea mays
  Clone ID: MRT4577_147120C.1
agacatactccgggctgatcgggagacgtgagctcgtgaagcaggacccgacaccccaagcgctgcgctcgaacgtctgctctgctcttgtctactcctggaagagagagactctttcctgccctcctcttatatatcaggagccgagcatggactcttcctgatgaccccttcccttctgccgcaaagacagagacacaggcgtagatctccaccatcatacttaaagtggaatcagcgcgataagaaatgcactgtagatcgaatgtgccacgagtgcattccatatctatgcgattacatggcagtaaacaatgccctccgttgcgccctgctctggattcgtcctagcgcgcaacactttcggaccttttgatgggctaccagacagactccaaggtgccggctgatcttgcagcaattactctcatgatgtcacctatctgagaacaagtccatagacccaatcctctgtgatgacgattacatcgacacgatctaggtgggatcagtgcacttcattgcacaactcgtctggatcgagcgtgcttgcgacgacttggattctgccgtatgtgatcctctcatcataagggatgctcaagcccacagtgcgccgaaggttgtcaacgcgtctgtgcaacagctctctcgatgcagctcacgcgtgctgggagacctatttactgttcatgttactgaggccttagata

SEQ ID NO: 51674 - DNA, 2279 bp, Zea mays
  Clone ID: MRT4577_147121C.1
ggcgtactggtgcaccgaagaagagattcgacaagttgctggcttggactctgttgtgttccttcgcctcttcattttcagcatccgtatcttctcaattacttctcttgtttgtgtatttgttgtgcttcctgttaattatcatgggaaagagatgaatcacaatcatattccggaagagtcactgaatgtttttactatagccaatatcgtcgaagaatctcgaaagctttgggtgcactgctctgctttatatgtcataacaatctcagcctgcattcttcttttccacgaatacaagtatatttcgaggaagagactagcacatgttactggatatcctccaaatcctggcctttttaccgtgcttgtccgttcgattccgaggtttgacaatgagctgcttgatgacacaatcagaaatttctttgttaactatcacggatcaagttatctgtcgcatcaaatgatctttcgcaagggacattttcagaagtttgtggatagagcagagagggcttacaggagatttgtaagggtaagactctccgtatctgagcggaatgggagatctagcatgtccaggtgtggtgtctgtggtgtaagagcttcctcatttcagctttaccgcaacaagttcatcgaggccaagaagtcagacctcactaatccggaagtagtggaagctcaaaagaactgtcccggtgccttagtgttcttcaagactcgctacgcagccgtcgtcgcctcacgggtattccagtcatcaaaccctatgctatgggtgacagatctggctcctgagccacgcgatgtgtattggtcaaacctctggatcccctacagacagatctggctccggaagctagcgacactcgcagctagtatcgttttcatgttcgtgttcatcgtccccgtcgcgtttgtccagagcatgatgcagctggagcagctcaaaaggatgttcccgagcttgacaggtctcctaaataagtccttcttcgccagagtgataacgggataccttcctagcgtcaccttgctgttgtccctgtacaccgttccaccgctgatgatgctcttctcctctatagaagggtccatctctcgcagagggaggaagaggagcgggtgcttgaaaatcctcttcttcaacatctggaacgtcttctttgtgaacgtcctgtcgggatccgtgctcaaccagctcaacgtcttctccagacccaaggacatgccgacgatgctagctgaactagtgccgaagcaggcaacctttttcatcacgtacgtgctcacctcaggctgggcgagcctgtgctcggagatactgcaggtgttcaacttggtctacaacttcttcagcaggttcgtctgctgctgccatcgccagaataaggaatacgtttactctttcccgtaccacaccgaagtgcccaaagtcctcctgttcaacctgctcggcttcacgttctcgatcatggcgcccctcatactcccctttctgctcgtgtacttctgcctcggctacttggtgtatcggaaccagattctgaacgtgtactacccaaagtacgaaatggggggcaagctgtggccggtcatgcacaacgccatcgtgttctcgctggtcctgacgcaggtgatcgcgctcggcgtcttcaccatcaagcgctcccccgtgacggcgggcttcaccatcctgctgctcgtcggcacggtcctcttcaacgagtactgccggcaccgcttctcccgcatcttcgaggcctactccgcccaggacgtgatcgagctggacagggacgacgagcagtccgggaggatgcaggagatccaccagcatctgctggacgcctacagccagaccccgccgggggagggatcctccaggggcggcagccaggtgcccatagagctcatcatggaggaccccgcgcaggaggcgtcggagtccagccaggagctctgcgacaccgtgcaggaggtgtccggggccatccacgaccacgaccacgtcgtcgaggacaaggcgcattccgtgtagactagatggtctggactctctgcgggtgcgtacgcatgtagatgctgtacagcgcgcatagcagactcgaaacccggaagcaaatacttacatttataaatctacgtgtatagaaacaacagtctaatctattggcaatcgggtactttggcccggcccaacacttcactctctgtccattggattggcacatcggacggcccatcttaattctgatcttttatatttagtt

SEQ ID NO: 51675 - DNA, 412 bp, Zea mays
  Clone ID: MRT4577_147122C.1
ggccgaggggaaagagcccccccgataaaattataaaaaaaaaaaaatacagggtccgggcccctaaaaaaaaaaccctgggagttacgggtcccaaaaaaacaaaagcccaacagggaagacttggaaaaaacccaaaaaaaaaaacgaaaagcccaacaaaatcccacaagtaaattcgcctttttaggtcccttccaaaaaaaaaacccgggctggaggccaacccactcgggtaaattggaccccaaaaacaagttgttttttggggccaacccaacccaagccctaaaaaagttctccaaaaacgccctttggtttgccaaaacggtaaacaccggggggccaaggggaaaaaagggggccctggggagggaccccaagaggggggcccccggggggaaagaaggga

SEQ ID NO: 51676 - DNA, 226 bp, Zea mays
  Clone ID: MRT4577_147123C.1
ttctctatagcggacaacctgggaactgtttttttgataaactacgcattttaattaacacgggcaggaaccaaactacatcatatgaatatacatctagtccttaagcaaaacaagaacaaatttgtgtttttcttgaacgaatgttcatattattaaaaacaagcgtgcttacatacccttaggttagttcgacaacaaaaccatggttataccgcgccgtatt

SEQ ID NO: 51677 - DNA, 451 bp, Zea mays
  Clone ID: MRT4577_147124C.1
gagcacatagcacagaccatttatgtgactacaagtccggtttggaatatctatcgcccgttaaattttaaactaaaacactacaattaaaaaagatcggacagagtatataggtggacaattagtgaaactgttgattataaaaagatgtagaagaagaacaaagttacgctgggtagattacgtgcagccactggctgactttgtcatggaaaggcgctactgacgcacaaacacgacgcccagtttttggcacagcatcttgctgacctgagaggtcaaaaacagccacgggagtatagcaaccacaaccttgctgggggcaggatgaacacatctgcaagaaaacatctttccgaaaggctgtataccatgatggggaactgcaggaacaggagttctccttaggcccagaactagcacagcataaattatgaccttggtcaccgac

SEQ ID NO: 51678 - DNA, 805 bp, Zea mays
  Clone ID: MRT4577_147125C.1
gggaagtttgtggcccgtaagaattcatttcactgatcttttgcttattatatattccttgcataagcaagtaagcagcgcagcctatgttgggactatttgttcaggaaggctagtttctctctgtaggatagagcagagagggcttacaggagatttgtaagggtaagactctccgtatctgagcggaatgggagatctagcatgtccaggtgtggtgtggggggtgtaagagctttcttatttcagctttaccgcaacaagttcatcgaggccaagaagtcagacctcactaatccggaagtagtggaagctcaaaaggttttcttgtaccttgtaattgcatataatgatttatgtgcatcggcatgaaccttgttttgctgctgatcgaacagaactgtcccggtgccttagtgttcttcaagactcgctacgcagccgtcgtcgcctcacgggtattccagtcatcaaaccctatgctatgggtgacagatctggctcctgagccacgcgatgtgtattggtcaaacctctggatcccctacagacagatctggctccggaagctagcgacactcgcagctagtatcgttttcatgttcgtgttcatcgtccccgtcgcgtttgtccagagcatgatgcagctggagcagctcaaaaggatgttcccgagcttgacaggtctcctaataagtaagttgagaagaccaccaccggtagctgctcctgctcttgactcttgaagatctggggggttttgctgctggcttgactggagtcgggcctgactaattttttgcct

SEQ ID NO: 51679 - DNA, 675 bp, Zea mays
  Clone ID: MRT4577_147126C.1
aggaaacgacagacacgcgttgttcacgtgcatgctgcatagacgacaccgacctgggcggagtaggcctcgaagatgcgggagaagcggtgccggcagtactcgttgaagaggaccgtgccgacgagcagcaggatggtgaagcccgccgtcacgggggagcgcttgatggtgaagacgccgagcgcgatcacctgcgtcaggaccagcgagaacacgatggcgttgtgcatgaccggccacagcttgccccccatttcgtactttgggtagtacacgttcagaatctgcatgcgggacaggaaacccatatcaaggtcaaacagacaaagatatgagcgactgaagcttccggtatcagtatcatgtcacatgcacagagagtagtttcaagaattgtcacacctggttccgatacaccaagtagccgaggcagaagtacacgagcagaaaggggagtatgaggggcgccatgatcgagaacgtgaagccgagcaggttgaacaggaggactttgggcacttcggtgtggtacgggaaagagtaaacgtattccttattctggcgatggcagcagcagacgaacctgctgaagaagttgtagaccaagttgaacacctgcagtatctccgagcacagactcgcccagcctgaggtgagcacgtacgtgatgaa

SEQ ID NO: 51680 - DNA, 113 bp, Zea mays
  Clone ID: MRT4577_147127C.1
caacgcacggatatatatacctagtatatatatataaacaaacctgtgctcgactcccgccaaacgctttcttcggtttttgctagcccggcccgtttccattttgttgaggg

SEQ ID NO: 51681 - DNA, 824 bp, Zea mays
  unsure (1)..(824): unsure at all n locations
  Clone ID: MRT4577_147128C.1
ggacgactgtcctcgagcccggccgggaccctgacgtctgaacctgcgacaaaggagtcagttccctcaaaagcgtctatcgcaacctgtgcagtaccgcttcacgaagccttcgatcgcgagccagcgttgtcaccagagccaccaggccaattgctctccgtgctcttccctcactgccaataacctccagagccgtagctgcatcgtccttctccaccatgacaaccctcaagagcgaagtgaagcaggcgctcgccaagcgcgagtatgatcctgaaatcaaggacatggccagctacatccacaacactcccatcgattcggagctcgcgtatgacacggctcgctgggtgtttatcgacacgctgggttgtggtctcgagggtctgcgtttcgagcaatgcaggaacattctgggtcctgtcgtcgaaggaaccgttgttcccaatggcacaagggtgcccggtaccaactaccagcttgatcctatcaatggagccttcaacattggcgccatgatccgctggctcgacttcaacgactgctggctagctgccgagtggggccacccctctgacaatctgggagctattcttgcaactgccgactggatcactcgtacgaacaaggctggaggcaatctcggcaatggcaagatcttcaaggtcagagatgtgctcgaagccatgatcagggcgcacgagattcagggttgcatggccctagagactccnttcacaaggtcggactggaccacgtcattcttgtcaagcttgcgtcgactgctgtcgtatccaagatgatgggcctcagcgaggctc

SEQ ID NO: 51682 - DNA, 610 bp, Zea mays
  Clone ID: MRT4577_147129C.1
cccacgcgtccgcggacgcgtgggtaataatctcactggctcactacctcgttcacttggcaagctgaagaacctgaaaaatattaggttgggtcagaatcttatatcaggcaacattcctgttgagataggtgcatgcttgaacataactgtgtttggtctcgcacaaaacaagctcgagggtcctttacctaaagagattgggaggttgaccttgatgaccgacttaatcctatgggggaatcagctttctggtgttattcctccagagataggaaactgtacaagtctgagcacaattgccctctatgacaataatctagttggccccattcctgcaacaattgtgaaaatttcgaatcttcagaagctatacctttacaggaattcattaaatggtacaattccatctgacattgggaatctttctcttgcaaaagagatcgacttttcagagaatttcttaactggagggataccaaaggagctggccgacatcccaggcttgaatttactctacctctttcagaaccagcttacaggccctattcctacagagttatgtgggttgaaaaacttgagtaaacttgatctgtcgatcaattcactg

SEQ ID NO: 51683 - DNA, 239 bp, Zea mays
  Clone ID: MRT4577_14712C.1
tttctggggggttttataaaaattatggtggtgttttatttttttccactcgtgcctgaaaaaaaacaacctctcatctcaaaacatcattcctaaaaaattccccgagctttataaaataatgataaaatggggaaatcccccaaaagggcaacttttctaagccggtctgaaaaaacccagacaacgggatatcgaggccaaactacacttaactcgaattaacttaatcaaaaggg

SEQ ID NO: 51684 - DNA, 504 bp, Zea mays
  Clone ID: MRT4577_147130C.1
atggggcctagggaaagggcgtgcttgcgtgaagcggtacctagtgatccggaccgcgtgaatgagatcggagggcatgatcaagcactggggaggttaacggctatggcggtgccgctcttgctcacgacggtgaggtcgccagagctagggcgggtgcaggctagaggggctctaaggtcaccggagttggctaggaccggcgagaaggacccagcgtactcgctgatggggttccggacacgagatcgagaccagggcgtgagaacgccggagggaaagctctgggcgaatcgggggaactccagtgacgaatcccggtcgcggggagggggaatccggtgcgccaaggctcggattagctccaacgagggcaggggaatactatggaccaacacagggacacagtgcgaggctgaattggccagtcaccacgtggggtgcggcgaaccggcgtggatgaactccggcgaggccaagttggctaagtttaggcgcaaataa

SEQ ID NO: 51685 - DNA, 258 bp, Zea mays
  Clone ID: MRT4577_147131C.1
ccgggctgaccactgcaccactgctcacttcgtactgttgaccgggcttttccatatgcaggaacgctagctcctgatcgtaaacgctagatagtcacagacacgcgagctaaaaagcgactccaacacgggatgcgcttagcgcagtcgaaaatctatcatgccgtttgctctagacaacgaaagacgcgaaatttccttacgcagagttgacctacagctattaaaaatttgggtacggaatgactgttaacatac

SEQ ID NO: 51686 - DNA, 401 bp, Zea mays
  Clone ID: MRT4577_147132C.1
gttctttcttgtatgcacatgatcagagctccacatgacctctggcgtgtcacttagcacctggataaaaggctcaaagctgaaatacacagctgcgccggctgtaaccagcgcaattttttttcctgagactgggcccgcgaatgcacaggtccccccagtgcgttgcaagcttgggacaaaacccatggtgagattctccaatgcccatgggacttgtcaaaacaagatgcatacggggtctagatcggttgaggaactatcacaacaaccttgaccaattaaataggttatactgcatgatccacaacaggtgtcaccggctggtaaatatgacaaggcgactgatttatctttgttcgactgaaggtctttttcccccctttagacctgagcatgcc

SEQ ID NO: 51687 - DNA, 397 bp, Zea mays
  Clone ID: MRT4577_147133C.1
ccttccttggaaactatctctcccgcttgaatcgggcacgaagcgatgcgtatggaaaccgccgccacgatctcgcctagcccatgttcatcttccccgaagagagcccacgaagcagttttctcacccactcgcgcccagctcagctagaaccgcctgcgtcccggcctctgcccgggcgctcgtctggctcggcagcctgcctgcgcggcggcgtggccagccagccagcccgcggcggcgcggcttgtggccctgttcggtcagcaagtcgctatcgtgctcggctgttcccaggcatcgacgaggaagaaccgccgtcgcgcgtccatcgacctcgcgtcgcgcgtccacgccgccacggagctcacagcattaccaccaccttaccgtagcg

SEQ ID NO: 51688 - DNA, 302 bp, Zea mays
  Clone ID: MRT4577_147134C.1
gagcaaaggctctgaattcagctgactataattcaaagccccaactcatggaaaaacatgtttgattttttcaatacataagccattcccccgggggggttaaaaattaatccacagcttcctcgtttgggatcagggtatagcaaaactagaatctgtcaaccaccaccatgtgaaaaatcccaaccagccaattggctttctgtattttccaaagggataaaactaggcgtcatccttgtagggggattcctccgggacttgcttgataagtttcacccgcattttataggcatcatccc

SEQ ID NO: 51689 - DNA, 707 bp, Zea mays
  Clone ID: MRT4577_147135C.1
atcgaggccggccgggctccgctcgccaccgtcgtctaagttaggctagggttcgaccagctagcggaaatggtggccttcaggttccatcagtaccaggtggtggggcgcgcgctcccgacgcccggcgatgagcaccccaagatctaccgcatgaagctctgggccaccaacgaggtccgcgccaagagcaagttctggtacttcttgaggaagttgaagaaggttaagaagagcaacggccaggtcctggccatcaacgagatctttgagcgtaacccgacgacaatcaagaactacggcatctggctgcgctaccagagcagaaccggataccacaacatgtacaaggagtaccgcgacacgaccctgaatggcgctgtggagcagatgtacaacgagatggcctctcgccaccgcgtgaggtccccctgcatccagatcatcaagactgcgacggtgcacttcaagctctgcaagagggacaacactaagcagttccacaacagtgagatcaagttcccgctcgtgcaccgcaaggtcaggccgccgaccaggaagctgaggaccacgttcaaggcttcgaggcccaacctgttcatgtgatttagctgtgcgagcttggtgaaccaatcgacgtgttgcgggttgttcgctctcggcatacttgaagtggtaatgttgatctattcggattccttacctcg

SEQ ID NO: 51690 - DNA, 216 bp, Zea mays
  Clone ID: MRT4577_147136C.1
cctgttaacatttatgcctcattttttattcctaaaacacggagggggacaacaaggggttgcaaattttgtgaaaacccctaggctactacgggactcaaaatggctgaaaaattgggaaatataagggaaaagactcctatgggtattaggttgaaaaattgaacaattgacctccacacttttgttttaatttctggatccaggaattttttt

SEQ ID NO: 51691 - DNA, 904 bp, Zea mays
  Clone ID: MRT4577_147137C.1
cgggccaaaagcaacttctggtacttcttgaggaagttgaagaaggttaagaagagcaacggccaggtcctggccatcaacgagatctttgagcgtaacccgacgacaatcaagaactacggcatctggctgcgctaccagagcagaaccggataccacaacatgtacaaggagtaccgcgacacgaccctgaatggcgctgtggagcagatgtacaacgagatggcctctcgccaccgcgtgaggtccccctgcatccagatcatcaagactgcgacggtgcacttcaagctctgcaagagggacaacactaagcagttccacaacagtgagatcaagttcccgctcgtgcaccgcaaggtcaggccgccgaccaggaagctgaggaccacgttcaaggcttcgaggcccaacctgttcatgtgatttagctgtggtcagtgtatgcgatcataagagtcacaagtgtttctgtttttttttaagttttgacttcctaatagtaatacttaatcggtttgatgaaaaaaaaaaaaaaaaaaaaaaaaaaaaaaaaaaaaaaaaaaaaaaaaaaaaaaaaaaaaaaaaaaaaaaaaaaaaaaaaaaaaaaaaaaaaaaaaaaaaaaaaaaaaaaaaaaaaaaaaaaaaaaaaaaaaaaaaaaaaaaaaaaaaaaaaaaaaaaaaaaaaaaaggggggggcgtttttaaggaaaccaattttaaaccccgttgtttggaaaataaatatttttttttaggggccccaaaaaaaaaaaaaggggcccccttttaaaaacccgcaaaggggaaaaaccctggggtaccccaaataaaaccctttggaaaaacccccctttttccccacgtgggaaaaaaacaaaaagcccaacccaatcccttttcc

SEQ ID NO: 51692 - DNA, 972 bp, Zea mays
  Clone ID: MRT4577_147138C.1
agggtgtcgaacagctcgcggaaatggtggccttcaggttccatcagtaccaggtggtggggcgcgccctcccgacgcccggcgacgagcaccccaagatctaccgcatgaagctctgggccaccaacgaagtccgcgccaagagcaagttctggtacttcctgaggaagttgaagaaggttaagaagagcaacggtcaggtcctggccatcaacgagatcttcgagcgtaacccgacgacgatcaagaactacggcatctggctgcgctaccagagcagaaccggctaccacaacatgtacaaggagtaccgcgacacaaccctgaacggcgctgtagaacagatgtacaatgagatggcttctcgccaccgcgtgaggtccccctgcatccagatcatcaagaccgccacggtgcacttcaagctgtgcaagagggacagcacaaagcagttccacaacagtgagatcaagttcccactcgtgtaccgcaaggtcaggccgccgaccaggaagctgaagaccacgttcaaggcttcgaggccgaacctgttcatgtgatttagctgtggtcagtgtatgtgatcgtaagaatctgtgttttaagttttgacgctaagacttgggtggtttgatgattcaactcgttttgaaacgtgcttggtgaaccatttgtgcaaaaaaaaaaaaaaaaaaaaaaaaaaaaaaaaaaaaaaaaaaaaaaaaaaaaaaaaaaaaaaaaaaaaaaaaaaaaaaaaaaaaaaaaaaaaaaaaaaaaaaaaaaaaaaaaaaaaaaaaaaaaaaaagggggggcccctttttaaagaaccaaattttactaccccgtgcttgaaaagaaaaattttttttttggggcccccaaatttaattccatggcccgtgttttaaaaacgtggggatgggaaaaaccttggggttcccaaattaaatggcttggaaaaaaatccccttt

SEQ ID NO: 51693 - DNA, 818 bp, Zea mays
  Clone ID: MRT4577_147139C.1
gcacgaggcttcctcccgttagactaggttaggctaggctagggtgtcgaccagctcgcggtaatggtggccttcaggttccatcagtaccaggtggtggggcgcgcgctgccgacgcccggcgacgagcaccccaagatctaccgcatgaagctctgggccaccaacgaagtccgcgccaagagcaagttctggtacttcctgaggaagttgaagaaggttaagaagagcaacggtcaggtcctggccatcaacgagatcttcgagcgtaacccgacgacgatcaagaactacggcatctggctgcgctaccagagcagaaccggctaccacaacatgtacaaggagtaccgcgacacaaccctgaatggcgctgtggagcagatgtacaacgagatggcttctcgccaccgcgtgaggtccccctgcatccagatcatcaagactgcgacggtgcacttcaagctctgcaagagggacaacactaagcagttccacaacagtgagatcaagttcccactcgtgtaccgcaaggtcaggccgccgaccaggaagctgaggaccacgttcaaggcttcgaggcccaacctgttcatgtgatttagctgtggtcagtgtatgcgatcataagagtcacaagtgtttctgtttttttttaagttttgacttcctaatagtaatacttaatcggtttgatgattcaactcgttttgaagcgagcttggtgaaccaatcgacgtgttgcgggttgttcgctctcggcatacttgaagtggtaatgttgatctaaaaaaaaaaaaaaaaaaaaaaaaaaaaaa

SEQ ID NO: 51694 - DNA, 383 bp, Zea mays
  Clone ID: MRT4577_14713C.1
tatagtgagtcatattaatcatggttgagcttgtccagaaaacatggataagtgaggtctcatgcagaaacggatcaaaatacaggatgtaaggcactaacaaagcattaagaaggacggccatactggaggttctagtcatagatatagttgtctccagtgaacaaggcacttctaagatcgtctgcttatttcacttcagtgagctccttatgcaatcttcatcacaggtgttacctcggtgttaccagactttgccttctggaaaagcatgctcctttctgtagtgggtatactgcgcgacgcgctagaatttttaccacgtctgatgtctttcccatcttcacggatcactggtccgcaccatgtacagcttcttcaac

SEQ ID NO: 51695 - DNA, 257 bp, Zea mays
  Clone ID: MRT4577_147140C.1
atggaaaatttggaggggaacgcgcgctggcgcgcgcaagcgactagggggggatccaacatccatgggtgccaatgccaatcaaatcaaagagaacaaaagaaagaagggccctgaagaagtcaaccgcttgggactggcccactaccacgggtggggggcgctctcgaggccggggtcccagtcgagcgccttttccccgggctggaggaacaccccctcccggggcggaagtttgcgcgcccggacccgtgggt

SEQ ID NO: 51696 - DNA, 387 bp, Zea mays
  Clone ID: MRT4577_147141C.1
tcgggtccacgcatacgtcagattgcatcctctacacaggacacccttattattttattgtgtttgtcaccacacatttccaaaccatacatcaacaatatttaatgggcatttctcgaccaataatatcgcattggtactcccacttacatttacacacataggcaagctcctctcacgcaatagagtctacaagcatgcaccggattacatcgtctcgatgctacacctatttcactctacagctgaatatggatatcagatcgacaaatctgttcatgatttgtggacgatgtcttcatgctctgtacgcatacacgatgatattacacggtgcggtgtcttgactctaacatgtcagttgtcgaaactctgctctgttctcac

SEQ ID NO: 51697 - DNA, 847 bp, Zea mays
  Clone ID: MRT4577_147142C.1
attgacggccgccatctcccctgttcggttttaggagacctgcgccgctcctccggccacgcgagcacgccgaaatggtcgcccacaggttccatcagtaccaggtggtgggtcgcgcgctgccgaccccgaccgatgagcaccccaagatctaccgcatgaagctctgggccactaacgaggttcgcgccaagtcgaagttctggtacttcctgagaaagctgaagaaggtgaagaagagcaatggccagatgctcgccatcaacgagatcttcgagcgcaaccctaccaccatcaagagctacggcatctggctgcggtaccagagcaggacggggtaccacaacatgtacaaggagtaccgcgacacgaccctgaacggcgccgtggagcagatgtacaatgagatggcttctcgccaccgcatgaggtccccctgcatccagatcatcaagaccgccacggtgcacttcaagctgtgcaagagggacaacacaaagcagttccacaacagtgagatcaagttcccactcgtgtaccgcaaggtcaggccgccgaccaggaagctgaagaccacgttcaaggcttcgaggccgaacctgttcatgtgatttagctgtggtcagtgtatgtgatcgtaagaatctgtgttttaagttttgacgctaagacttgggtggtttgatgattcaactcgttttgaaacgtgcttggtgaaccatttgtgcatcgacttgtgccgagttgtttgtactcggccccctaatgttgatctatctggagtgggtgtttttaaaaaaaaaaaaaaaaaaaaaaaaaaaaaaaaaaaaaaaaaaaaaaaaaaaaa

SEQ ID NO: 51698 - DNA, 838 bp, Zea mays
  Clone ID: MRT4577_147143C.1
gggtacctcgaggccggccgggacccgtcgccgcttcctcccgttagactaggttaggctaggctagggtgtcgaccagctcgcggtaatggtggccttcaggttccatcagtaccaggtggtggggcgcgcgctgccgacgcccggcgacgagcaccccaagatctaccgcatgaagctctgggccaccaacgaagtccgcgccaagagcaagttctggtacttcctgaggaagttgaagaaggttaagaagagcaacggtcaggtcctggccatcaacgagatcttcgagcgtaacccgacgacgatcaagaactatggcatctggctgcgctaccagagcagaaccggctaccacaacatgtacaaggagtaccgcgacacaaccctgaacggcgctgtagagcagatgtacaatgagatggcttctcgccaccgcgtgaggtccccctgcatccagatcatcaagaccgccacagtacacttcaagctgtgcaagagggacaacaccaagcagtttcacaacagtgagatcaagttcccactcgtgtaccgcaaggtcaggccgccgaccaggaagctgaagaccacgttcaaggcttcgaggcccaacctgttcatgtgatttagctgtggtcagtgtatgtgatcgtaagaatctgtgttttaagttttgacgctaagacttgggtggtttgaagattcaactcgttttgaaacgtgcatggtgaaccatttgccgactgccggcttgttcgtactcggcacacttaatgttgatctatatggagtgggtgatttatttccttaaaaaaaaaaaaaaaaaactcgagcccgg

SEQ ID NO: 51699 - DNA, 1165 bp, Zea mays
  Clone ID: MRT4577_147144C.1
cattgggtacctcgaggccggccgggttcctatctataattttagaaatttataattcttctgttttactggacggaattttaacgaattaggtttctactaactaaaactatgacttcatagcttttccatccaaaaaaagcctttctactttaagctccacatttctagacattctggtagttcgaccgtggatttaacccgtcgccgcttcctcccgttagactaggttaggctagggtgtcgaccagctcgcggaaatggtggccttcaggttccatcagtaccaggtggtggggcgcgcgctgccgacgcccggcgacgagcaccccaagatctaccgcatgaagctctgggccaccaacgaagtccgcgccaagagcaagttctggtacttcctgaggaagttgaagaaggttaagaagagcaacggtcaggtcctggccatcaacgagatcttcgagcgtaacccgacgacgatcaagaactacggcatctggctgcgctaccagagcagaaccggctaccacaacatgtacaaggagtaccgcgacacaaccctgaacggcgctgtagagcagatgtacaatgagatggcttctcgccaccgcgtgaggtccccctgcatccagatcatcaagaccgccacagtacacttcaagctgtgcaagagggacaacaccaagcagtttcacaacagtgagatcaagttcccactcgtgtaccgcaaggtcaggccgccgaccaggaagctgaagaccacgttcaaggcttcgaggccgaacctgttcatgtgatttagctgtggtcagtgtatgtgatcgtaagaatctgtgttttaagttttgacgctaagacttgggtggtttgatgattcaactcgttttgaaacgtgcttggtgaaccatttgtgcatcgacttgtgccgagttgttcgtactcggcacactaatgttgatctatctggagtgggtgatttatttccttacctcggtcatcgcttctcctgcgttactgaatgaacgaatggtaatggtagtctcatggaaaaagagttccaaatttttgaactcatggaattcgaaatttcgtacgtgacacgcgtgtaaatcataatatgtcgtctgtaattcctatactgtgagcgtacgtattgtttatactc

SEQ ID NO: 51700 - DNA, 407 bp, Zea mays
  Clone ID: MRT4577_147145C.1
gaacaaaaaagtcctgttcttcttttgaactggccgcacttgctttattcaccaaattacaccaccgccccaagccgaagcaaaaaaaaaaagggtgacagaaaaggatgtatgcgcggtgggggaggactggggcacaccacccggcactgggcaaagggaccccaccaccataaaaaggcgacccccactttatttagcccacattttttgaatcccgcaccggacacgtccaaacaacagacactgttaaataaatacggggttacgtttgacagatacacacacacacacaaaaagaccccagggaccagacctttctaaacagcaaaatcccgagtaatactgccatgtacgcacgaaagaaaataccccaccatgagcccacacagatccactggtgcctg

SEQ ID NO: 51701 - DNA, 948 bp, Zea mays
  Clone ID: MRT4577_147146C.1
gccggccgggtcgggaaaaaaacgcctccgctcgcctccgtcgtctaagttaggctagggttcgaccagctagcggaaatggtggccttcaggttccatcagtaccaggtggtggggcgcgcgctgccgacgcccggcgatgagcaccccaagatctaccgcatgaagctctgggccaccaacgaggtccgcgccaagagcaagttctggtacttcttgaggaagttgaagaaggttaagaagagcaacggccaggtcctggccatcaacgagatctttgagcgtaacccgacgacaatcaagaactacggcatctggctgcgctaccagagcagaaccggctaccacaacatgtacaaggagtaccgcgacacaaccctgaatggcgctgtggagcagatgtacaacgagatggcctctcgccaccgcgtgaggtccccctgcatccagatcatcaagactgcgacggtgcacttcaagctctgcaagagggacaacactaagcagttccacaacagtgagatcaagttcccgctcgtgcaccgcaaggtcaggccgccgaccaggaagctgaggaccacgttcaaggcttcgaggcccaacctgttcatgtgatttagctgtggtcagtgtatgcgatcataagagtcacaagtgtttctgtttttttttaagttttgacttcctaatagtaatacttaatcggtttgatgattcaactcgttttgaagcgagcttggtgaaccatttgtgcatcgacgtgttgcgggttgttcgctctcggcacacttgaagtggtaatgttgatctattcggattccttacccgaaaaaaaaaaaaaaaaaaaaaaaaaaaaaaaaaaaaaaaaaaaaaaaaaaaaaaaaaaaaaaaaaaaaaaaaaaaaaaaaaaaaaaaaaaaaaaaaaaaaaaaaaaaaaaaaaagggggg

SEQ ID NO: 51702 - DNA, 837 bp, Zea mays
  unsure (1)..(837): unsure at all n locations
  Clone ID: MRT4577_147147C.1
cattgggaccctcgaggccggccgggtactactgcgcgcactgctgcagcgaccgcggcttcgtctgccccggccacgcgaagaccccttacgtcccagcgtcccagtgcagcaagcgccagcagaggctcgcggccgttgacgtcgagctcatgcccatctccaagcgcccacacaggcccgcgcttccctccgtcgccgcccacaccaccacatcgtccgttgaccagccgatcgtaacgccggcgctgcagaggttcgcgcgggaagtgagcttggacgccgtgttccgccgcgtgcggctaggagggcccgagccggacgtcgcgtactacaccaccatcaccatcgccgggcacgtgttcaggggagtcctgtacgacgtcggcccccacagtggcagcacggctgcctcggatacggacgggagcggtgaagaagtagggtcgtcgctcaccacggccggcggcagctgcctggatctatcgctgggaatgtgaggcacgcaaaaagccacgccattttgtcatgctagctactaggctactaccatccgctttgcatgctcagtcactatcttgctttccatcgattgatggtaccacctgagacctgagataggattaggctgtttgttccctggtcgtctgtggagatcacactctgcatattgacggttccactgtcatcttgactagtttttctgatttccgcctgtaagaaagtccgaaaatcgagatcttattcactggcgacagctggataagtacttacacacncggtggaagcggctttaatagcataaacctattttttgaaattttaattttttctggg

SEQ ID NO: 51703 - DNA, 456 bp, Zea mays
  Clone ID: MRT4577_147148C.1
acttttttttttttttttttttttttttgttttttttttttttttttttttttttttttttttttttttttttttttttttttttttttttttttttttttttttttcgctaaaagcaccacagtggggaaataaaacggacaaattaacagggggaggtatccccaaacccaggcccccaagggggattaaaaaggaaaaaaaaattggggggtaaaaaattttaccctaaaacttggagggacccaaaaaagcaaaaaaaaaaaaaaaaggcctgggaaaaaacttttattgctccgaagatccccaaaaaactgattggaaaatcacgcatgaaaccaggggctgatcattggcaaagggcaaaacaaacagttggagggggaacgttaacttaataaaacggtcccactagggagaaaagcatccttgatcactgggacaattccacctttg

SEQ ID NO: 51704 - DNA, 374 bp, Zea mays
  unsure (1)..(374): unsure at all n locations
  Clone ID: MRT4577_147149C.1
cctgcatcagctcggcgtcaccaccgttggtcgcttatgcaacctagaatagggagagatccgctcgccgcctccaccgcggctgactcttcctccgcgcaaactcgccggggcagagttatctggcgccggtaccgtacgcatcgggggaaaaacaaggtttatgggatgccgggggccggtgtggagccgacgtcgtcgacagccgaggccgcggcatggctaccgtcgcgcatgtagagacctgngagggtctcctccaagcggtgctggccgaccggatgcagacggttgccttcgcccacgccagcgccggcctctgatgacgaggcaggtactgaggtgaagggcgtggatggcgcctccaccatcgt

SEQ ID NO: 51705 - DNA, 695 bp, Zea mays
  unsure (1)..(695): unsure at all n locations
  Clone ID: MRT4577_14714C.1
cccttcccaccccggnaccctctcttccagcgcagcgcgcggccacggccgtcgtcggccccccatctcttttgcttgcctgccgtctcctccctcccccacgcgtccgaccatatcctgctccacctctcccgagtggagtccttcctgactcctgagacctgaggtggaggaacatggaagtggagaagccgcatactaggaaacccaaggggagggagttgtgaggtagagggacatggaagtggtggtgacaagtatactaggaacgccaaggggagggagctaggaggaaccgcaggaggtccggactttctacgacacaagcagacggctaggccggaaccgccagcaaggatccaggagtccgggtccgcttttctcgtcccgcccgcaaagatcgatcggaacaactagcctagccctaggccctagcccagagccctgccctgcgcaccaaagcggaggggagagacgggagactagagagagcaaatacggtacggtgcttgcgttgcggcggatggcgacctcgtcgtcgtcctctggccccggcgggccgtacccaccaccaccgtcgcggttcggcgacacgacgctgaccaaggtgttcgtgggcgggctggcgtgggagacgccgtccgatgggctgcgccaccactttcgagcctacggcgacatactcgaggccgtcg

SEQ ID NO: 51706 - DNA, 141 bp, Zea mays
  Clone ID: MRT4577_147150C.1
gtctagtaagctgctggtgtcggctggaacgacgtatcactcaatggggcagtacgaataaggggaagtcacgaaggctgtgctacaagcttcccaacaatgttgaagggtgacattgctatgatatctgcagatcttcct

SEQ ID NO: 51707 - DNA, 350 bp, Zea mays
  Clone ID: MRT4577_147151C.1
ttttgaggatgttggacgcgtatatagggatgaaactgacttatatgatggagatggagctgctgaattaagacatataatgttttgacagggatatgttgtactgcatgaactgtatcattatgatataacaagtgaaatagcattgattgatactgtaaatactactcaatgattgagtaataatgttctcttttataattaaacgatttaatgtatttgtcacgaaatactgctataatgaactgtgtatatggaaaggtaatagattagaaggaaaaagaattatttaggggcggacagtgtataggatacaagattacttaaggtgaatgtgacgttggaatttt

SEQ ID NO: 51708 - DNA, 528 bp, Zea mays
  Clone ID: MRT4577_147152C.1
ggaactctgccactttcgaaaatggtggtgtatattattattcagagagaggtgaccgactgattgatcttgatgctttccgtgaaaaacttctccagatttcacaagaattgaactcacaattaaccgagcctgagaaagctggactaaaagaatcagttcatcatttgctcaaatgggcgtggcgatataacaaaaatcttgaagagcaggctgcccaacttcacatgttgactggctggtcacagattgttgaggttgctgtatcaagaaggatgtcattattcgaggactgttctcagctattgtttgagagaagcataccaagttctcagtgaccctacacagcgccaagcttatgactcgcatgggaaagacgacatctcaacgtacgttcagttacaaataaattacttgccgccgcttttcagtggaaccagggcttgttggaacatgggaaagtttcttatttctatgtgaatcaaactgtttcaaaccagtccagtgccttttttttggcactgctgc

SEQ ID NO: 51709 - DNA, 1939 bp, Zea mays
  Clone ID: MRT4577_147153C.1
cggactctggtcgtgacgcgtgccgcttttttttttttttgatgggaaacaatgactagaacatttcatttcccatggatgcaaatgtatccactgtttatgctaaaatacagcaggccgacaacagaataatataatgggcatcataacatgtacacctacagcttcatcgatcaacaatagcaaaacacacctgtacacaagacacggctgctaccaagcatacgcgaccaaaataacagggaggtgcagagaacacctgacagactcctgtgttcccctctgctccaggttcatcatgcaaatgatctagtattataggcaatgttaaacagagcccattttacaagcaggttttatctggactcaagggattcgatccctccttgcgccaggcggagctgctggcatcgggaacggacaatagactccgttaacatgaggcgcctccacatacgggctcgggacaggaggctgattaggagtgaactgtgcctctctatttggggacgagtcaggggagctgccgtcattgccatccatgttgtctatattcttcgtttgtgatgtttccccctcgctagggttgaccttagccccctggaaaattcttcctaaagtttttaagcctttagcacggaggcgcaattcctcctttctggcactactgtcttgaagtaccatttgacagacatgggataatgtggcttctatgtcagcaacgttaagcttccacagagaatcaaccatgactttcttatggttttccatgtacatttcaagttcctcctctgtgtactggccctcagcactcatatacttcgtcaagttatcttgcaactgcataagagctattgcacctgtggcagctgttacttgggatttgataaaatgtcctttgtccctaaaccattcggcaataaatggaacacccaaaaacatcactttctttccaagttcttttgcagcttgccttgaatatacatagccaatagtgttcaacataacaactccatatgctgcatttctaagtttggacacctctgcttcagcatgctggatgaattctgccttatttccttgcacatagatgtgtagccggtttttcagtgtctctgcaagtttttcttcccgatccttttgaacagcctgcattctctcttgcagctttcttgcatcaatctgctcatcttcaccaaaattatcaagtgaagccattgatgccattgccagttgaccaatatattcctcaaaaagctcactaccaaacagaattgcaaaaattgttgcaggatcaataatcccctccgttgagatgccgtctttcccatgtgagtcataagcttggcgctgtgtagggtcactgagaacttggtatgcttctcctagttcctggaacttctccgcggcctgcggatcattcgggttcttatcggggtggaccagcctcgccttgacgtagtacgccttcttgatctcggactcggtggcggacgggtccacgcccagcacgtcgtagtaccgcgtgtccttcaccattttggctccctctgctcaagcttcgatctcccctttgacttccccggatcaggatccaggtgggagcggatccgtccgggtatccggttggtggagaggtgacggggtgcgccgggcggtgggagccggcggctgcggtggggcgccggggtcgggggaggaaccggcttttcaggtccggccacgcacacaagcgcgtcgtctagactttttctaaagtctccgggccggccagcctcgagcgattcttttagtccagctttctcaggctcggttaattgtgagttcaatgcttgtgaaatctggagaagtttttcacggaaagcatcaagatcaatcagtcggtcacctctctctgaataattatttacaccaccattttcgaaagtggcagagttcc

SEQ ID NO: 51710 - DNA, 635 bp, Zea mays
  Clone ID: MRT4577_147154C.1
cttcttagccactaaaaccccatctctcattcttcacaagctacacgtactctcttcgtcaaagctccccactcctcttccaacaaagaacacatagaacaccgaaggctttacaccgacatacataatcatgcatcatcaggcaatgtggaagccagcatggttagaggccctcagcacagagaagttcttcgtggcatgccccttccatgagcacgccaagaagaacgagaagaacatatgctgccttgactgctgcaccagcatctgcccacactgtgtgtcgacacaccgggtacaccggctcctgcaggtccggcgatatgtctaccatgacgtcgttcggctggaggaccttgagaagcttattgactgttccggtgttcagtcatacacgattaacagctctaaggtcgttttcctgaagaagagaccacagaataggcaatttaaggggtcagggaatatttgcacctcctgcgacaggagccttcaagagccctatttctactgctctctggattgcaaggttgagtacatattacggaagaagaaagacttgtcagcatacctgcgtccatgcaagaccttgcagcttggtcctgacttcttcatttctcatgacgctgatgatg

SEQ ID NO: 51711 - DNA, 411 bp, Zea mays
  Clone ID: MRT4577_147155C.1
gatcgtaccgctccggaacgctgcatattcctaaccggatccgacgccggaggagactgcccctcgcatcaaaccttactcttcatatagccccgttcccgttggaccagccagtctttgatgaaaggacagagcgcagctgtttgactgacgtcggcttgactcatctcgcaaggggttgcagagggcttgagaagttaagtctggtgtggtgttctgccatatcctcaacaggcttggtgaggatagctgagaattgcaagaatttgacttctttggatctccaggcttgctttattggagatccaggacttgctgctattggggaaggatgcaagctgcttaggaaattgaacttgcgatttgttgaaggcaccacagatgaaggcttgattggattagtaaagaact

SEQ ID NO: 51712 - DNA, 455 bp, Zea mays
  Clone ID: MRT4577_147156C.1
tttatattttttttttttttttttttttttttttgttgttttttataaaatttggggtttttttttttttttttttttttttttttttttgggacccccaaacggtttaaaaaaaatggggaatgacttcaaagttaacccattcctggatgaggggggaacattggttaataaactagggtgccaaaaagggggagagggggggaattttaaaagggattccccaaattaaacgggatgcacttttcctcctacaccaaatttttttactgaaaacacaaaaaaacttgggggcttttataaagccccccggaaaaccaccatccatgggaagctgcagtctccggaatttgccatgtaaaaccaccggggagatacagggttccctttttagggcgttaaaatttacaaattttacgggtgtttttttctttttttgaaaacttcaagttttt

SEQ ID NO: 51713 - DNA, 477 bp, Zea mays
  unsure (1)..(477): unsure at all n locations
  Clone ID: MRT4577_147157C.1
ggcggcaccctccnccctcgaccgnccccgnccccgnccccttccggcgcgcgagcncgcccngagaggcaaacgcgagancgggngncgcngnngaagacgagngcangcncaagnncggcgagcngcagncgaagaggcngcaccgcnncctaactnnncaagaggacgacaagggcaaggagancgnngnggaccaggncggggagggcgcgaccagctacgaggacnagacaaacagccnccccgagaaggacggccganacgcgancnangannncgacnnngncacngcagaagaagnccagaagagcaggancnncnananccaaaggnccccanccnccgccaaggngaagagcaagangcnnnangcaagcncaaaccaaaaanncaagagngggcncaagggcanncaggnggaacggcaggcnacggangcaagngaaancagccnngaagagaacaaggancggg

SEQ ID NO: 51714 - DNA, 198 bp, Zea mays
  Clone ID: MRT4577_147158C.1
aacaaaaattttataattttaatttttggaagaagtgaacaacgaggtcatgtaacactgttgcataaaacactaaggtgacgatgatctctcgaaaccaggacttaccatgttaggaccacatgctacagaaaatctcatctattccagtaccatatatagggattctgaacagctaaattgtaccatgaaagtcca

SEQ ID NO: 51715 - DNA, 261 bp, Zea mays
  Clone ID: MRT4577_147159C.1
ctctcctttagctcggaacgcacacaccgcccgggctgcgatctgcgatcctcgatcccctctgccatccaagatgcagatctgtcgcaagactctcactggagagactatcaccctgagatgcggagtactctgacaccattgacaacgctaaggacaagatccaggacaatgaaggcattaccccggaccagcagcggctcatctcctctggcaagcagttcgacgacggacgcacacttgcctgactctacatgcaga

SEQ ID NO: 51716 - DNA, 254 bp, Zea mays
  Clone ID: MRT4577_14715C.1
gaggaagaagaacaggacaattattcgtttaccaccactagctagctagctacgcacggcggcaaacacagaccacgctgctacaacatactctcagcagcttgatttagctagagatactgaagggtgtccttccgatctacttcctccctcgtcccggcctgcatgctgcacccggccatcctcacttgcacgcgcaggcctcgcaggcgcacctgccggcgccgcacttgcccccgccgttctcacctccg

SEQ ID NO: 51717 - DNA, 266 bp, Zea mays
  unsure (1)..(266): unsure at all n locations
  Clone ID: MRT4577_147160C.1
aaaaatcctgnatctcnanaatgttaactccattattgtctaggtttccactatatggtctccttattaaccttgggattcctcagccttaccaatatctctatcttccggncngnnattcatggatgaccactgcttcattacatgtgctttgctttacctgngaattttatccaatcataaagttcacttcttcaatcatttttcatacgtaaccttatcatacacttagngcatcaggcagcgactttgcagntctcagaatt

SEQ ID NO: 51718 - DNA, 146 bp, Zea mays
  Clone ID: MRT4577_147161C.1
cccaactacccggcaggatcggaagacaactatccagaatcgcatagacttcaaagccgcctccttactatgcataccttcctcgccacggcggtcgacgtgagatcacataaacaagggtgaaagctgatgctgtgcttggtatc

SEQ ID NO: 51719 - DNA, 2548 bp, Zea mays
  Clone ID: MRT4577_147162C.1
gccggccgggttcggctttgcgtcgcccccactccttttcctccccgtcgcggcgtcgccggctcccacggtccaccgacgactcttcttcctcacctcctcccgctccagctccagctcgtctctctcctcgcctcgcgtagggtttcgcttcccgtctcgccgccgtcagcatgggggacaactacgatgacgaaggcgagccgatcgtgaacctcgacgaacgggaaccctcccctgagcatcagccgtacgaagacctcgatgacgacctcgacggcggcggcgattggacccgcgaccgctctccgacccccgtccacggcgacgacggcggggcagggtcctcctccaagccccgaaagcgccttctcaagaagggcggcggtggaggcatgcccggcgatgacgggctggatgactttgggttggaggacgaggacgcggacccttcggctgaggcgaggaagaggaagggctcgtcgtcgctgagggacctcgcgaggggcggggcgggcagggagaagaaggctaagaaaatgcggatggaggacgacgggagggggagggacactgggatggtgagggataggcggggatcaggaggaagggactcaggcggtagggatgaccaggatgatggggagagggagatccaggagctctgggataccattgctggtggtgagtcagaggatgaccaagaaggtgttagaaccgtagatgatgataatttcattgatgacactggagttgatccagctgatcgttatggcagcgataatgagcgacattcacctggacgttatgcacaggctgaggagggtgaggaggacgatgaaatcgaacgactcttcaagggtggtaagaagaagaagaagaagaatgatcgccctcgtgcagatattggccttatagtggaacaattcattgctgagtttgaagtagcagccgaagaagatgcaaacttgaataggcaatcaaaaccagccattaacaaacttatgaagcttcctctgctcatagatgttctctccaagaagaatcttcagcaggaatttcttgaccacggagttctcactcttctaaaaaattggcttgagccattacctgatggaagcatgccaaacatgaatattcgatctgctgtactgaaattattaactgattttccaattgacttggaacagtatgaccgaagagagcagcttaagaaaagtggtctgggaaaggtcattatgtttttgtccaaatctgacgaggagactactgcaaataggaaattggctaaggagctggttgataaatggagtcgaccaatattcaacaagagcacgagatttgaggacatgaagagatatgatgatgaaagagcaccttacaggcggccacaaatgaagaaaccttcatcgagtagctctggaatggaatccagagatgatgatcttgatgctgacttttcacaacgcaagtctgggcaaagtagttcaaggcagcacgcttctaggccggaagcctcgcctttggactttgtcattcgtccacagtccaaaattgaccctgagcagatacgggctcgtgctaagcaggctgtccaagaccagcgtcggctgaagatgaacaagaaattgcagcagctgaaagcgcccaagaagaaaaaccttcaggcgtcgaagctcagcgtggaaggccgtggcatgatcaagtacctgtagatcacccgctatggcatccgcagtcagcagtgcccagcacattatacaggacctgcatgggcccagggattgctggattactaagaagcatcctatcaccattccatggcaaacagcccggcatcaataattccttggatcttttttccaaatatttttcttgcctggtagggtgcagcatctgcgcttcagaaaccggttgatttgagcactatctatgagcatgtataaatatggtgcttttcaagcagagtggtgcctttatattgtataaaatatttgtcatgcttatgagttacagttaactctgtctatgttgtctcaatgtactacctatcaagccctcttaatggagggttgtgatagggtaagcaagtcaacgttaaatctccataaaatgataggttaagcgagtcaacattaaatgtctccaatttaatggagatgtttccttggaaggaatgatctgtacctactgcaaattgatactttcaagatactgttgtgaaggcagacaaaatagagtttgcagacaatgattttacctgtggtctacttgatggaagttatctcccaagctgatctgtagagtctcaccttcatcttagcaatgctcatttgagttctctgccaaaggttagtgtttaatatgtctatatatgcagaagtcggtcatatatttgagtgacagattgtaccatccagaattttccacagttattcatatactttctggtggaagataaaatatgaaactgtatgtaattgacgcatcatgatggatacggatgttcattatgctatagcaagtagtacaatgtgtacttgctgtc

SEQ ID NO: 51720 - DNA, 564 bp, Zea mays
  Clone ID: MRT4577_147163C.1
aggaagaaaaaccgcccgcttggcgcctctccttcgcagattactgcgtagaaggtaacaccagacatgaccgtggacgcactcgacgacacgtcgtcggcgtgctatacggcgcgtccgtggacgaacttctgctcgccaagaactccccgctcgcccgttgcattgacgaccaggacgccgccgcccagctcgaagcagctcatcacatgttactcatgcacagcttatcacactgaacgcgtgggaaaggtttctaattaccgcattcggtttgctgaaactaaacctgtaaaaacttgcacgaactaggaccaccacacaaacgatgcaacgcactatgatgaatgcaaccattacattaaagacttcatcttccagcagatgggcaatccactcatgtgcttaaagcgcactaatggtcttcacctatgctagctgaagctcaacatcttctactacatgcgtacacaactccatgatgtgccacgatctatactagcaacaggatttggtgcatcactcatatttcttggcatagaaaaatatgaacttagggaatgc

SEQ ID NO: 51721 - DNA, 1216 bp, Zea mays
  Clone ID: MRT4577_147164C.1
cgcacgccggccggaggcccctcggggcccggccgcgcaggcaagcagatcgtcctgactcctgatggcacaggcacaccaccctcttctcctactaattcttttgctcttcctctcctccactgccattccttcctccaagagaacccagccgaagttctctgccgtcttctacttcggcgactcggttctcgacaccggcaacaacaaccatctccccacggtagctgtggcgaaccatgctccttacggaagggacttcccagggaagaaaccgacggggaggttttccgacggccggcttatcccagacctcctcaacgagaggctgcagctcaaagagttctcgccgccgtttctggacgcaaggcttccgaacagcgacgtcgcgacgggggtgaacttcgcttcggctgggtcaggattcaacgaccagacgtcgcggctgtccaacactctgccgatgtcgaaacaggtggacctcttcgaggactacctgctccggctcagaggcatcgttggggacaaggaggcttccaggatcgttgccagatctctgatctttatcagctcggggaccaacgatttctcacactactaccgttcgccaaagaagaggaagatggagattggtgactaccaggatattgttctccagatggtacaggtttatgtcaaggaactgtatgaccttggggggcgacagttctgtttggcaggccttccgccgtttggctgcacacctatccaaatcacgttgagcggagaccctgacagggcatgtgtggatgagcaaaactgggatgctcatgtctacaactctaaacttcaaagacttcttgcaaagttgcaaggctcactccatggaagcagaattgtgtacgtggatgcatacagagctctcatggaaatcctggagaacccggccaaatatggatttacagagacaacacgaggatgttgtgggactgggctcagagaggttgctctgttgtgcaatgcattcactcctacctgcaaaaatatctcatcctatgtattttacgatgctgtgcacccaacagagagggtttacatgttagtaaatgattacatagtcaacgatgttattccacagttttagttaatcaaatacccaaataatgttttcttcttgtactaatatacgcaactaattgttttgccttcatacttaagtccaggatacaagagctaa

SEQ ID NO: 51722 - DNA, 692 bp, Zea mays
  Clone ID: MRT4577_147165C.1
gaagaagaagaatgatcgccctcgtgcagatattggccttatagtggaccaattcattgctgagtttgaagtagcagccgaagaagatgcaaacttgaataggcaatcaaaaccagccattaacaaacttatgaagcttcctctgctcatagatgttctctccaagtaagatatctggaatctaagtgccagtgcatattgtcatctgtttatagctgacacctgacattaaaatatttcttgtttatctccatttcacaggaagaatcttcagcaggaatttcttgaccacggagttctcactcttctaaaaaattggcttgagccattacctgatggaagcatgccaaacatgaatattcgatctgctgtactgaaattattaactgatgtaggcatctttattttcttcggcccttttgcactgtagagctttggtttgttttgcacaagaacgtagttgtctgtgatctatttttggatggcttggaatttggttgctaatggaagttttatgcctcctgcagtttccaattgacttggaacagtatgaccgaagagagcagcttaagaaaagtggtctgggaaaggtatacttataccagtccctcagatatattattctgcagaagattatttgttatgcgctaaatctatccattggtgcatatttaggtcattatgttttgtcc

SEQ ID NO: 51723 - DNA, 173 bp, Zea mays
  Clone ID: MRT4577_147166C.1
ctactactcactggcctctgatctgacgatcagtgagcagactgatgactggaatggctgtagggacacactgaacgagcgcagtagccgtatctgatgaaattaggaggcgagcaacttcactactcagatagctgctcatggcatgagtgacaatgacacccttatccaga

SEQ ID NO: 51724 - DNA, 442 bp, Zea mays
  unsure (1)..(442): unsure at all n locations
  Clone ID: MRT4577_147167C.1
gtggcacttaacttggnatcttgaaattcaaggttggtcatggtgttgaacggttctgttccttcaaagcaacagagcatggatgcagtatcgaacaactagcacttgtgtttgccactatattagtgaagcttcattggttgactttggtagtttcaatctgatctccgccctacttgtagatatcgactatgtggatggtgggtttattgtaacctacacaacttgactattgtagcatgcaagttgtgtgttaatgatattttgtcaggtatgctaaaaaaaaaaaaaaaaaaaaaaaaaaaaaaaaaaaaaaaaaaaaaaaaaaacaaaaaaaaaaaaaataaaaaataaaaaaaaaaaaagggggccttcacctttaccttacccgcccgaatcccaaaaaaaaaaagggggtccttgtccaacaccctaacctttt

SEQ ID NO: 51725 - DNA, 301 bp, Zea mays
  Clone ID: MRT4577_147168C.1
tcggtcattctatgccaccacggatgacagtccgtgggacagtatggacacgacaaccaacaccagcaaggactaggatagttagtgctagaggactgagaccggacgatgtaaaattcgagctagtattgttgttgtgtgactgctagggatgacatttgttttgaggcttagtagttagtgcgtggggatgcaaatatacgtactggtggagctgccaggactgacggaatgaacatacatgggtaagagtggccaatgggattatacatatatatacacgggtacttactgaatcaag

SEQ ID NO: 51726 - DNA, 775 bp, Zea mays
  unsure (1)..(775): unsure at all n locations
  Clone ID: MRT4577_147169C.1
ccggccggaaaaatctaactgtcagcacatagacattcttccacgttgtgctttaccatgtcggatcagattctctacgttactgttctcgtagggttactcctactgtacaggcttgcgaattcaacagacaagcccaagatcaagggtattcccgaaattcctggtgtaccactttttggaaatctgttccaactgggaacagaccatgcaagagttgcacgaaaatgggttgcaaagtatggacctgtctttcagacacgtctgggtaacaagcgagttgtttatgtcaactcttatgacgctgttaaacatttctggatcactcaccagtcggcactcatctcgcgccccatgttccacacatttcactcggtagtttcaacatctcaaggtttcacaatcggcacttcgccctgggacgagtcgtgcaaggcccgtcgaaaggctgcagcaactgccctcaaccgccctgccacccagtcatatatgccaattcttgaccttgagtcttttgtcagcattaaagagctctttgatgactgcgagaaagggacaaaagatctggacccttccccttacttcgctcggtttgccctcaacacgtctctgactcttaactatggatatcgcatcaacggggatgtgaacagcgagttgctccatgaaattacccatgtggaacgggaaatttncaacttcaggtcaacaagtaacaactggcaggattacgtacccttgctacgactgtggggagcacagaactcttcggctg

SEQ ID NO: 51727 - DNA, 632 bp, Zea mays
  unsure (1)..(632): unsure at all n locations
  Clone ID: MRT4577_14716C.1
ccggccgggactgtgttattgacgctgattacaccaaccaccgcgtatattgaagaatcgcctcgaggctcgctacactagaacggtgcatcctgacgcaattcttttgaaacggcgcactattgaagactttgtttgtttatataaagaggccccttgcgcctgctgccattggcgctattccctccacctagcaatgcgacagcgcgctgcttaaatgtcgcccgatcatggatcgtcgcggtcgcgacgaggagtttggagtcactgggtgcccctcgcagttacacttacagtcgcgactgtaggtgtggctgcttgggtatggagccagagaaaggacacggaagaggaggacgacaatggccttgattacagtaaccatgcccgtggaggcgatcatcaagcatacgggtcccacgatgtcggctcgcgcgacattcaagggccggagaagccaccacgacccgatggtcaaagccacggaattgcgcatgcgaacgaagaagcaaccggcgggggntgggggttcgcgcgtgactggtgctctgcgacgaacaccgagccggcagcagttcttcgactcgacaggtaagactgtggcggccgggtgtccgcagctgcaagcgcag

SEQ ID NO: 51728 - DNA, 297 bp, Zea mays
  Clone ID: MRT4577_147170C.1
ggagctaacggttttagagggccgggctaaaatcacagccttaagccccccctagccacctacacatatcacacggaatataatgagttgcgaggaacactccggaaacacccggcccctggccttgtactgaaccaacgagaaaacaagggggaggtcgacgcaggcgcccgccctcaccgaagctaaccttggtggccacaaaccggagggagcaacgcaagtgagctagactttctgccctgggaaacaatggacaagagcccatggaccggagccaaaggaccagtgggggca

SEQ ID NO: 51729 - DNA, 265 bp, Zea mays
  Clone ID: MRT4577_147171C.1
acttagtatatattttttttttttttttttttatcctttttaccattttcttccccttttttccctaagggcaactctttaccttataacccacctttaaaaacaactttcccaggccaattacaaagcccccccaaagaacaaaacccaagggaaacatgcccccaaaaaccacaacatgaaccccccggcctccctgggtgggaaattcccaggcccctcaaacccccaaaacaacaaaaaatttatggcccgcctccccaaa

SEQ ID NO: 51730 - DNA, 364 bp, Zea mays
  Clone ID: MRT4577_147172C.1
gaaaaccgggcggggaattatatatttttggtgcaacccccggaccctcccctattttatatatatatatatatatatatatatatacagcccgcaggggggggccattggggggaaacatctaacaaactttttcccccctttaaaaaatcccaacaatattcgttttccctttttatttacccctgggaaaaaaaattgggcccccccttttgggcgtgataaaacctagttcccttggggggaaacttttgtttgacgcacccctctattttatcccccaaaaatcgctgggaataccccccaccctgggttgttccccccctccccccaaaaaagggggctttatcgggggttgttaaaa

SEQ ID NO: 51731 - DNA, 361 bp, Zea mays
  Clone ID: MRT4577_147173C.1
tttaaacgagacaattgccattataaaacaccagacaagcggtttcgacaaattggaggcgttgccgatggcttctctgttttggagacgcagacaacaggcaaactccaaaatggatacgagacagtcaataggagctgagcaaacagagattagtctcctttcgccattaccgtcgccgtgctcacacgccgtctgcgtcgtattcttctctccgtcgcggacagcttttgcgccgcggacaactcttgcgccgcgccgcggacagctcttgcgtctcctctgcgtctggctgccccgtcgccggacatggcaagcatcagacgaggcggcagctccgtgaccgagacaatcacccagg

SEQ ID NO: 51732 - DNA, 315 bp, Zea mays
  Clone ID: MRT4577_147174C.1
ccaagccaaaaaaaacaccccgggaattataacccggtttaccaggacaggattttggggaggcccccagttccccgtttccggcccatacaggatttgggacctttaaactggattccccgaaaaggattttttccgggccttccagaaaagtttttggcccccatttttttacccaggggatttctccacaacggacatgcgtagaaggggtttcccctgaacacaatacccctcctttttttttacggaaagcacccctttgcctccccaaagctgaaaccccagggcccaaatggaaaatttctggttttt

SEQ ID NO: 51733 - DNA, 2125 bp, Zea mays
  Clone ID: MRT4577_147175C.1
atcgcctcaagtacaaaccgaccgccccgtgggtggttccaatgctccggaggcggacccgccctcgcccacgcgcacgccgcgcgcccgcgacgccgtatcagcacgcgccgtcgagtggtggggctaggatctgcgtcgagtgatgagaaaggcagcgtcgacggcgatggcgggggcgggggctaccttccgccgccgcgcgatggaggggctggcgaccgtgctgctcctgtacgcgctcctcgtgctcgccctcgagtcgccgctcgtctccacctcgccattcggtggcgccgcgggcggtacagcgcggaagctccacctctccttcggcgcaggcgagcgcgcggcgcccgcgcgccccgcgtcggcgtccgtccccggcgcgtcggcgcacgggcaggatcatcggctctcccgcttcgccaccggcctcgacgtccgcctcctcgactccgcccgctccggcgcgctccgccggtccatagcggacgccgtcgcggcgggtgcccgcgcgttctccgacctcgaggccctcgaccccgccgtcgtcgccgcgccctccggcgagagcgacgcggccaggtgcccgcactcgatcgcgctcaccgcggaggagctcggcgcgcggggccgcgtggtggagctgccctgcgggctcgcgctggggtcccacatcacggtcgccgcgacgccccgggcgccgcacgaggagcggaaccccgcgatcgcggtgctcagggacggggagcggcacgccatggtgtctcagttcatggtggagctgcaggggctcagggcggtcgacggcgaggacccgccccgcgtgctccacttcaacccgcgcctccgcggggactggagcggccacccggtgatcgagcagaacacctgctaccgcatgagctggggcgccgcgcagcgctgcgatggatggaggtcacgcccggatgaggagactgtggatgggttggtcaagtgcgagaagtggattagggacgatgatgacaggttggagaaatcgaagacaacatcaaagacggcatggtggctgaatcggctgatcgggcagaaagaggaggtcaatttcggttggccatttcctttcgtggagggcaggctctttgttcttactctcagtgctgggttggagggttaccatgtgagcgttgatgggcgacatgtcacttcgtttccttaccgcactgggtttgtgttggaggacgctacaggcctgtcactgaatggggacctagatgtgcattcagtgattgcagggtctttgcccactacacacccaagttttgtgccacagaattatctggagttttctactgtttggcaggctcctctgctgcctgatgagccagttgagattttcattggcattctgtcagcagccaatcattttgctgaacgtatgggtgtgaggaagacatggatgtctgttgtccacaagtcaccaaacatggtggctcgtttcttcgttgcactgcatggcagaacggaagtgaatgcggagttgaagaaggaagctgaattttttcgggacattgtttttgtgcccttcctagacaactatgatcttgttgttatgaagactcttgcaatatgcgagtatgggcttgcaaactttggtttagccagggtatttggaattcctgtccgtacatttactcatgaggtggtgacattatggtacagagctccagaaattcttctgggagaaagacagtattccatgccagttgatgtatgggtacttggtacaccaaatgaacaaagttggccaggagtcacctctttgcctgatttcaagtcggctttcccgaagtgccagtctcaggatcttgcagcagttgtcccaaatcttgaacccgctggtttggaccttctctctccaatttacgtatttattgctcatggtcagaaaatgcttcggtacgagccaagcaaaagaatcacagccaggcaggctcttgaacatgactacttcaaggaccttgagatgaagtgtgagaatcctaacaacaatgaaatatttctgagcaaatcttcatatatttcactgcattatgcatcctttgtcatgttggaaacttatatggcaccctttcaatga

SEQ ID NO: 51734 - DNA, 351 bp, Zea mays
  Clone ID: MRT4577_147176C.1
gggccgggaaaaagcgaaggagagcaggaatccgatccttcagccaagccaggcagagaagcagaagacgaggaggaagacgaagcatcggcagcatgtctgaggggactgccaactgcgtggacatcctgatcgccatcatcctgcctacgctgggggtgttcctcatgtaccgttgcggccaccagctctggatctggctcctcctcagcttcctcggctacatcctcggaatcatctacgccatctacgccattatcaagaacagctagcctgccatccttgccgacgacgatccatgtatctgcatctgcgtctgctcacatgcctgacgccgacttgcgctgtatg

SEQ ID NO: 51735 - DNA, 353 bp, Zea mays
  unsure (1)..(353): unsure at all n locations
  Clone ID: MRT4577_147177C.1
tcacttaggacngagnaagtaaccggagtctgcggggagtgaacaaagaaagggccgttctgccaagaagtacaccttcagaggtctctccctcgaagatctcgttgccctcaacactgaccaactcaagggccacctcagagccagaatcagaagaagattcaacagaggtcttaagcataaatacaccagactcgtccaaaagctcagaaaggccaagatcggtgtccaacccggtgaaaagcccgttgccgtcaagactcacctcagaaacgccatcgtccttcccgaaatggtcggatccgtcgtccctgtccacactgataaaaaatttcccaatgtccaaatcaact

SEQ ID NO: 51736 - DNA, 599 bp, Zea mays
  Clone ID: MRT4577_147178C.1
ccggccgggagagattattgaactgccgaaaacgacttctattcctgagcatcactgctatccccctgaagagatgtccatataaagcccatataatctggttgccgctgccattctgttcgccgacgccgcggtgggctgtctcgtctcggcgcggctcgccatctaggtgcgaccgctacctcatgacgacatgatacgctgccgcggggagcctaccaccaacagcaacaaaggctccgtgatcaccagcagcaggcgctcctgatgcaacaggggctgcacgagcagcaccatgaacacgagtaccatgccggcgtcctcgcacgcggagccggaggcgctgatgacccagggcgtctccccggatcctcatctctcgatctggtgggctgcgtgcgtgttgggcaacagtaatgcgcgccgatctgcttgtcagattttttttctttgctttgagcatttttactaggctgcctcactggcttactgcacacttattggtggagggctagcgacagcacaagttacagcttgatagatagggaatcttgcagttattcttatatgattggaataggagcgagcgctgctgctgc

SEQ ID NO: 51737 - DNA, 356 bp, Zea mays
  Clone ID: MRT4577_147179C.1
aagaacaaacatcaaacgtattcaggattcaacgtagttttgggtagtacgcacacacagcacaaccggcccattattaaacgaacactgtcacgacgtctgacacgaggccgagatactttgacaacctccatatggagagaggtcaccagacgactcatgcacatacctagcttaaacgacccatgacttactgaccaccacggagacggagcacaaggaggagggtgctatactttaggatgctggaggatgatagggggcggtcatgctcaagctgaatgccggtggaaatcagacgctgctcgtccaggagggcgcgctaagcgaactgggtcttgctcataacactgtca

SEQ ID NO: 51738 - DNA, 569 bp, Zea mays
  Clone ID: MRT4577_14717C.1
acaccgaatcaacaccggccgaggtcagcttagctctactccagctctaatcgcagtcgcgaccagagggagagtcagctacctagacggccttgaaaatgtccatcaataagatctacctgcggagccaccaggaggagtaccacccgagcgccctcaaggtggtgttcgatgagtacatctacaccctcatctgcgacttcgccggccacatctccgtgatgtacttcaccaagctgaccggcagcgtcccgacgaacacggcggacctgatcactacggcaatgtggcacgcgttctcgctgatcgcgtcggcgtcggtggtcgcgaacatcttgttgtttacgtgaacccgcccgagaccttaggagccttcctgcgcggcgaacatcaccctggtccgcggcgtcctgtactggatgacgcagatgctggcatccaccgcggcgtgcttgctgctccgcttctcaacgggcgggtaggacacgtgcaccttcgcattgacaaccatgaccatgagggaggcgatgccgctgagaatcatgatgaccttctcactggtgtacacg

SEQ ID NO: 51739 - DNA, 240 bp, Zea mays
  unsure (1)..(240): unsure at all n locations
  Clone ID: MRT4577_147180C.1
cggataaaattaggccnattacatcatcgcgcaatggaagcaggtcaaggagagctgggcttgcatcatgcgaacgaagctcttctggagatccaagcgacccaaaccgaatgggcagctttgccccgattagcagcatacgcccattgagtgcgcaaagggcacatcattcacgtgtaacattagatcaatacatgatcttggtcaataatgggaaggtcttcacataatgactctatc

SEQ ID NO: 51740 - DNA, 361 bp, Zea mays
  Clone ID: MRT4577_147181C.1
ggggtggggtttttttttttttaaaccggggccacaaaacacctatttgattcttgggaaaaggcaaaatttggaaggaaaaacgcccggttggaaccaagggccaactaaacaccccctagggccaccccttggggacccatgcccccacaaaaaaggacagttaccaaaagcttgaaaacaaagtgtccgcccaaaacgaaggggggaaaaagtccccaacaaaaaacaaaaattccctcaaaaagaaaggaaaaaacttgaccagaagcggggggggctggacccaaaaaaaaccggtcttgatgggaaaaatttttttccaataaaacacccccggagacctacttctttcccaaaa

SEQ ID NO: 51741 - DNA, 123 bp, Zea mays
  Clone ID: MRT4577_147182C.1
agaagaaatggaaaaaccaagtatgaggtggcaagggatgagactgtaaagcatgttcagcaagttttcaattctttgggcattcatgtcttagcacagactattagagatgttatttcacca

SEQ ID NO: 51742 - DNA, 127 bp, Zea mays
  Clone ID: MRT4577_147183C.1
agtgccatctccaaacatacaagctttgcatgacattgccatttagcgagttggcgttatatacaagaggcgtggaatgttcgaccttccgatgttgtcattttacccacaggttgtgggaaacatt

SEQ ID NO: 51743 - DNA, 2078 bp, Zea mays
  unsure (1)..(2078): unsure at all n locations
  Clone ID: MRT4577_147184C.1
tacaaataacaccgatcagtacttggttctcttctcctgtgctccacattataatactgtttgatcagtcctaattggtttcagaaaagctatctcgtactagtgagttagggacgacgatgggcatggcggcgctgttgcttgtgtgggctctgctgcactgcgcaggcacggtgacgatggtgcgggcgtcccacgccgtgtatccggagctccagtcactggaggcggagaaggttgatgagacgtcgcgcaccgggtaccatttccagcctccaaagcactggatcaacgatccaaatggaccaatgtactacaaggggctgtaccacctgttctaccagtacaaccccaagggcgcggtgtggggcaacatcgtgtgggcgcactcggtgtcgaccgacctgatcgactggacggcgctggccccggggatctacccgtcgaggcagttcgacgtgaagggctgctggtcgggctccgcgacggtgctgccgagcggagtgccggtggtgatgtacacgggcatcgacccggacgagcaccaggtgcagaacgtggcgtaccccaagaacctgtcggacccgttcctccgcgagtgggtgaagcccgactacaaccccatcatcgnnnnngacagcggcgtgaacgccagcgccttccgcgacccgaccaccgcctggtacgggcccgaccgccactggcgcctgctggtgggcagcaaggtgggcggcaagggcctggccgtgctgtaccggagccgggacttcaggcgctgggtcaaggcgcaccacccgctccactccggcctcacggggatgtgggagtgcccggacttcttccccgtcgcggtgcacggcggcggccgccactaccgccgcggcgtcgacaccgccgagctgcacgacagggccctggccgaggaggtcaagtacgtgctcaaggtcagcctggacctcacgcgctacgagtactacacggtgggcacctacgaccacgccacggaccgctacannnnngacgccggcttccgcgacaacgactacggcctgcgctacgactacggagacttctacgcgtccaagtccttctacgatccggccaagcgccgccgcgtgctgtggggctgggccaacgagtcggacaccgttcctgatgaccgcaggaagggctgggccgggattcaggcgataccgaggaagctgtggctgtccccacgcgtccggcagctgatccagtggccggtggaggaggtcaaggctctgcgcgccaagcacgtgaacgtcagtgacaaggtcgtcaagagcgggcagtacttcgaggtcaccggcttcaagtccgtgcagtccgacgtggaggtggagttcgcgatcggcgacctaagcaaggcggagcggttcaaccccaggtggctgaccgacccgcaggcgctgtgcaagaagcggggcgcccgggagacgggcgaggtggggccgttcgggctgtgggtgctggccgctggcgacctcacggagaggacggccgtcttcttcagggtgttccgggccaacagcagcagcagcagcaggctcgtcgtcctcatgtgcaacgaccctactaactccaccttcgaggcgcaggtctacaggcccaccttcgccagcttcgtcaacgtcgacatcgccagaaccaagacgatcgcgctgaggacactgatcgaccactccgtggtggagagcttcggcgcgggcggcaggacgtgcatcctgacgagggtgtaccccaagaaggccctgggcgacaacgcgcacctcttcgtcttcaaccacggcgaggtggacgtcaaggtcaccaggctggacgcctgggagatgaggaccccgaagatgaacgtgccggcgcagtagctagtggtggtagtggtagctcgatctagggaaatggtctagttttgttagagaagcggttctggctcgttttcgctcacgtcgcctctcagattgttctcgatctcatccatcactacattgcaacgaattctaccactctctcggcgcctcccactggtttagcaatgaataaaaattacaggtacaggg

SEQ ID NO: 51744 - DNA, 418 bp, Zea mays
  Clone ID: MRT4577_147185C.1
caacgacacactcttggccgttggcgtcccgctcgctcgctcttccactcgctgcacccgtgcgtgacaatgcccacgcgtctcccactccgtctcctcctcctcgtcctcgccatcgccggcgccgcacatggccgccgcggcatctccttctccgacgatgaccgctctctcctcctcgccggcagcagtgatgatggttgccggcgcgacgccagtcctccggctacagtccgcggatggggaggatccttctaccaggccagcgagatgacgtacgactacctgcgatctactgacaccgtgccccccaaagacagtctagaacctctatatcactcctgtactaggtgaaagtgggacgaggaacatctacacagataccactttattataacggagcacatattcatcgcat

SEQ ID NO: 51745 - DNA, 533 bp, Zea mays
  unsure (1)..(533): unsure at all n locations
  Clone ID: MRT4577_147186C.1
cagagatctggggggggggggggggggggggggggggggtttacccgcccccgatgcgctccctgccactctcgtggggaaccaatgggcatgaatcgaaaggtggcacctaacgtccatggttgacacaccgtcattaacttacctaagctccgcaccgaaatcggactccccgttctctacccttgcacgattcccccagcctctctaactacctagctacggggcgggctgccccgatggacaaataattgcaaaccgaggagactggggcacactggtaatgaggtcttagtngtaaaggagaagttcttagacatctgcttagtnaccctagaggaggtccttctgaacacaaggaactagacctagtagggaatcaagataaaactgaccgtaacctaggagaaccttatagtgcgcacaaggaataagattcacacggatacgaccagttaagatctcactgtaatgttgagcgtccgtatataccctaggttnatttacggtgtggtcaatgtgacttgaaccgt

SEQ ID NO: 51746 - DNA, 537 bp, Zea mays
  Clone ID: MRT4577_147187C.1
cccgggctgcacccttgagatgccttcatggcgtgtccaactcaacacgttcttcctcaagcagtgcccgtggatatcctacgcgggcaccgcttggtacgccttccagtgggcacgtcgtgggctactaccaacacctaccataaccgccgtgcaggacctactctgcacgacaggcatccatgtacactggtggcagccgcctgcggtctttccatacctgtatgcattgcctagctgccgatctgtattaaggctgggcatggtctgagggcaaggtcaatgactatggggttgatgacgtcatgctcaacacccaccttgctatttgcgctcttcgtgtgtacacgcacataccaaacacagaaaaggaaagggggatgagagctacaaaggaatggaaatgcagcctccattgtttacccaattctgggttaccgtgtacacacataatctattcaaccggagaacatctatcagaaggactgaaaatctggtggatgtatcttggtcagatgaactctattattgggccct

SEQ ID NO: 51747 - DNA, 788 bp, Zea mays
  unsure (1)..(788): unsure at all n locations
  Clone ID: MRT4577_147188C.1
gcgggcggcttggcaggcaggttgtcgtcaggagtaagtgagtagtcggatcacgcgaggattctttccagagcaacagtagatattttgtgactcgtggtttcgcctgagtggacgagtgagcctttcgatggcgttgcttttaggaaaaggatgtgaatcttttgggtcaaaaaataaaatcggaatgtgaatcttttgatttaaaggatttttttgttaggttttttttatacatgcttcttcctctgcactgtgttaatccgcatgcatgggcgtgtgtgtttttgttcaatttgtgttcctcacaactccactgcgtcgcctggatctgttcactctatctatgcgaccttcgactccagcaatgatgcacgccagcacgccgatgttcttgttccaactgcaatacaacgactggtgaagaaatggagtcgcatgagctctagctacttaattttctgtgtcccctatgggcagtgtacctgccattgttctcgaaaaaggcctgccaagagatgaaagaattcaggaagatagcgatgcatcttgctgaaatcttatatatcaatataattatcatttcaaaagaaaaaaaagtaacactacgcaacattttcagtgtgctggttccactccacatttcgatggaactattgtttcggcatcgatacgtgaaatgttgaatcgagtctttaattaagaatgtccacttttatataataaggaacacggnaaccagtactaataaggattggtgagaaagaggaaaaatgctgagtaatgcg

SEQ ID NO: 51748 - DNA, 288 bp, Zea mays
  unsure (1)..(288): unsure at all n locations
  Clone ID: MRT4577_147189C.1
acggcccgcccttttttttttttttttatttttaaacacaagtgggaagggactttcacatgatgggacaatgttttgaacatgaccctacctgaaacctttacattatgtaaaaacagtgcactatatatttcttttaccttttcttaaacaacaagaaatttttccttnaaaataaaaaaagtttaaacacccctcaaaaacggtatgataaccttttttttttataaaaaaaataaaagccctatcctaaaacaaaaaatattttgtccaaaattcaaagtttaa

SEQ ID NO: 51749 - DNA, 280 bp, Zea mays
  Clone ID: MRT4577_14718C.1
gggatcccagcagggtttctgctctggggctggcaggttgcctggtattatgcccaaggccgctctgcctgggggaaagggcagccaggcagaggcccagtgtctggtaggctgctgaatttcctggaaggggtgattggatggaaagaggccagaaaccccagcctgagagactgctgtgcaccccacagttcgactgcacagagccgcctctgttggcaggaggcactgaggctccccttcctgtgtattgagaagcagtgtttgcacatatattttg

SEQ ID NO: 51750 - DNA, 258 bp, Zea mays
  Clone ID: MRT4577_147190C.1
aataaccctgtaggactccccttggctgcaatccttagagaacaggagaccccccaaatgctacatagtagtacgccggatggatgggccaagggaccaagtgccaaccacacaacactcaacaatttctgcctgtaaaaaaagatgccatattcgcatgtgggcatggctcattgaagatggtacttacagtcacagtgagagggggaggtggaaacaaggcagcacatgcaaagaactcgacagaaaccagagctc

SEQ ID NO: 51751 - DNA, 834 bp, Zea mays
  Clone ID: MRT4577_147191C.1
actccaaattcggatcgaggcccacggccatggccggggtcttgtctcgctgtaccggccgatctccccattctcccctcttcgccggtcccaccaccgcgccgatcctgatggcctccgccgcctcatcggccgtcggcgctggcaaatcgctgttccaggggctccgcaggttcctcaagaagccgtgggagatacaggcccctgcgcctctcccgagtaccgcagcgcgctgcctggcgcgctcgagtaccgcgtcaagtgcccggccaccgtgcgcgacgaccgcgacaaggccatcgtgcccacatccgatccggagacagtctacgatatcaagtacttcacccgcgaccgccgccggagccgcccgcccgtgcggcgcaccctactccgcaagcccgatctcgagagctacatggccaccaagcagttcgaccccaccattgacttccccgtaccatacgtcaacaccaccgtcgaggaggatgacaacactgtcggcggtggctaccagaagtgactcaggaaagcttgctggttaatttggtaggtatcctttgattggacttcatcagaagcggcactattttcattccagctattaaatatccccttttcttttgttcctagtggaagttttttggatgtaaaagatgacggtgtcaaataatatggcacctgtggagctcacaggatgcacatatcttgtaaattgtattctaaaactgtctacctgataccattgttactgtttaatgcaaaatttaaggtttctattccaaaaaaaaaaaaaaaaaaaaaaaaaaaaaaaaaaaaaactcgaggaggggc

SEQ ID NO: 51752 - DNA, 456 bp, Zea mays
  Clone ID: MRT4577_147192C.1
ggccgcttttttttttttttttttcttttttttttttttttttttttttttttttttttttttttttttttttttttttttttttttttatcgggataaaaccaaaaaaatatattgcttttttttaggaaacacatgccgtttggggggccccattatggagcccctctcatatgtaatctaaaagagggcacccccaacaatgggttgctgttggaggaaggcagcaaccaaagggttagccaccggtaggggataaagaaactgggggccctgttggaggtacccagcaaagttcgacacaaacagttggctgaaaggaagcagttgttgcaagaaggcaccagggtttgccccaactagcttggtaagagccggcacaatttggggcaaaaactggtggtgcaacaactgttggtgcaggaatgtaggggcattgcccaaaacgagcgggct

SEQ ID NO: 51753 - DNA, 471 bp, Zea mays
  Clone ID: MRT4577_147193C.1
aaaggaaaacacacaggggccccctcttatttccggggtttccaccatcaaatgggttttggcccccaacaccgggcccatgggtcacccatgcctttggcaatttccccatagccccccccgttgaataaaaaaagggaagggaaaaccttgccgaacttaacattattggccaaaaaaacacggcctttttcggcatcatcattgttcccagtttttggatttaaaagggggacttcactgactggggggatcgggggggggtcgtcctttcacaccccctcctaaaagcccccctggatgtagtcattgagccggttcaactcctccctgtgcttggccaccaccccccccacaaaattgccgatggaaaccatccccagaatccccgggccgtcaatcaccgggaatttgtttgacccggttttttgtcataagctgcattgcctgcaggaccttggggtcgggatt

SEQ ID NO: 51754 - DNA, 153 bp, Zea mays
  Clone ID: MRT4577_147194C.1
cctgtaggaggtaccaatcacaggcccgttcgtttcggggtgaacgaactgcttctgtattcagatcacaagtagctgatctatgcatgcactcgatcatcgtgagacgccttaatttctactatctgtatgcaggtgattcaagctgttgtt

SEQ ID NO: 51755 - DNA, 279 bp, Zea mays
  Clone ID: MRT4577_147195C.1
ccaccgcccagttttgggggcttttaaaaaaacaattcaaagcctcgggggggggatgtcctaaccaactccggggggaaaagaaaactcccaatacggccatgatcctccaaatccggccccaattttaggcttgggggggggcccttttggggaccaaaatccatcatttgaatatccggggttttgaggcctttgcccatattaaagggcccccctttttcaaaggcccatgaccggaacaattgtttcaccttttgtttggggggcccgggcaaa

SEQ ID NO: 51756 - DNA, 252 bp, Zea mays
  Clone ID: MRT4577_147196C.1
gacttatcctccccctccggttcgggttcgggttcgtgaggctctacggtttacgctatcgcgggtgagctgatcgagatgtcctcgtccaatctttagtaccgctgtttcttctgcggtctcttctgggacacggacgaccactctttccacaacgccttgagcacttacaagtgaggtcctcgagaccaagatcatcctgttatcgggagacgcattggacccgcagctactgcttcttaccttcaccac

SEQ ID NO: 51757 - DNA, 261 bp, Zea mays
  unsure (1)..(261): unsure at all n locations
  Clone ID: MRT4577_147197C.1
cttagtgcctgcgctctatcttgcggtggcgccttggctgactgtcgaggacacaactcgcgcaagcgtcggcaacgcctttctcctaagactagcacccaacttggggctcgacaaggacccagatgaggctctatgntgggagggggggactacgacaagaggacacaatgcaactctgataacaggacacattcacggtctgacgctaggcataaagacccgtctatcgctacggatgcagacagcatccatgtactg

SEQ ID NO: 51758 - DNA, 290 bp, Zea mays
  Clone ID: MRT4577_147198C.1
gaataaatgcttttctggaggacctgctactccactgatgcgatcttgccgccacctgcacctgcaggtataatctgaatatgcctaccgagcctttgaatgtcgtgatttctcgctgaaatcacctgcggcaggtgataatgaaacgctgatcctctttgactacacggcagcaccagcgttattatcattagggcagaagatgatgccatgctgcatatcacaccgatggttttgaagactactacatctccactgctgttgatgatgacgatatcagaactgcacaa

SEQ ID NO: 51759 - DNA, 366 bp, Zea mays
  Clone ID: MRT4577_147199C.1
ccgacccttccttaaccgtacgggcaggggatgtcgctatatccccgtacaaacactgggttctggttgcggatcgagcattattgattaattgatgcggctcatgacagggatggtcagcatgaacgtgatgccattgctgacagagatccctccttcattggattttgtgcccgtgccctacccgctccgtattcctactctcctgcccaaactgctctgccatgtttctcacggtcttcaatggccttgccttatgatatgctccatgaaaagcacgggaacattggtgcgcctttcactcaccgaagagaaaattgctgtgtattggtgctatactgtcgattctccacgttgaagaagatg

SEQ ID NO: 51760 - DNA, 189 bp, Zea mays
  Clone ID: MRT4577_14719C.1
cgtaaacagccccggaaaaattactcttgtgggtkcccacctggcgactgtktttcttctccagtacacctcgccagcrcgataacttaactgcgcgcgggcascscggcccgccgcccagctgcgcaggkcttcgtcgcgccggccactagaacgcacgcacataaggktcttcgttacggagtaaga

SEQ ID NO: 51761 - DNA, 1111 bp, Zea mays
  Clone ID: MRT4577_1471C.1
gggggtcgacgtggacatccagaagctaaggcggcgtgtgacagggcgcgcgcgcagctcgaggcagcctcccagtccgcggacgcggcctcggcctccatcgcccagccccgcgacgcccacctcgcgcgccagctcctggagctctgccacgccgtgctcgacatgtggcgggcgatgcggcagcaccacgaggcgcagggcctgctcgcgcagcagctgcgcgggctgagcagccgcacgtccatggaccccacgagcgagatccaccaccgggccacgcgggcgctcgaggccgccatgaacgcctggtccgcggccatggcgcacatggcgaagcaccagcgcgactacgtccacgccgtccacggctggctcaagctgacgctgacgccggtcaacggcgcggccgacgccgaggcctctcccgtggcggcggagctcaccgcgttcgtcgaccggtgggggaaggtgctcgaccgcgtgcactgcgtggacgtgctcaagtcgatcaagagcttcgcgggcgcggtccgcgccatccacgcgctccagagcgacgagctgcgggtggcgcggcgcgtgaggcagtactcccgcgaggaccgcaagtcccggatgctgcggcaggtcgagaagagctactacgactcgtacctgcccgggggcatgtcgatgtggcactgggggaggcaggcgcacgatgcgggcaacgaggtggcgcagcgcagggacgagatcgcggcttgccggaagatggtggaggacgagatgcggaggcatgccaaggccatagacgccacgaggacggccacggtcacggccgtgcaggggaagctgcctgccgtgttccagtcgatggccgcgttctcggcgtcgcttgcgaactcgctggaggccgcgtacagggctccacagcagaacaacatgcaggagtagccgctcgttcttccttgcgtttgcaatttgtttttcttgttttcaggacctatacatacaatacagaatacaaatagagaacgtagaataaggcacaagacaacattatcgacttatcgtagtgtttttggctttgttgttagccattgtaaatgaatacaaaactgcatac

SEQ ID NO: 51762 - DNA, 381 bp, Zea mays
  Clone ID: MRT4577_147200C.1
cggacgcgtgggcggacgcgtgggtcaaaaaaaaaaaaaaaaaaaaaaaaaagaaaaaagaaaaaaaaaaaaaaaaaaaaaaaaaaaaaaaaaaaaaaaaaaaaaaaaaaaaaaaaaaaaaaaaaaaaaaaaaaaaaaaaaaaaaaaaaaaaataaataaaaaaagggtggccctttttaaaaattcaatgtttattatcctacaaatctcatgtcattattttttttttagtttacctaaattaaaattctttggcctctttttaaaatattcctttttgtaaaaacctttatgtgcccaaatttatcgcctttctaaaaaatccccttttttcaatggtgattattactaaaaatgcccctccgaattaactttccaaa

SEQ ID NO: 51763 - DNA, 488 bp, Zea mays
  Clone ID: MRT4577_147201C.1
aacgcattatacacaatattcatgcatataaatattaatttcggcacgagacggtcttgaccgccagcacgctgacagatgaacatgaaccccaggagcgaccatggtatcgaccctggcgggtgcaggggggaggggcttatttagaccccattattatatttatacgactcgaggttgtcactagtggaaggggtgcgccatcgcctgaccggcttaaatgcagctgcagcacgagcagccgcaggtggtgccacagaagcaggcgttgcaaaacaaaacggcgccctcggtggccgcctcgaagccgcggcgctggcctagggggtcggggcggcgaggaccgtgcccttgatgctgctgggggccgcggtctacaggttaggggacatgcagttgcatgagctgccacaggagcaggtggagggcacagtccacttgccgttgctgcacgacatgatcacaggcgaaggggagcaagcgctagc

SEQ ID NO: 51764 - DNA, 155 bp, Zea mays
  Clone ID: MRT4577_147202C.1
actgcaagtagctcatcaaaactcattgagcgaaaaaagtttaaaatttagccaacgaatcgctgaatcggccgttctagggttggatggttgaacattctgtttatgcttttatttatttttatatcggaagtatatatgatgccggcaagttg

SEQ ID NO: 51765 - DNA, 461 bp, Zea mays
  Clone ID: MRT4577_147203C.1
ccgcccaaacccaaaaaaccaaaccaaacctaaaaaatattcaaaggaaaacaagggataacgaaaaacaaaactctgaaaaaaaaaatggaattttgcacaaaagggtttccttaagggggacttaaaaagcccacacggttcgttaataatctccaaaattgggggggaaacccctttaaaatgaacccaaccgggaaaaaaatccaggggggaaaaccaatcttgaatttgaacaaagaaggcttttgacaaaagctcgggggggcaaaaagctaagggggttaaaaaaaggggttcgaaaaaaaacccagggcacgtttaaggggacccacagaaacaaatacgtcatcgaacgcaaaagcaccaaccgcaaatctggctgccttgggggcctaaaaaatcttctaaacttcaggctggaaacggcaataaaaacaaaactggctaactgggggccc

SEQ ID NO: 51766 - DNA, 134 bp, Zea mays
  Clone ID: MRT4577_147204C.1
gtgttggctcaataacggtatagaaacactggaagtaaacatgtggtaacacttaaaacaccatatttgtttggtatgttcagaactctagacctgataaagctaattcttacatttcataaacatgcctgatc

SEQ ID NO: 51767 - DNA, 497 bp, Zea mays
  unsure (1)..(497): unsure at all n locations
  Clone ID: MRT4577_147205C.1
ggcgcagcagtggagcgtcatggacctcatgttcggcggcgtggacgaggagatcaacgggctgaggaccaagctccgcgcggcggcgcaggccgaggagcggggccggaaggcagccgacgagctcgccgcggcgctggccgcggtcaccatggaggcgaagcagctcaaggcctggctcgccgacgcgcaggccgagctggaggccgccggcgccgagtcggaccgcctgcgcggcctgctccagggcgccgaggcggagctgtggtccgccacggagcgcgccgacgcgctcgcctccgactggaaggaggccgcggccggctggcgcgccagggagaaggcgctgctggcgcgcgcgcgcgccgccgagaaggacgacgacaacgccgccctgcgccgcgcgctggagcgggcggccgaggaggcccgcgcgtccgncgaggcgctcgaggccgngcgcgccgactgcgccngcctgnnggaggccngcgccg

SEQ ID NO: 51768 - DNA, 208 bp, Zea mays
  Clone ID: MRT4577_147206C.1
aaaacaagggggctcggcttacacccccctggaatacagctcagcgggccggacgccgaactttgctgtcccggctgcgtggctttatccccaacaaatatcccgagaccagctgtgcccccgccgtttcatttgcctgccccccggcccgtctcttgtcgggcttcccattgggttttccttctgtctgtttttggttgcccccccc

SEQ ID NO: 51769 - DNA, 402 bp, Zea mays
  Clone ID: MRT4577_147207C.1
ctacaaggaacggtgcttttgtgatacagggggggtgactgcggatgtggatacggcatctctgactgcaactggaggaactgagcgcgacgagggccaccgctgcgcggttgtcctgccgactgaccggggatgcataccctactccagagggcaacatcttcacgtgagttgcgttaggagaagcccatcttccttcttgattgcctggcaggtctgtgtcacacgataccgctgggatcatactcggggtgagcaaacccatgcattaaacaaggtgcactgatggatcaatggatgctggtacccccgtcacgctattattctaaggtattcctaaggaaaaagagccgctccatggtgctggatgggatggcctgagcgtccagataactggaggga

SEQ ID NO: 51770 - DNA, 245 bp, Zea mays
  unsure (1)..(245): unsure at all n locations
  Clone ID: MRT4577_147209C.1
cttcgtaactggaacccaatnctggcncaccaacaacttttngatccacaaccacaggnananttcaaaaatncagaaaaaaattggcaggnntgaccggctaacttggccgaccgggnttctncggnccgtngcttgacccgaccaangggnaacccggacggncgaaangnagccaggggttgnttganccgnnnnccccgncccacaaaggnaggaaacggaccgtgttaagttgaccgtnc

SEQ ID NO: 51771 - DNA, 256 bp, Zea mays
  Clone ID: MRT4577_14720C.1
ctaagcagtcacccactacagacaccacaccatactggcagacgtaagtaacataatcacggagcccacgctcgacatcaacctcaacgaccacaaagtctaacgatacatcactaaatacgagcgaaccctttctgtccgtagtcatgtgcatccatacatccatcttgcttagatagcatctccatcacttcatgtctctcaatcagtaataatggaatgaactaaactacaaaaacatagctattacctatgc

SEQ ID NO: 51772 - DNA, 891 bp, Zea mays
  Clone ID: MRT4577_147211C.1
gggagcaggcaaaggctgcatatagaatgctacgtgattgttttcactattctctgaatacttcaacatgtagagccaaaatattagtgaagtactttggcgaagactttggtcctgatggatgtcgcatgtgtgacatctgtactaatggccctcctcaaatgcatgatttcaaggaagaagcgattgtgttcatgaatgtgctccagggtcgaagtggcggtgaaactgatgagatgatttacagcagagtaccccattacagctctggcaggagagggtttggcgaggcacctaattttagaatggttgtcagtcatataagggaaaagcttcctaggtttgctgcgactgacaagatatggtggcaaggtctttcccgtatattagagggcctgagatacgtagaggaagcagctgaaactcctcgtgtctccatgcagtaccctgaactgacggaggacggattaaagtttcttagtagctcacagtcggaggcacctctgtatgcatacccggacgcggcaatgctcttggcaatgaaggagccaaggcccttctctggtttctccgattggggcaggggctgggccgatcccgagactcgccggcagcgtctggcgggcaagaaggccgggagaagaaagcggaagtggcgctcccgggggcggcagcagcagcagcagccgggcggcttcaccacggcgagggagagactgactgcgatactggcaaagaagaaaaaaaggtgatgctgtgcaaggttggtggtagtaggattacattacatgtatcgtttgctgttatcgtcgaactttatatgagaatctttctgatagaagcaaagattttttttggggtcattgtgcttctatcgtatggtatgatgat

SEQ ID NO: 51773 - DNA, 857 bp, Zea mays
  unsure (1)..(857): unsure at all n locations
  Clone ID: MRT4577_147212C.1
gggactccccctcttggtgctcttgcttgaatatagttcccctcctctctctcacacacctgttcttcgatctcggcctagctagctagctagctagcaagcaagctatagcttagctcggctagccgggtgtgtcgccggtcggctaggcaagagcgccgctagcgatcgcaaaatggcggatgcgggggaggggcggcgggtgtgcggcatgccggagaaggcgcagctgcacgttgcgatgctggcgctgcagttcggctacgcgggcttccacgtggtatcgcggctggcgctcaacatgggcatcagcaagctcgtcttccccgtctaccgcaacatcatcgcgctctgcctcctcgtgcccttcgcctactttctagagaagaaagacaggccgcagctgaccttcaacttcgtcgtccagttcttctttctcgcgctctgcggcatcacggcgaaccaagggttctacctcctgggcctggacaacacgtcgccgacgttcgcgtccgccatccagaactcggtcccggccatcaccttcgccatggccgcggcgctgcggatcgagaaggtccggctggaccgccgcgacggcgtagccaaggtggcgggcacgctggcgtgcgtggcgggggcatccgtcatcacgctctacaagggccccaccatcttcggtcccagcggcggcctcgagctggcggcaaccagcaaggcggtggccggcgacaagaactggacgctgggttgcgtgtacctgatcgggcactgcctgtcgtggtccggctggctggtgctgcaggctcccgtgctgaagaagacccngcgcggctgccccgcagctgctaccctgc

SEQ ID NO: 51774 - DNA, 1966 bp, Zea mays
  Clone ID: MRT4577_147213C.1
ctcgagtagttccctctcctctctgcttctcggcctagctagctagctcggtgcctcggccaaccgggcgtcgcgcgctggccggccggcctgccaggcgagaactagctagcagcgcaagcaacaatggcagattcaggggaggggcgtcgggtgtgcggcatgccggagaaggcgcagctgcacgtggcgatgctgctgctgcagttcggctacgcgggcttccacgtggtgtcgcggctggcgctcaacatgggcatcagcaagctcgtcttccccgtctaccgcaacatcatcgcgctctgcctgctcgtgcccttcgcctactttctcgagaagaaggacaggccgcagctgaccctcaacttcgtcgtccagttcttccttctcgcgctctgcggcatcacggcgaaccaagggttctacctgctgggcctggacaacacgtcgccgacgttcgcgtccgccatccagaactcggtcccggccatcaccttcgccatggccgcggcgctgcggatcgagaaggtccggctggaccgccgcgacggcgtggccaaggtggcgggcacgctggcgtgcgtggcgggcgcgtccgtcatcgcgctctacaagggccccaccatcttcggtcccagcggcagcggcggcggcggcggcctcgagctggcggcggtgggcggcgacaagaactggacgctggggtgcgtgtacctgatcgggcactgcctgtcgtggtcgggctggctggtgctgcaggcccccgtgctgaagaagtacccggcgcggctgtccgtcacctcctacacctgcttcttcggcgtcatccagttcctcgtcatcgccgccttcatggagagggacgcggaggcctggaagttccactccggatccgagctcttcaccatcctatacgccgtcagtatatatcgatctctctacttattagcttaattacaataatatatatatgtacagagaaagagaatgagagacacacatgccctcctgacgcgcgcggcaaaagtggtggtgcaccacgcaacaacactaagctaatagctatagctagctgtgcaaatgacgcccggcctttttccattcagtactgtattattatgaactgaaaagctggtggctgggttaattattagttgtttatcgatcatcagatccctgaagcaacaaccttttggaagctagactgatgatgttcttgtgcatgcctgcaggggttcatcgcgtccggggtggcgttcgcggtgcagatctggtgcatcgaccgtggggggccggtgttcgtggcggtgtaccagccggtgcagacgctggtggtggccatcatggcgtcgctcaccctgggcgagaagttctacctggggggcatcatcggcgccgtgctcatcgtcgccggcctctacctcgtgctctggggcaagagcgaggagagggcgcgcgtcgccagggacgccgtctccggcggcgaccgcgaggggctccttgtcgcggcagccgccggaggtggtggcggcggcatcatcaggagcgccggcaataaggtggcgtcggccgcgacgcagcctctcctgctgccgtcctccacctccactgacaacgtctgaccgatccatggatggatgaatcgtcatccatgcttgcttggtgcgtggagatctgaggcagcatgcagaattaccagttattagtcatttctttgaggttttcccctgttgattttcacgcatgtatgtatgctgctacctacgtgtacgtacgtatatgcatgcatcactatggttgttttacgcctttgatcacaagacaactacgtagctaggatcgtcggagtgtgttgacgacgtttggtatgtgcatgcgcaatgcagtgcagtgctagctcatcacaggaagtgtgtgtaataatattagtttgcaggtataattatgcgtttgattaagatcgtcc

SEQ ID NO: 51775 - DNA, 2554 bp, Zea mays
  Clone ID: MRT4577_147214C.1
gggacgaggaggggaatccgggaatccaaagcagacggccagacgccgtgccgagccgagcagtccaactcccgggcagaggcagaggcagaggcggagggcggggcgagagagccgtgcggctgtccaactccccttccctatccggtagcagctgctcctatatgacccccgcaccccagcaaaaaccttcccctttttccccttcacagccccgtactactatccccgctaccgctagccgccgcgctgctcatctggtggcggctcgcctccctccccccatccgccgccgccggctcctcctctagctccctccttaccccgagctttaagctcgtgctacctgcctacctatccgtagggagagagagagagaggggagaaggttcggtcggtcggtcgggggctctcggatctcgccgctgcctccccgtttcttcgttgggatctcgctcgcttcgcgccatggccgccgtcgcgacgccaccggcccccgcgcccgccgcgccggcaccggcaccggcaccggctgctgctccggctcccgtcaccgtcgcccctgccgcggaccaaaccacggatctgctgcagaagttgtcgctggattcgcagcccaaggcggcgggtgcgacagagcctgctgctgctgccgctgccgccaaggagggtgctgtgacaaaccagccgctgagtgtggccatcccgccagagcggtctatcacgccggtgcttcaggactttatggatcccaacctgttcttcgatctcggcctagctagctagctagcgagcaagctatagcttagctcggctagccgggtgtgtcgccggtcggctaggcaacgccgctagcgatcgcaaaatggcagatgcgggggaggggcggcgggtgtgcggcatgccggagaaggcgcagctgcacgttgcgatgctggcgctgcagttcggctacgcgggcttccacgtggtgtcgcggctggcgctcaacatgggcatcagcaagctcgtcttccccgtctaccgcaacatcatcgcgctctgcctcctcgtgcccttcgcctactttctagagaagaaagacaggccgcagctgaccctcaacttcgtcgtccagtttttctttctcgcgctctgcggcatcacggcgaaccaagggttttacctcctgggcctggacaacacgtcgccgacgttcgcgtccgccatccagaactcggtcccggccatcaccttcgccatggccgcggcgctgcggatcgagaaggtccggctggaccgccgcgacggcgtagccaaggtgggcgggcacgctggcgtgcgtggcgggggcatccgtcatcacgctctacaagggccccaccatcttcggtcccagcgccagcggcggcctcgagctggcggcaaccagcaagggcggtggccggcgacaagaactggacgctgggttgcgtgtacctgatcgggcactgcctgtcgtggtccggctggctggtgctgcaggctcccgtgctgaagaagtacccggcgcggctgtccgtcacctcctacacctgcttcttcggcgtcatccagttcctcatcatcgccgccttcatggagagggacgccgacgcatggaagttccactccggatccgagctcttcaccatcctatatgccgggttcatcgcgtccggggtggcgttcgcggtgcagatctggtgcatcgaccgcgggggcccggtgttcgtggcggtgtaccagccggtgcagacgctggtggtggctatcatggcgtcgctcaccatgggcgagaagttctacctgggcggcatcatcggcgccgtgctcatcatcgccggcctgtacctcgtgctctggggcaagagcgaggagagggcgcgcttcgccagggacgccgccaccctcgtctccggcaccggcgaccgcgaggggctccttccggccggcggcggtggcatccggagcgccagcaaggcggcagcgtcggccgccacgcagcctctcttgctgccgtcctccacctccaccgacaatgtctgatcggtcgacctatgaatccttcgtcgtcatccatggaccatggtgcgtggagataagagactgcatgcgtacgatccatgaggcgctgccatgcatgctgcgcgctctggtgcacacatggattggagcagtatgatccgatccagcagtaataattatcatcagctagtcttttttttgtggtttttccttgttgatttcacgcatgtatgtatgctgcaacctacatatatgcattactatggtgtgtgtgtgtgtggtgagagcagacgacggcaaggtttattttaacttcgatcacgacctgcttgctgttcaagtatattaattctcgttgtacaatactacgtatgtacgtagccaggattgtttggaccgagcgagagcatgcatatatgcatgatcgttagtgtgtacgtcaatttctatctatatatctatctcttcttgatctattatattaaaacaccagtttcttgtgtttcttcaaaaaaaaaaaaaaaaaaaa

SEQ ID NO: 51776 - DNA, 248 bp, Zea mays
  Clone ID: MRT4577_147215C.1
ggaaaaaaccaaaaccaaaccaaaccaacttaacaaaaaagcgggacatagttcttgaaaaaggcgggcccactttttaaaaaaaaaaaaaatccgataaaacgccaaaaaaaatccgattaaccacccccaaaacccaggtgccaaccaaggccaaccttttaacaaagacgagcaacccattggcaaaaaccggaacccgacagaaaaacattggaacccaaaactggagcttccaaacgcacttc

SEQ ID NO: 51777 - DNA, 303 bp, Zea mays
  Clone ID: MRT4577_147216C.1
gatcttggatacatatacatcgagcccgcctttttttttttttttacgaattgatccacttggccgagaccttgtattttctctatgggttttacacacacagagggctgactaccacataataccatctcatacacaacgcattgctccattgacgcgtcgacttctcaccgaccccaatttgcatgaccatcatgagcccccctacttctgtcacagtcctgccacacatgatgaactgtcttgcccagaatctgaacgaataatttgtggggagagcgcggctttattttggggttgaac

SEQ ID NO: 51778 - DNA, 357 bp, Zea mays
  unsure (1)..(357): unsure at all n locations
  Clone ID: MRT4577_147217C.1
gcggccgccctntttgtgcatttcattttttttttttaattttaggaatactagtttggggttacaggcagttatgttggccatgcatgaatcatgaccgatgcaacgctttaggttccctaacaacacgcatgcatctagctttccacagtaaacaactggcggcggcggcagcaggtatgctgattcaccaacgttctaaaggaactggggggtggtgagcacgtttttaaaaacggagacgcccaggcggtcgagcaagttttggaacgggccaacgccggcgacgagcccctgcatgaagtaaccgaggatggggagcatggcgagcctgccgttcttgatctccttgagctt

SEQ ID NO: 51779 - DNA, 523 bp, Zea mays
  Clone ID: MRT4577_147218C.1
ccctccgtgacgccaacacctccacgactcagctgacggctcggcggcgccatggcggttcactggctccaaccttccccctccggcctacagtgctccaccgcccggtcgccagtgctcctccatgggccacggctgacgggtgcacgcaccgggccccgaccacaaggatcccgatggtggacaactgctgctgcactttcctagagatcctgatgacgatggtcgctgctgcaccttcatggaaatcataaatatatttatattgcataatctgctacctaaggccttagtgcctatccttaacaaatatttttttatacttgattctattgtgtaggtattgatggctgtaagacagttcaatgagcacctcattatccagagtctcacaatttaaatggcttgatttctaaagtcgaattatatttccagtcagcaatcacatattaactacacaagcaaagtgcagagatatattatgttcctttttgaaacaagttatttcttacaataccctttt

SEQ ID NO: 51780 - DNA, 333 bp, Zea mays
  Clone ID: MRT4577_147219C.1
cttctaaaaaggggacgcttttttgtttttttttagagaacttttaatgccggggggggggaagcttttgtgcgtgggcctccataatgggacctcaaggggggtccggcaaaagttaaaggtaaaaatggaccccctgaacttggtttgtttttttgggaaaaagccgaccgccaccgagggaaccgccaccacggggtttttcggggcaaccggcggggggggggggatttcccgttggggggtgccaagccatttggcctgaatgtacttgggcttcctcaaggggccaatgggcatgttggtatccttaatgcactgtttggccggggg

SEQ ID NO: 51781 - DNA, 399 bp, Zea mays
  Clone ID: MRT4577_14721C.1
aaagaaattcctgtttgagcaacacaggcttgttttttgcgaatcttaaagcttgcaggaaccagggtaaaacccgtgagctgttcttgcctacactaaacagaacctgtgctgggagccgagcctatatatatgcatctggggtacaaaactcgggcattatctattaaccaaaaccctatctattactgatcgttgcaccaaaaaatgcacaaagaacactatggacgccctgccatctagtccttctgcgagccaatatcatttcccgatgatgaagcctgtaagaatcatgagtcggcttccacacacttggctggtttgttaactagtccaggattaggcaagcgattgagcgtgaagattgcacagaaatgggtcgctacaagagcaaagggt

SEQ ID NO: 51782 - DNA, 270 bp, Zea mays
  unsure (1)..(270): unsure at all n locations
  Clone ID: MRT4577_147220C.1
atcatacattatataaactattttttggcaatttaaaactatgagtatgggtggtattgtactattgtgtgattagagattgncatngtattatgaactataaaattggactattgtaatatttagaagcatgtaattaattnaaagactattcgacaagtatcatatatatntatgtatccatttaaataatataggggggggtgggtataataatgcgatttctatttatattttatatgacataattgatatattaaaatttaaact

SEQ ID NO: 51783 - DNA, 432 bp, Zea mays
  Clone ID: MRT4577_147221C.1
gtggacatttgcaacttttttcgagttctagagaggcgaaccttatattcttatcatgtgacaggagtaaacgcacagcataaccctggatacagctacttgaagctacgcacatattatacgaacgcaacgcggtaacatgcgggatgatcattacacacagcgaggagaggacgtcccgccagctggaaattggaacaagagacctacttcttttgataaataactaaatgccccacactcccaataatggctcacacttaagctaatccatcctccacaaacgatggcgtgggagcactggagcactcattccaaacgatggagcggcgccgcctaaggacccatcaaaagaacactgtcctggaccgccggaggactcaaactacccttgcccggcttccctgtacgggcctgataaaccgcagcctc

SEQ ID NO: 51784 - DNA, 235 bp, Zea mays
  Clone ID: MRT4577_147222C.1
gaaagacgaagcagagaaagtggtcatgttcctggggggaggcatctccaaaatagtatccgaggtattcactctggatgtgtgcggtcggtaccgggtgggctttgctgtcttacttaaccagtgatctctgagagcactgtctcacggttagtcgatccttcttgacatactgctggttggctaggccataaacatcttttacgtccggaaccccttttgccatccagtggtt

SEQ ID NO: 51785 - DNA, 525 bp, Zea mays
  Clone ID: MRT4577_147223C.1
gccggccgggtcgcggatattaaagcacaacaaaccaccctatccgaaaacatgaaccaccgaaactacaatgtgcagcgcgctaccgccgttttcgagaaccagcctcacatcttccttaatgacaaggcggccggatctctcaagaacatccgctccaggaaatggtacgaggacgatgaactgcctttccgtacgcccaatactgacattggggatacctacctcgatgacaattgccctttcctgggtgtggactccatccgaggtcgtatcctcaccggctacctggcatggccagcaagatgcaccggaccttgatcttccgccgagaatacttccacttcttctcctatcactcacgttacaagaagtgccacaataacctacgccctcacgtgtcgctcgctttcctggttgagcctagtgaccaggtagctgttgctcgatgtagggccctctcccagaccgaccgcttccacgtcctccgagtactactactaaagggaaaggatggtaatatag

SEQ ID NO: 51786 - DNA, 211 bp, Zea mays
  Clone ID: MRT4577_147224C.1
gttgtggccgactgatttgatgggttattgatgaaagtatttctacacaggacaggcgtcataacaacagtggcctcgaacgaacctatgtttttaccgaagctaaggacgtcaactggtccgtgacgcatcaacttgaatacccactgctgcagaaatttagataactgcgtcgctggatgactggtgcacacccacagctgaagaaagc

SEQ ID NO: 51787 - DNA, 705 bp, Zea mays
  unsure (1)..(705): unsure at all n locations
  Clone ID: MRT4577_147225C.1
cattgggtacctcgaggccggccaggattatttctctgcagagtcgcagctgacggacgactgaaccaccgacagacaacatggccgcctccgcctccaccggctccggtctcggcggcgcctccctgctcagccgcccgaggttctccaccatcttcacgcggggcacccgattgtcggcgaggaaccccctgatgagaaggaacctggataggaatggcaggatcacctgtgtgacggttccccgccactggctgtataggtacctgaggggcatcggcttccctctcatccgctgtatggggccgtctatcgtcccgctcatcaacgggaacagtctcacggagatcttcttctccagcatcgcccaggatgtggtccactttcccacctccccgtccgtcatgtcccaggtctggctggggctagtgacctggtacctggcactgatcatcgtgctcagcttcgctgatatcagattcaaggtgagcaccgaggactacttctagaatnagaccgtgtaacatcctatccatcatccctggtgctgttattgcatggtgtatcctggcgtgctcgacgcaatctaacctttgctgtatatatgttcctatttcgtctgaatgttatgtatgatgatacttttgcgcttccatataatatctatgtcgtccgttcccgaaaaaaaaatgaaaaaaatgcggc

SEQ ID NO: 51788 - DNA, 446 bp, Zea mays
  unsure (1)..(446): unsure at all n locations
  Clone ID: MRT4577_147226C.1
cgagggtgggaggtgccgccgtcccgtcccggtgtcgcatctgcatcgtcccgtgtcgggcggtggacgtcgggtgcaggtcgatgcgatcatctatgctataaaagaacctnctccgccgcactgtcgatctgggtccgctgtgcatagcataagtcgcaagggccgactctgggggttggaggggccggccatggntgaaatgatgcaggtcgtggcctcggcggcaggcctgctaccaggtgagcggtcatggctctgcctcaacagtggtggcggcggtcatcggtggtcgctcgtcaagggtggccatggacggcggcatgataaccgctcgtggatcgtcatccctgcatgcagctcatccgccgttcgtcgttcctcgcgcccaatcgcattcttcaagggagaggaagtcgagggcccaaagctgacgcttggagatc

SEQ ID NO: 51789 - DNA, 747 bp, Zea mays
  Clone ID: MRT4577_147227C.1
gtgtcactgctcatctgttcgcgccgcgctatctcgtctgttcacctcgtgctcgtggaggagccaaagacgaacatacagccgacaacctctagcatggcgacggctgctgctgctgcaacagcgatgtgctccgttccaggcccgagcggcagcatgcggcgccgggcattctgcacatggaaaaaagccgatgctccgcgcgtcgcttcttcttccgtcgcgcgggtcgtcagggcgtccgcggcggccgtgcacagggtgaagctggtcgggcccgacgggtcggagagcgagctggaggtggccgaggacacctacgtcctcgacgccgcggaggaggccgggctggagctgccctactcgtgccgtgccgggtcgtgcgcgacgtgcgcggggaagctggcgtccggcgaggtggaccagtcggaggggtcgttcctggacgacgcgcagagggccgaggggtacgtgctcacctgcgtctcctaccccagggcggactgcgtcatctacacccacaaggaggaggaagtgcactagagtactcctagtacggagtacttgagagacgggtgacacaagacgaagttcagaattccttgtgtgcttcagtgtttttgtctgtttgatatactgtctacaatatatggaggttgcttccttgaattgcttatcagactggtctgtatgggccttataagttgaaaaccgacgagtccggcccagcagacttgggccatctct

SEQ ID NO: 51790 - DNA, 175 bp, Zea mays
  Clone ID: MRT4577_147228C.1
ggggcaaatttttttttataaaaatgataaaaggtcagaacattgccaagtaaacaaaccctttataaagggggcgagcatggcaaacagaaaaggaacatagaggcaagctgagtggagtaactagggctgaaaacacggagcaaccaacgggggggaaacaaagggctttaac

SEQ ID NO: 51791 - DNA, 416 bp, Zea mays
  Clone ID: MRT4577_147229C.1
aattaatgtgtcactgaaacagactaatcgtcagcataggaatcagaataggtagagttaataggacaatgtcaaaataaggtaacagaagcatgcgcaacaaataagtactgacacaatcatttttgtaaggcatggtcggactgtccaaattcatgcattgactaaaatctaacaatatataagttatgtgccacaaaattgataacatcggattagaattcaaaagcacttgccaataattatgatttttaactactaataaactattgtagaagtaacttgcggccaaagggtgattttgcagagtcaagctacactagaaaaatgaacagagtaccgaaattcaacaaatgatttttgggcaactcaataagaaccagaccagaaaattatttccatgggtctcaattctc

SEQ ID NO: 51792 - DNA, 728 bp, Zea mays
  Clone ID: MRT4577_14722C.1
ccggccgccctaaagtgattgacgtccaggttgatgccatgatcgaggtttcctgcaccgcgatgtctctttgtcgctgctctctctgcttccggccgggaatcgcgtggccccggtcccggccccggccccgcatcgtggatcgccggtctggcctcgccctcggccccgcgcgacgatttccacccggccggagctggacgcgcgcacgcgctcattcgggatggctcgtcgaagtggaggaagctccgcgacgacaaggcgcagttcctggaccgacgcttcgacctggaccatcctcgcgtcccagacattgcccatcacagtgcatcactacaaggcgtcaaggcctagcttcgtcggcttcttcgagccggagagcgcgcttcacgcccttgtccggtaccatgtcatttttttggcatacatctggcgcgagatcagcgacacgacgaacgcgagccaggtcgtgctgacacgtacatcatcgtcagctggaacgatcacttctttgtgctcaaggtggagagcaacttaataacatcgacatgcccggcgggcggctgcacgagagagtccttcctatctaaatttatggtttctttcttgtcaatctaagaaagagaattagattggctcttctgtgttcatctccttcttcgagtcaatttgttttattgtcagtgttacgattttattggttgggtgggaccaagatgagattagca

SEQ ID NO: 51793 - DNA, 926 bp, Zea mays
  Clone ID: MRT4577_147230C.1
gcgctatctctcgtctgttcacctcgtgctcgtggaggagccaaagaccaacatacagccgacaacctctagcatggcgacggcggctgctgctgctacagcgatgtgctccgttccaggcccgagcggcagcatgcggcgccgggcattctgcacatggaaaaaagccgatgctccgcgcgtcgcttcttcttccgtcgcgcgggtcgtcagggcgtccgcggcggccgtgcacagggtgaagctggtcgggcccgacgggtcggagagcgagctggaggtggccgaggacacctacgtcctcgacgccgcggaggaggccgggctggagctgccctactcgtgccgtgccgggtcgtgcgcgacgtgcgcggggaagctggcgtccggcgaggtggaccagtcggaggggtcgttcctggacgacgcgcagagggccgaggggtacgtgctcacctgcgtctcctaccccagggcggactgcgtcatctacacccacaaggaggaggaagtgcactagctagactgctgctgctgctgctatagaagataatatatattcgaatccgagattccgagtagcgcaggcaacatttgtaaaattgtagacagtggctactccaaccgtggatgttcagagcgacgtactgtttttatcaagttctacttctacaactgtgtatctagtctaggctcctcttgggtcggttcatttgtcgaacgttttggtttttaaccctcgctctaggttggtgaacgttttggtgacttagcacggagtacttgagagacgggtgacacaagacgaagttcagaattccttgtgtgtttcagtgtttttgtctgtttgatatactgtctacaatatatggaggttgcttcattaaattgcttatcagattggtctgtatgggccttataagttg

SEQ ID NO: 51794 - DNA, 287 bp, Zea mays
  Clone ID: MRT4577_147231C.1
ggttttttttttttttagttttatatgcatttaatagtttaccaattggtacaataagatttttttttttttaatatgcagaaaacgaataaattttgttttacacagtttgagagcaacaaatcttactgtaaaacacagagcagtattatatacattccttaactgattttatatctgtctttttgcggtgtaattttcggtttagttaatgtttagtactggagaggaggcaggaaggaatcttccacctaaataaaaagatcattttcctaatggcattgaat

SEQ ID NO: 51795 - DNA, 223 bp, Zea mays
  Clone ID: MRT4577_147232C.1
ctatggggcatctgctctctggtcagcataccagcaaacgacaaactatatagccgctcaccgggcttgacgggcctgagaccgagaggacacaaacgcgggcttctgagatgaactagcacttcttgactgactctgtggggctcgacaagctcatggctgagagacacaaactgatgcccatggacatcggtttgtgcttatttcagaccaccaacacact

SEQ ID NO: 51796 - DNA, 366 bp, Zea mays
  Clone ID: MRT4577_147233C.1
ttaaatccgttgaggggcacccacaaccgacctccccctggcggctacatattggtaacccatcagcccccttcgtgctcgccccgtccgccagacccagtaccacccgacaatgagagatcgccgccgctatcgcacgggaggggagtgctccactgccgccggtctacggggtcaattgggggggttcaaatcgggtgttcgggccattgctgtactccggtgtttgagtttctgccgcgtcgatcaagaattagagtcagtggagcccaaaattgttcgtcggagcgcaaccgggtcctcgcttccgtgcctctccgtggtccggcgtcactgtgctttggtcgactgaagacgagcaagtca

SEQ ID NO: 51797 - DNA, 531 bp, Zea mays
  Clone ID: MRT4577_147234C.1
tgcgccctgaaattccttctgtccaggcaggaagatgttggcagccaggagaggataagatggcctcgacgaagcagatcgaccgcaagtccaccgtaggcaaggacacgcgcatgcagctgcgccaccaattcggcgaggatagtcggcgccgactaccggaggggtgaataagccccacatgtacaggcccggcatggtggtgctgtgcgatgatccgcaagtaccagatgatcacggagctggtgatccggatgttgcccttccatcgcctggtccgggagatcgctcaggacttacagacggatctgcgggtccagagacaccccgtcctggtcctacaggaagccggcgaggtctatctagctggcctgttcgaggacaccaacctctgtgccattcacgcaaagcggggtatcatgatgtccaaagacattcagcttgaccgccgcattcgcagtaattgggcgtaagcctatctcgctgccggacccaatggaagaagagggactgaagagtgcaatttggaac

SEQ ID NO: 51798 - DNA, 336 bp, Zea mays
  Clone ID: MRT4577_147235C.1
ctttctttttttttttttttttttttttttttttttggggtattgggttttttacttcttgtttttttttttttggccaaagcgaaatttccactcttttgggaccttttttttttggtttcaacggggggcctacatttatttatttttatgcacacaaaaaaggctcaagggcccctcccctccattacatttccccccacagggggcaaggaaaaaccgcctgtagctacaaacgaaggtaacaacaatgtcaggggtgggatccaacacgacaccacggggggagtttcaaaacatagtttttccacccgcgttttttttaatttacccgtc

SEQ ID NO: 51799 - DNA, 353 bp, Zea mays
  unsure (1)..(353): unsure at all n locations
  Clone ID: MRT4577_147236C.1
ccggccgggaatcccattactttccctcccgtccgccccgtnttgttntnnttntttnnntgngatattttcgtggnattgacgtgtgacgtatttttgttntggaggaagtcaagactcggncccgatatgatgttcaacagtaacctcccgcggagaatcattatggagacgcagtgactgttcagcgagccagcgccggtaattatcgagtcatcctcggaggagaacatgcgatatttcaacgctatgatccttggcccggcgcagtcgccctatgaaggtggagattatacgcttgcactcccttctacctgaggtatatcccctggctgccccacagggtaggtctc

SEQ ID NO: 51800 - DNA, 467 bp, Zea mays
  Clone ID: MRT4577_147237C.1
gggtcggggagagagtgtatccgactgacacgtgaggaggcctggtggggctgaggccccggagaccgaggtgccagcggaggtcccggcggtccatgtggctcgaggcgcccatggtgaagaaggcgcccaaggagaagaaggctcctaaggagaacaagccgtccgcggggaagaagccgacggcgcaccctacctatgctgagatgattgtataggcgatcgctgccctcaaggagaggaaggggtcgagctcgttggctcatcaccaagtacgtggaggggcagcacggtggagagctccccaccaacttccgcacgcagcttaccgagcagctgaagaagctcgctgccgccggtaagctgacgagggtgaagaactccttcaagctgacggccaccggacgccaagcccaaggccgcccaagttaacgcacccaaggacgggcccaagccaaagccctcgc

SEQ ID NO: 51801 - DNA, 180 bp, Zea mays
  Clone ID: MRT4577_147238C.1
gacagatatgctgttggcctggtttggtgacagcggctagttttttctttcaaaataaatgctcacgccacatatactatactagccatttgattctggccattacaacataacgactatttgctctttggtatgatgctctatggccattacaacaaaacgactgaggatgtttggttc

SEQ ID NO: 51802 - DNA, 206 bp, Zea mays
  Clone ID: MRT4577_147239C.1
cgacccactcgttcgatgtcttgagaggtgtatgatttgttttagcctccgggcgcatgtgaaagggggggttcttttaacgttattttacttattctcgtgggtcggatagcggtgcaccgcccctccttttggcttcaaggccctgtctttccgggccgatccggtcggaagacattgtcaggtggtgagtttggctggtgctg

SEQ ID NO: 51803 - DNA, 1122 bp, Zea mays
  Clone ID: MRT4577_14723C.1
ggaccctcgaggccggccgggccgagagaatcccggtctgacgcgggcagggacgcatttctgggcgaacaaacgaatcaagcgtggcggggcggggtggttgggacggctgcgtgttggcgcggtctcgtgacctcatcgatcggcctaaaataaaaagagagcgacttcgaagcgcgcgggcctctgctctgctctgctatctaacctgggcttccctttttatgtgtgtgcgcgcgcagggatgctgaagcagacgccgcgggcgtgctgcggcgcgccgggcgtgggcgagtacaacttcaacctgacgtccaagtgcggcgagccgggggcgtacgcgtgcccggacccctccaaccactggagttgggacggcatccacctcacggaggccgcctacggccacatcgccaggggctggctctacgggcccttcgccgacccgcccatcctcgacgccaagcacctcggctaacgtcgtccatccaccgtcttctccagcgccggccccgcccgcacggccagtacagactactcctccggctctgggcgccgtcgtatgtgcgtccttattaccgacctgcaaaattggattggttgcttgtagtagaagtgtagagagagcgagacagagatagatgacaaacacgaaacgaaccggaaggaggacgataaggcgcgcgtgccggccggtcttctactcctctctgttcatagctgtccctcccatatcgtagtcaagaaaactgagcagggaaacaaaccgggcgatatatttctgttgcaaaaaaaaaaaaaaaaaaaaaaaaaaaaaaaaaaaaaaaaagggaccaaaaaaaaaaaaaaggcgggcggcactaaaacctcagggtccggcccccttcagcggggtttacttcccccctggggggatggggggcctcgcgttttttttttggaaattggtttccccttgaaattgccctccagctgccaaccccgcaacacaaaagggcaagccctgggatgcttaaggaggggggtacctcctattgatggggttgacctaaatgcccgttgtccagccggcaacccggccagcccggaggcatcctggactgccccattcaccgatgaggg

SEQ ID NO: 51804 - DNA, 408 bp, Zea mays
  Clone ID: MRT4577_147240C.1
aaatggggggtttcctttttttttcgttttggcaaaaaaaaacatagtctttttttgtttgccctacaaaaaaatgtttcggactttgatgcgttttttcagggatttattaaacttttcctccttacccctttaggggtgtttttggttggggaacatttaggacggaatcgccccttgacgtcttttttcgcccttttattttggggggacaccgggggacaacacaggttatttttgtcccaacctttgccccaaaaccaaacaacttatttggggggatggtcccgtccaatccggtcttgtttttgaaaccaacccccccttaacaaataaaacacgacccaaaggcaacgggcctttaatttttttgaaattgccgaaaaataacagggaatcccaaagttt

SEQ ID NO: 51805 - DNA, 1059 bp, Zea mays
  Clone ID: MRT4577_147241C.1
cccacgcgtccgcggacgcgtgggcgctactggacagcgtatgcagacggggactgcgaagggtgcagctacaccgggaccttccgggcacccaagtgccaagcaggctgcggccagccgacccagcgttggtaccatgtgccaaggtcctggctgcagcccagcagaaacctactggtagtcttggaggaactgggtggtggggactcgtcgaagatcgccctagccaagaggtcggtctcgagcgtctgtgccgacgtgtccgaggaccatccgaacatcaagaagtggcagatcgagagctacggcgagcgcgagcccgcagggccaaggtgccctgaggtgcgcgcacgggcagtccatctccgcgatcagattcgcgagcttcgggacgcctgtgggcacctgtggcaacttccagcagggaggctgccactcggctagctctcacgctgtcctagagaagagatgcattgggctccagagatgcgtcgtcgccatctcccccgacaacttcggtggagacccctgcccgagcgtgaccaagagggtggcggtcgaggcggtgtgctctcccgccgcttaggcttagagcccacccctacttctccgactccccgagcaacggatttgtggagagtggaactgtaagtatcgacttgcattggtcggagggaggtttagcattcgtccgtctgattccggattaggattggtgctctgctacgtctccatgaactgttcaaagcggccagctgggtccagggatggagctgtagagagagtaggagtagaagactgatcatgcgttcttttgctgttgtgtgttagtagtagctgtgtacctacccgtgacacatctcgtttttcttgaaacggaggaagacgcaggtgaagcgtgcatcgtgcctttgttgttgcaattgtgttgtgtgtggtgggggaggaaaaaaaaaagaacaggctttgatgttctcagaaactcaagttcagatctgatagtgcatggaaaatcatgaaccctgtgactgaaacctgcagaataatatacataaaaag

SEQ ID NO: 51806 - DNA, 557 bp, Zea mays
  unsure (1)..(557): unsure at all n locations
  Clone ID: MRT4577_147242C.1
gagacacaaagccaaacccaagcccacggagcgacggagagggcacaaggcccaccagcggggacgggcaagcagcccggccacccgggcaaacgaaagcaggcagacggcaagaaagagaagaaagaagaaccaccagcggccggggggcgaggcagccgcaagcacaagccggagaagggcaacgaggcggccgagcggcaccccgccgaggcaacgacaagaaagagccggcgcacagcgacacaagcgacaaacgcggcaaggaccacncaccgcaaggaagaggagagcagagccagccaggagcgccagcgccccagcgaggacaagacggaagaggaccgagccaaggacaacaacccgcgcggcacgcccaagaacgccgaaacgcaggaggagaccagcgacgagagccaagcacaacgcaccccgcgcgaacggcccgaggacgacgacgggacaccgcgccccgaagaaaaggaccagcncgagccaggaagagccacgccgaagcacaacaaggcccccgcagaggcggaaacggagaaagacga

SEQ ID NO: 51807 - DNA, 224 bp, Zea mays
  Clone ID: MRT4577_147243C.1
gtggaaaacatacatgccatttttagacttcatataactcactcttgggtagaggttcctacattcgaggggagaccctttattgctgggaatggattctttgaagccctcataaattgaaagggaaggcatgctgcacttcctcatcacactataaatcccatattagcttccccaaattgtattgggaacccttaaccaacttgtttctcaagaagctgatc

SEQ ID NO: 51808 - DNA, 1446 bp, Zea mays
  Clone ID: MRT4577_147244C.1
agcgcgccaaggcagaggtctggacgatcctggacagcgtaggacgacgggggccaccgtatgcacaggtgcactgcaaacggtgcagctacaccgggaccttccgggcacccaagtgccaagcaggctgcggccagcccacccagcgttggtaccatgtgccaaggtcctggctgcagcccagcagaaacctactggtagtcttggaggaactgggtggtggggactcgtcgaagagcgccgtgggcaggcgctcggtctcgagcgtctgtgccgacgtgtccgaggaccatccgaacatcaagaagtggcagatcgagagctacggcgagcgcgagcaccgcagggccaaggtgcacctgaggtgcgcgcacgggcagtccatctccgcgatcagattcgcgagcttcgggacgcctgtgggcacctgcggcaacttccagcagggaggctgccactcggctagctctcacgctgtgctagagaagagatgcattgggctccagagatgcgtcgtcgccatctcccccgacaacttcggaggagacccctgcccgagcgtgaccaagagggtggcggtcgaggcggtgtgctctcccgccgcttaggcttagcctgcccgcccgcccctacttctccgactcaccgagcaacggatttgaaggccgaaaccgatgtgtgtggagagtggaactgtaagtatcgacttgcattggtcggagggaggttaggtgtcttgagcttttagcattcgtccgtctgattccggattaggattggtgctctgctacgtctccatgaactgttcaaagcggccagctgggtccagggatggagctgtagagagagtaggagtagaagactgatcatgcgttctttttgctgttgtgtgttagtagtagctgtgtacctacccgtgacacatctcgtttttcttgaaacggaggaagacgcaggtgaagcgtgcatcgtgcctttgttgttgttgttcctgctctactagtggtagaggcaggagccttgcaattgtgttgtgtgtggacgtgtggtgggggagaaaaaaaaaagaacagactttgatgttctcagaaactcaagttcgaatctgatagtgcatggaaaataagcaaccctaggaaaaaaaaaaaaaaaaaaaaaactggattaggggtggtgctctggtaggtctccatgaactgttcaaaacggccagctgggtccagggatggagctgtagagaaagtacgagtataagcctggtcatgcgttcttttgctgtggggtgttagtagtaactgtgtacctacccgtgacacatctggtctttcttgaaacggaggaagacgcagttgttgttgtggagccgccttgcaattgtgatgtgttgtgtgtggtgggggagaaaaaaaaagaacatgctttggagttctcagaaactcaagttcc

SEQ ID NO: 51809 - DNA, 429 bp, Zea mays
  Clone ID: MRT4577_147245C.1
atgcacgactcagctggccactccggtttcccagctacatatagtcgcctcaaacaactgttttactggactgttcaagtgccagtgcagattctccagcgacgcaagctcatcgctcaagtcaaagtccgttggtctggcatgctggaggagcttgctacatggaaagatgccaaggccctgcgcgcacggttccctgctgctcaagttgtgttccaagcgagaggaaatgtgagcacagacgaggaacaatcggagaaaggcatcggggttccagctgacgaggagcgtgggaaaggcgcaggaacgacaaattctatggccacagtgggcagtgtaatattgtggccgtttgcgtgtgtcgtgaaaacatgtggccgtgtgccgttgcgtggtgtcgccaaggcaacaagggaactcagcgaataa

SEQ ID NO: 51810 - DNA, 724 bp, Zea mays
  Clone ID: MRT4577_147246C.1
ccggccgggccctccgttggtgtggcttcgtgcacagctcatgcatgcgacaattctatctatgccaagagcagacatgggctttcctctcccacggccacgggagaatgccgtgacgcgaacccaacttatttcgtgacaaccaatgcagctcgatagattcatggccgcctccgtagtggtcctcgccgtcgttgtttccctcgccgccgtccttccgatcgctcgcgctgagatcaagacgacacccattgtctccgactcgcgctccgtcatcctatttgaggagttcggcttcaggcgcggcggccacgccactgtctcggccaccggcatcacatggagggtccccgaggattcccagctgcaggccgtggacacgacactgatgggcttcttcctcatctccaattccctcttctacaagatcaacaacgagtccgactacgccgaggccaccggcggcgccttctgcccgctgacaagcaagtacgtgcagcggctcttcctgttcaaggaggtcgcgcccgacggcacggggaggggctccctgaccatcgactccgacgaccagtacacggtgctgttcagcagctgccaggagggcgtggaggtcaccatggaggtgcgcaccgagatgtacaacctgcggcggtccggcgccagggagtacctccccgtcggactgctgccgctgccgtggatcttcgcggcggcggccctc

SEQ ID NO: 51811 - DNA, 440 bp, Zea mays
  Clone ID: MRT4577_147247C.1
aaaagggcatagttggtgagtttgtatccacaggtaccaggtatcaaacagttgggcaccaaaactgtggactctattttcagctccaatatcagaacttatagcacacacttgacagcaaacattccactagtggcggtgcatcgcgagtaaagatcgaacacaaaaacagggtgtacccgcttcacttattttcattcttgaatgcctcaggcggctttttctggcggccaccaaggaggctcttgttcatccgctcaagtacggagcttgccgtgagccggatacgacttcatctcatgagtaacctttacaacctctactgagggcttctcatcactagtaatagggctgtagtcaccctgaacctgggtggatcatgggaagctacttccgagtagagtcaactgcattggccttcttgagcacgccttgggaag

SEQ ID NO: 51812 - DNA, 355 bp, Zea mays
  Clone ID: MRT4577_147248C.1
ccatctataacgttttattatcgcgagcgattcgctctagtggcaacaggcggattatcacaaaaaatccttggcggggacaaaacataaacagacttgccataaacggttaagatttccttctttcccctaacttaaaaaaccactctttttttttaggtctgtataaatttttcccccaaaaaaatctaccaagaaaaaggaatcccccttaattctcgtattaattgtggccttataaacccactcagtctttttttttgaaaaacatattcctatagaacttgttttccgacccccccggaagcctggtcaacatcgtttaggaaaaggtccttggccacgcagccccccc

SEQ ID NO: 51813 - DNA, 376 bp, Zea mays
  Clone ID: MRT4577_147249C.1
tgcaaacgtccgtgctggcgtacgaggaacgtatgatccgaacgaatccgacaagttgcggagagaggcaactgtccagtatgctcatacagcagacacaagacactaggcgacgtgcattgattggttatggtccaaaggcaatcgggctgccatatgatgggtatgaccatgatctagccaatcaaataaagtcatatgagcgagagatgagactgaacctactacgtaggttcactttatggttggcgagaccgtgccatgtaggaaccggcttgccactaatctacaaagatagaactcgatacccgagcttacagtggggctggatctgaaccgagaacacctgtaatacgtaagacacaacacaatgatc

SEQ ID NO: 51814 - DNA, 133 bp, Zea mays
  Clone ID: MRT4577_14724C.1
cgcggacactcagtgtcctcggggactccgacattcgttggcaacgagcttcaagcacatcgtgtgatggtactacaaggtcaggaggatggtatagttagttgtgagtttccatcgtctacgatgtcgtctc

SEQ ID NO: 51815 - DNA, 443 bp, Zea mays
  unsure (1)..(443): unsure at all n locations
  Clone ID: MRT4577_147250C.1
tttaacttctatttctaaaccattttctacaccgtcattattcacccaaggagggctcttcatcaagagaaaagagcaattnctccccctcccccaccgctatactaccattcaatatcaccctccacctccttcccctcatttctaccatacgaaccctcctcctccctctatgtgataccaacccccaccacatgcttcgactacaccctccccttccttcttcttgatcggccgactaagctattaccctctggatcagagaccttgcactacctgtatggatgataactacctctatagcttcttctcccacactgactaagttatttccgttaatataatttaaaacaatcatactgaccaacctttatgttatgtttttattaaatatagcaaccattctttattccaacatatttcttcataattatatgttcaaa

SEQ ID NO: 51816 - DNA, 217 bp, Zea mays
  unsure (1)..(217): unsure at all n locations
  Clone ID: MRT4577_147251C.1
gttgtgctgatcctcnggnacccntgcgcagcttcgtatcggctcgaggcctaataggcagttgatggcgatgagctagactaataaatgcttggattcgtacctttagctgccatggctcctgccgcctagtgcgcatagatgcatgcattataggtaacagatgggataagcttttttaacgcttcatcgggattaagaaaatttggtttttaaa

SEQ ID NO: 51817 - DNA, 315 bp, Zea mays
  Clone ID: MRT4577_147252C.1
aaaatataaattgtacatcatgatgagttatattttgaacatttttcatatgacaaaatataaattgtacatcatgatgagttatacaaatttgtagttgaaactttttcatttgaattaatttactgttttaaaatgtaattttaaaattgtctttgcctagtgttgaaaaaagcagtcgataaagagctctttgttgagtgttatatttttgacactcggtaaagaagttttttgctgagtgtcaaaaataaaacactcggcaaagagcttctttgtcgagtgcccgaaaaaaaacactcggcaaaatatttg

SEQ ID NO: 51818 - DNA, 287 bp, Zea mays
  Clone ID: MRT4577_147253C.1
aaaaaaaaaaccggcccctaaaatttgggggccactttcccccaaaaccaattttccatggacctccaaaataaaaacaagtgggggtttaaaggaaaagccccccttttgcccccctttttgccccaaataaattggcccggggttccaaaaagaggtgaaaaacctttccaacggtttttaaaaaatgtatccccccccccccccccccccttaaaaaacccccctgtgtaatcccaaacatcttggttccacaaccggggggatctcggggggttttttttttt

SEQ ID NO: 51819 - DNA, 524 bp, Zea mays
  unsure (1)..(524): unsure at all n locations
  Clone ID: MRT4577_147254C.1
gcgtccgggagtaaanagctgatactagcttggacattgatgacgattatgagcgcaacgacgtgtatatgatgcaatgactgatggacatggcacttagctagctagcgacatgacatacatttattagctctctgcagtggtgtggtacatgcnatatctatggaaaagcaatgggtacggacagggcaaccccgcagcagaacgccatgggcgacggcgcttgcctctgctgtatgctgcatttcatcatagtgtatatgtatttatctcttatcttgccgcccacccctaaacaattatcttcaactgctcctatggtcactgttgatttttgcactctagtgagggtgtggtatagtttgtcaattttgatgagagttgaaatttagtaacatataatgttccaaactggtgatttcagtggccatttgggaatttttatatgtaaaagcttgtaccacaggtgttttctgtgcttggttctgagcccttcaccaaaagcctaggatgtgaggtcaagg

SEQ ID NO: 51820 - DNA, 1290 bp, Zea mays
  Clone ID: MRT4577_147255C.1
cctatgaggaggaagtgactagagagttcttgatgctgatggaacaaggggaggaaaaggcgcgaacgccaagtcttcgtctccacaggtgtcctcgctcaagtccggagcgaagcccggctctggcgtcgacgccacgtgctacatctccgacctcggtaaggggctgggccccgtcgtgcagacccgggacggcggctacctggccgccacgaacccattcgacatcccggtggagcggaaggagctccccaagctcgccatgcaactgtccaagccgttcatcctccgcgaccagaagccccccggcggtggcgccgaggtgttccaacgcctgtgcgcgggcgggtctgaggcactgtgcgcgaagctgggcgcgctcatctccatggacgacgtcgttggcaagacagccgagcagatcgcgttcgagggcatggcctccgcgatcatcagcgcacgcagcaaggatctcgtcgcgagctccagcgcggccgagtccgtctcgttgctccggacaatgtccgcggcgacgaactacgggcgccaggaaaggatcgccaccggcatctggaacgcccaggaagcgccggtgactgccgacgagatcctggcgttctcgctgccgaagatcgagtcgatggcagtggaagcgctcaaggtccaggccgacatgagcgacgagcaggccccgttcgaggtatcgccagcgcggacgcggtcactctgctcgtggtggtccagctgagggatcccctgcgccggtacgaggccgtgggcgcaccgtcagtcgtgatcatccaggccgtgcgtgccggcggcggcagggacgacgagccgaagttcaaggtagcgaacctgcacctcggaggcctgcggctgaagtcgcccgaccggcgcaacatgtgggacggcgagaagcagcggcttacggcgatgcactggctcgtcgcctacgggctgggcaaggccgccggcaggaagaaccgagccgcggtgtccgggaaggccgggaatgaagtgctgtggagcatgtcgtcgagggtgatggctgacatgtggctcaagccgatgcgcaatccggacgtgaagatctaccagaagtagtgttactacacgagtccggcttcctgccctgggactgtctagtggctaaggcatcacgtacaaataagcttttgcattttgtttgagaaaattgtacgaattcttgcaataaaccatgaatactactgttgcaataaatgagagaaagtttggcccgaaaaaaaaaaaaaaaaacccgcggcc

SEQ ID NO: 51821 - DNA, 234 bp, Zea mays
  Clone ID: MRT4577_147256C.1
taaactatcaatcattgaggaagctaggaaaaggattgccgcccaacaagcaactgctgcttaaatctttaggaaatgaatagactttgagtgtttggtagttttatttaatggttttggtttctaatttattttgtcttgaaattttatccactgaatttcgtctcttaaatgctctatagaactttttattgcggcttctatgttcatgaaggaatctttccatttcctagt

SEQ ID NO: 51822 - DNA, 156 bp, Zea mays
  Clone ID: MRT4577_147257C.1
tccacgccacgcgtgtcgaccactcgtctccccacgcgttctcagaatctcataatactgatctcactgatccagtatgtctagggctaatggagacactccaagggtctctgcggcccatctgccaactctcgggctatcactcctctgcgctgt

SEQ ID NO: 51823 - DNA, 268 bp, Zea mays
  Clone ID: MRT4577_147258C.1
gccttttgtttctagggaggcactaaatcaagacatcatgcgcgctctttgaaacaaataagcggggaacaacagatgcaaaaaagctaactgcagccatcagagcctcgcgatctgatatgactcaatagcaactcatgcggacgattgctcatttagtcaaacatcgcagtttaccgaacaactccgaggcgtttcaccacatgatgactgccaaacatacggagtactatataatcaaaaagaactctcaaaagcattccgcatt

SEQ ID NO: 51824 - DNA, 219 bp, Zea mays
  unsure (1)..(219): unsure at all n locations
  Clone ID: MRT4577_147259C.1
cgtaagaagtcgtctaattcnattggatcgaattanacgccttcttcntccctctcttncttatcncgctaacctccttgtaatctgcatgatctaagcaaagacttgagtcccttatggaccgattgttaggcctcttgctaggtcgtgtagtccgacgtatcaaccttgcctaccactgcgcaacacgcctgatccttatgtcctcctacttcttgt

SEQ ID NO: 51825 - DNA, 1814 bp, Zea mays
  unsure (1)..(1814): unsure at all n locations
  Clone ID: MRT4577_14725C.1
gctcaacacgctgtcgtgggtgcacaacgcccgcgctgcgccgcaaggtcaaggagctccgcgccaggcaccccgggcgtgcgcatcgtgtacgccgactactacacgccggccatccagttcgtcctccacgccgagaaatacgggatgctgaagcagacgccgcgggcgtgctgcggcgcgccgggcgtgggcgagtacaacttcaacctgacgtccaagtgcggcgagccgggggcgtacgcgtgcccggacccctccaaccactggagctgggacggcatccacctcacggaggccgcctacggccacatcgccaggggctggctctacgggcccttcgccgacccgcccatcctcgacgccaagcacctcggctaacgtcgtccatccaccgtcttctccaacgccggccccgcccgcccagtacagactactcctccggctctgggcgccgtcgtatgtgcgtccttattaccgacctgcaaattggattggttgcttgtagtagaagtgtagagagagcgagacagagatagatgacaaacacgaaacgaaccggaaggaggacgataaggcgcgcgtgccggccggtcttctactcctctctgttcatagctgtcccatatctatcgtagtcaagaaaactgagcagggaaagaaaccgggcggtatttctgttgtaaaaaaaaaaaaaaaaaaaaaaaaaaaaaaaaaaaaaaaaaaaaaaaaaaaaaaaaaaaaaaaaaaaaaaaaaaaaaaaccgggatgctgaagcaaaccccgcgggcgtgctgcggcgccccgggcgggggcaagaacaacttcaacctgacgcccaagggcggcaagccgggggcgaacgcgtgcccggacccctccaaccactggagttggaacggaatccacctcacggaggccgcctacggccacatcgccaggggttggttctacgggcccttcgccaacccgcccatcctcaacgccaagaacctcggttaacgtcgtccatccaccgttttctcaaacgccggccccgcccgcccagaacaaactactcctccggttctgggcgccgccgaatgggcgtccttattaccgacctgcaaattgaattggttgcttgaagaaaaagggtaaagagagcgagacagagatagatgacaaacccgaaacgaaccggaaggaggacaataaggcgcgcgtgccggccggtcttctactcctctctgttcatagctgtcccatatctatcgtagtcaagaaaactgagcagggaaagaaaccgggcgatatttctgttgcaaaaaaaaaaaaaaaaaaaaaaaaaagcggccggtcttctactcctctctgttatagctgtcccatatctatcgtagtcaagaaaactgagcagggaaagaaaccgggcgatatttctgttgcaaaaaaaaaaaaaaaaaaaaaaaaaccggccgggcttttactcctctctggtcatagctggcccatatctatcgtagtcaagaaaactgagcagggaaagaaaccgggcgatatttctgttgcgaaaaaaaaaaaaaaaaaaaaaaaaacccggccgggcttatactcctctttgttaataggtgccccatatttatcgggtccaaaaaaactgagcggggaaagaacccgggcgatttttgtgttgcaataaataaaaaaagaaaataanncccggccgggttttaacccctttctgttgaaaggggccccatatctttggggcccaaaaaacccggcccgggaaaaaaaccgggcgatatttctgttgccctaaatctaagacc

SEQ ID NO: 51826 - DNA, 263 bp, Zea mays
  Clone ID: MRT4577_147260C.1
gccgactcgagagccactccaaaacccaggcttccagaaccttattgaagctacccggcgactgctccactcgcaccgacggagaaggaaccaatgcgcgtgctcgtcactggcgccgcaagacatattggctatgccgtggttcccatgatcgctaagagtgtcatgctcggtgcagaccaccctgttattctgcacatgcttgacattgcgtcagcctctgaagccatcaatggtgttaagacggagttggtcgatgctgc

SEQ ID NO: 51827 - DNA, 250 bp, Zea mays
  Clone ID: MRT4577_147261C.1
gccagccagagaaactaataaaactctcgccgccgccatccgagcgaacaagcgggccgaccccgtccccaatgcaatccgccgccgacgtaccaccaccaccgcaggagcgagatggagatgaagaggatcctcttcgccgtcctcgtcgtcatcgccgcctcggccaccgcagtgctggcctgcaccgaggccgacgtcgtgggcgccccaactgcctgcgagtcgtccgacgaggctccttatggcg

SEQ ID NO: 51828 - DNA, 311 bp, Zea mays
  Clone ID: MRT4577_147262C.1
tctatcgctgctgttcatgtcgccgcacagcccgagccgtcggcggggggcagcttctaggctactgtttcctattagcttttcgtgtacgagccggaggctcttgctcctgttggtcctcatgatccgttctccttggcgcatgctgttttttctgatgagctctagatggctaacgattgatgccgtgctcacttcatttatttctatctttattttattaatttgcgctcgtgatggtttagtctctctctcccttacattttcatttcacactgtatttttctgtttatttctcttcttatatttac

SEQ ID NO: 51829 - DNA, 713 bp, Zea mays
  Clone ID: MRT4577_147263C.1
ggacctatagaagtccggccgggccggagctagccagcttacacagaagggcgattcgaccgaggccgccgccccgccgccgccgccgccgccggagacgatcccctgtagtcagttagttaagatacaaaaatggcctcactggacaccgtcagaggggatcttggcctggttgttttgtacctaagcaaggctgaggcaagagataagatctgtagggctatacaatatggatccaagttcttgagcaacggacagccaggacctgcacagaatgtcgacaaatcaactagtctagctcggaaagttttccgcctgtttaagtttgttaatgatctccaagctctgattagtccccctgccaaaggaactccacttccactgatcttacttggaaagtcgaagaacgcaatgctgtcaactttcctctttctggaccaaattgtttgggctgggagaacaggagtatacaagaacaaggagcgagcagagttccttggcaggatagcattttattgctttctcggatctaatacctgtactaccatcatcgagctagcggagcttcagcggctttccaaatcgatgaagaagttagagaaggacctcaagcaccaagagctgcacaagaacgagcagtatcggatgaagctgcagaagtccaacgagaggctgctcgccctcatcaaatcgagcctcgacatagttgttgc

SEQ ID NO: 51830 - DNA, 545 bp, Zea mays
  Clone ID: MRT4577_147264C.1
aaccttaaattccgtgatttgccttcttacatagtattcacataaaacacaaatgaatggattgaaaaagaggatggaccaggaactaaagctccttcttgatcacggattaagaatgcaaccagagctgcaccggcccgagcatgcccctggtggccttacgagagccgaccctgaacctcgtgctgtgcgacaccaactgtattaacttgggcatcggcggctgagaggcgatccaggttaccccctattaagttgcctacacggaagacctttcactcaggggacatcaaacccaggactccgggcctacattgcgtatggtgaaaaggctctgacatgaagcgagtgttccctctaaaagatcagacaagctttggtactacatctacgattggcgacttagaaatcaaacaaacaatgtctcggccaaagatattgtcagatagaccatatgaaccgctcacaagtgtattaccatgcataagaggtacaccgcagaccaatgctccttatatgtgaaaccatctgactctgaggttata

SEQ ID NO: 51831 - DNA, 302 bp, Zea mays
  unsure (1)..(302): unsure at all n locations
  Clone ID: MRT4577_147265C.1
tttttgatttttggttactttaaggtgttgtttaggttctaattatattggtttattcnnngggatgaccattattacaaaaacaggtgagggggacaaaacaaagagatatgccagcatcgaaacatatgggagcaagagcgcaacacggaaacatagggggtgcggatagatatatggacaggtgccgaggaatgggaagggggggctagaggtgggcagcctagaggcgggccgggtttggggcgaattcaggggcgtgcttttggtgatggttgttgagggcaggcaggacatgatgg

SEQ ID NO: 51832 - DNA, 240 bp, Zea mays
  Clone ID: MRT4577_147266C.1
aggggcttacataacacttatttttcatataaccggtaacattacaagacagaaaggccaacttggcccatggttaagccttataacataagagggggattattttataccccctggccggcagaacataagagaaggggtccgaacagcgaccatttttggggaaacccggggggggatttaacacaccccccgattggagagggcctgtaatttttaaaacaaccagggagggagtaa

SEQ ID NO: 51833 - DNA, 395 bp, Zea mays
  unsure (1)..(395): unsure at all n locations
  Clone ID: MRT4577_147267C.1
ttcagcgccccaccatgcagagggaaaagggggcaaatggagaggaagcacacactctaccccagaagaagcaaaaagaaagatgaagaacactgcaagagaaaacattgagaatgaagacatagatgaagcctggacgtgtataagagagcacaccctgccacacgtccatcaggagggcgagaagcgggctctcacctttggaacagagaacgaatcctcgcaaccaacaatccttaaaaaagggaaggaggcagctgcaagaggctcgatcagacctaatcaaaactcaaagggcctgactagactagctganggccgtgacgactggagccaggatattccttctgccaaacgccctcttgacaacgccgctttcaacagctatatccgaa

SEQ ID NO: 51834 - DNA, 534 bp, Zea mays
  Clone ID: MRT4577_147269C.1
gccaggtcgacttcgaagtctcccgtcgcaacgccagttttctgtttactcctgctcggctttcatcaactagcactacattgttcgcaaaaaccatacaccaggggtatccccctttatgtctcttatgaccttattcgtcacgaaggcaaaaaggtaagggctcaacccttagtcctattctaatcatgaagtcatatgcatctccatcacttgttcgaatactagtcacacaggcatgtccttaatgagtccaaagtactttgttggaacttcatgtttgttcaaagaccactacataacattccttggtattttttcataggcatttctcaagtcaacgaaaatcatttgaggtccttctgctctctataatgccccatcacttgtcttgctaagaaaatggcttccatggttgaccttttggacatgaaaccaaattggttatagagacacctctgatggatttttgatgatgcttgataccctttcgcttagcttcatagtatggctaatcaacttaattttttgata

SEQ ID NO: 51835 - DNA, 233 bp, Zea mays
  Clone ID: MRT4577_14726C.1
aacacggaggagcacaacgaccaagacccaaccacgccggacaacggcgacaacaagtactacaccaacaccgaggcgcgccgagggacacaaaaaaccgaccaggagcagccgacaacgcccggagcgcccacggcagccaaacgaaggacggaacgccgccagccagaaagagcacagcaggagcagcgccaggaccaagggcaacagggggaaaaaacaggagcagaccg

SEQ ID NO: 51836 - DNA, 446 bp, Zea mays
  unsure (1)..(446): unsure at all n locations
  Clone ID: MRT4577_147270C.1
cgcgagtggtggcacccacgcacactcttctcccccacgagtccggaccccggaggagccaagccatggcgtccacctcctgctgcctcctccaccagtcaaccgcccgcctcggcgcgtntgcgggcctgaccatcgtaccagggtgcagggtcgaactgctacttcgataagttgtcatgggggggggaggactgcagactgacacgtttgcagatgttgaggagctgttatatcttatatggatcaatgcttgcctgcggggtgagctgaataacaccgggactcctggtgctggggcactatctacagcacaggatctaagcgacaccctgcgcgccgggtctgatctgacagccgaggcattgatagtggagtttgcctatgttggggcggacgagagaagtttaagctgcatagaatttggctcacagagcgcttcttca

SEQ ID NO: 51837 - DNA, 278 bp, Zea mays
  Clone ID: MRT4577_147271C.1
gtaacggagtgtcacccatcaccatgggtggtagtgtgagcagtgacctgaatgaaccattgaaatggaaaggaataatatatagggaaaaaggatgttggtgaaatagaatacgatgttgcaagcaggcaatccttcttaaatacatctaaatggataaaggaagttcgcactgaaaaggggcaatgatgttatcattggaaaaagcgctttgccaaccttttttttttaagtatagttacatgtttgaaaaaaaatttgaataaaaaatgttattt

SEQ ID NO: 51838 - DNA, 268 bp, Zea mays
  Clone ID: MRT4577_147272C.1
cactagcgctctccacgagcatgaacaatcatctgctctgctagacggaccaaaccaaaccctcctttttcgtcactagctaattaaagggaagcgagatcgacctcaccgtccgtcttcaactccatcgtcggcgtcgcgcgctcggagtgaatggttgctcgggagaggagactatatatggagatgacctaaagcttggaggttgctgagggcgccatggacgacgacgaccacgacgcgtgggtgcacgactcctccgtcgatc

SEQ ID NO: 51839 - DNA, 413 bp, Zea mays
  Clone ID: MRT4577_147273C.1
gtgtccgtgcatgtctagggtccaaacggatcgacgctgcgcggaccatgtgacagccccgcgctcatacgattcttctccagcaatgacgtgacggtatgcggcctgcggatcgagaacagcccgcagttccacctcaggttcgacgactgcgagcgcgtgcgcgtcgacggcctcttcgtcagctcgccggcgtccagccccaacacggacggcgtccacgtcgagaacaccaagtccgtccagatcctcaactctaggatctacaacggcgacgactgcgtctccatcggcgccggatgctccgatgtccacgtcgagaacataacatgcggccacggccatggaattagcatcggcagcctgggtgtccacaacacccacgcctgcgtgtccaacgtcacggtccggaa

SEQ ID NO: 51840 - DNA, 218 bp, Zea mays
  Clone ID: MRT4577_147274C.1
acatggtggtgtgttattacactttgtagggtggatacgtgggtgtacgttacacgttcacagccacaaaaactgttttttatgggtgcaaaagcaacatttaccgcccgcgacgaagttcgcttgtgggggccaaaagcacgggcaaaccggggtcaaggtaaaaggagaaaaggcccgggcacttaaggtttttacaaactagcactggagaaagc

SEQ ID NO: 51841 - DNA, 450 bp, Zea mays
  Clone ID: MRT4577_147275C.1
ccggtcggccacgcgtccacccacgcgtccgcggacgcgtgggcggacgcgtgggcgactgcgagcgcgtgcgcgtcgacggcctcttcgtcagctcgccggcgtccagccccaacacggacggcgtccacgtcgagaacaccaagtccgtccagatcctcaactctaggatctacaacggcgacgactgcgtctccatcggcgccggatgctccgatgtccacgtcgagaacataacatgcggccacggccatggaattaggtacctgtcagtctgtcactcactcactcaccaacgtgcttccatggcgcgcggtaccgtttgtagtgaacctgacgcggcgagctgctgctgtcaccctcgcagcatcggcagcctgggtgtccacaacacccacgcctgcgtgttcaaagttcacggtccggaacgtgcggatactcgactccgac

SEQ ID NO: 51842 - DNA, 303 bp, Zea mays
  Clone ID: MRT4577_147276C.1
cagcttttgttctatcatggattcttcatcactgtcgggagctcagtttatatctggtttggtcatgggcatcactgggctcccttcggacatacctgtggtggtgactgcgaacaacatcacgacgaggctgttgactccccctcagcgacatcgtcaacctcaggcggcggtcgtgtaagtcacttctgaattctgaccttttgggctctgcctggcttgcctgctgccatgcgaaatacagcgacctaaccctaaccttaacatgagtttgtgggcctacgtgtgaaggtgtaaggtgct

SEQ ID NO: 51843 - DNA, 154 bp, Zea mays
  Clone ID: MRT4577_147277C.1
aaaaggggcccaaatggatatggatagttcctgaatattagggttggccccggccggcactagttacatgacatccttaatttgggacagttttcattgccgccgccgccacagaagatgcaaacagaggagcagtttgcaggaaaaccaagca

SEQ ID NO: 51844 - DNA, 483 bp, Zea mays
  Clone ID: MRT4577_147278C.1
aaaaacgaacggggcctaaatggttttttcctttcatggcggcccggttttttaaatcgggggcaggagtggctgggctggcgacagtggcaagaccctccatggggggtttttttcatctaaaggagggccccccgtttaacaacgacgtgggtctttgaatttgcctgcctgcttgcttgggtgcatacatacccaggagggatctggctgacctttgttgctcaacaggcaacaaactggtagtcaacgttgggggggcccatttggtacccccccccgtggggggcaatttttttgaacaccgttttgtattccaggtccaggcccccgttgttgcattggtccacaaccctcgccacaagggacccccccgtcgcacggtttttcacccttatgcacttgccgaagggggcctggcccttttgcccggggggccccaaaaggccttccacccgtgcttttgccccaccaaaaggggtt

SEQ ID NO: 51845 - DNA, 245 bp, Zea mays
  Clone ID: MRT4577_147279C.1
gtgctggggggggcggtgctttgtttctcagagtgacacattgtaaaatttttgcctgttttcatctgatcgatagttacgacaatttgcccttcagcaactactaaagatctacccgtttcatgacatcaaagaattcataatagctgatgttgaataaatatttcattgttctcaataaaagaggtatatctatctgggccgtaggcaaggtcctcaattcgttacttaccttttttcaacgt

SEQ ID NO: 51846 - DNA, 233 bp, Zea mays
  unsure (1)..(233): unsure at all n locations
  Clone ID: MRT4577_14727C.1
gtacgtaaactcaaaattcaactcnagatctttcttttttttaaccttaaacttcctttcttgctaataaaatacatctgcgtctctccacccaccctccccctacccaaaccctaactcttccaacctccaaacttgccgctgattgcacgcaaaaacaacttttccatcgacgacaacgactacttctttcccatcacgaccctaccgacccaacctctcccccatccatc

SEQ ID NO: 51847 - DNA, 272 bp, Zea mays
  Clone ID: MRT4577_147280C.1
acattttaaatggtgtttttttttttttttttcttttttgtttttttttttttttatttttgtttttctttggggaaaccctaaaggcaaatttttttcttgatattaccccgggccgggaatctaaaaaatcaaatttaggggttgttccgttagggggggtttgaaaaatattgggggggattaaaccccccttttttgtttagaagggaaattaatcccctttaattcccttagaccccgacccaaacgaacaagccctaaaggggggg

SEQ ID NO: 51848 - DNA, 170 bp, Zea mays
  Clone ID: MRT4577_147281C.1
aaggaaaatcgggaccccctgaggccccggcccgaatttcttggttgaaccgggggttccgccaagccgtcggccaacccttccgttttgaatggttgaaagggcaccctaagggtttttggccttggctatatggatggggcggaaaaattcatcttatcctaaaggga

SEQ ID NO: 51849 - DNA, 2694 bp, Zea mays
  Clone ID: MRT4577_147282C.1
atggcgacggcgacaacggcgaaggtggcgatgagggcgacggcggcagcagcaggggcggcagcagcaaaggcagcggcggcagcagcagcggcaggggcagcaacaaagccagtggctaagcgccactggtttaaatgtaaccacatgtctgttgtttctgaatctgaccttcttcaccttgtcttcatcggagttcttcctctgaaggagctttgttcctggcggatctgccgtggggccactgtcccgacggaggacacccacgagtctgttattttcattcctttcctcatccgcggccttgctcttcctatttctccttttttccgcgccctccttgatttttatcatctaaacctaacccatctgaatccgaattctattctgcaagtttctgtttttgttcatctttgtgaagcttatcttggtattctgccgcactttggattgtggaaatacttgtaccattgtcggcccgggatggccggggggcagcaccagctcgtgggcggcgcgagtctggagatgcgccgtgggagaaaaacagagtgtctcgatatcccactcaaggacagcatcaagggatggcgcttggaatggttcatcattgagaatcatggaaaatccctcccccctcggtcagggagacagcctgatgttcgcgtttcgagttggattgaatctcccacggatttggagccactgaaggacaaagcgtacctggcctacctgtatcgtggcattgctgactcaacccgggttaccaacagaaggattcctgctgtggatctggtgagccagcttgagatgattcttaggggcaaggtatcgaacgttggtgctcctattgcatattctgcctggaatctgccgccttctaaaaccttcatcagttttgtgtcaaaccctcctactgaaggcaacggttcgggtcttagagtgcgaccctccttcgaagaggttgaggcattggttgctttgctgggtgatatccctgatgatgaaaggcaggttcattttgagatgcctgtcaaccccagtgatgcagaaataagtgctatgctggatttgctggccgatgattcctctaacttggtccccgctgaatcactagttgtggccgtcattccagagcctgaagagaccctggatattcagagactcgatagcactcgcccaaagcgtcctcgtcgagctattcaaccaacttctcctgctgaggggaagaaaaagagacggcttcggcgagtgtcatgtttgaatcaggatgctggcccttctgttccagatgctgagggagtgcatgtggaactttcttttggagctgatcccaatgggtgtgactcagcaaacgctgaccctaatgggtgcaatctggctgaacttgacgatgctgaacccaatgggtgcggtgttcgtattgtcgacgaggatgaagaagaggaagaggaaatccccttgattcggaagaacaatcggcgttatgtagtcagtggggagagtagtgaaattccttctccagctttgtctgcccttgttggtctgcaggaattgtctctggcaaattttgaccaggctcttgaagatgtgatccctgaagatctgttgtccgagccgacagatgagcgtggtcttcagagtcaagaagttgatccagattgctctgttcccatgaaaatggctgaaaaccccccagccttagaggtggctggagcggagagtccggtcctcaaggatggcgccagcgtttgcccagcccccgagggtgttgccggtaatgatctggctcaggaaatcgccttagaggtcggcgtacctgataccagagctttaattcctgtcggtgacactgtgttggctcccaatgatgctccgcagattgcttcagttgatgatccttcgtcaagtcaccaacaagcttcccatgatttggggcttccttcttttgtctccaatcttttggccttgggtgacgagatggccggtcagctgaaatctcaaggtgcttctgtcccggaaagagctctatctctaacacattggaatccagcactgcttcagcggcgaatatctgagttagaattgacgaacgctgatatggctcggcgatactctgctcttgaggagaagtgttctcaaggccagacggacttggcccaggttaaggattccttaaatgatgccaacgtgttgaattcttctctcagtgctcagcttgactccgaaaaggaggagaaacgtgctcttgccacttctcgtgataaccttgacaagctgtatcgcgacatcaataactctttaactaccttggagaggagccatagcttcaccatggatgacttgaataaccaacgctacaagctgcaggagtccttggatgaaatgattcgccttagggagttgatgtcgagcaaagattctattatcaaggatccgtgtgcttccaaaaaatcaattgcccgggaattagaggctgcccggctggctgtgaaggctgcggaagatacttctactattttgaaggctcatcgcgacagagccatggacaaagctattcgcgcgggtcgaatcttgatgagaaggcctggtgtggttgttcctgatgacataatcgttgatgtcaacgctgctcctaattcttcgagtcatccttcttcatcagttgctcctgagaaaaacactgccaagtag

SEQ ID NO: 51850 - DNA, 152 bp, Zea mays
  Clone ID: MRT4577_147283C.1
gattagaggaaacgggcacaaaatgttttaataaaccggccggggatgcctgaatcgccgggaaatgaagagcgccggccgccaactaattttgctggccgggggtaatccgagctaaatctctgggccatgatcacagacttgttgagctg

SEQ ID NO: 51851 - DNA, 1363 bp, Zea mays
  Clone ID: MRT4577_147284C.1
cagcgacactgcggcgggggcggcggtcccgcgttccctgtcgtcgcctggcggctccgagcagcaagtgccgtccgcgtccggcctgccgccgcgcggggcggggcaccggaggtcccgtagcgatttcctcgtcgggttctcgcgcccgaatcagctctccctgccgatgactcctgcagctggggaatacaggtcgagggaagcctccgtactcgaggagctattccgctcgtacagggacccgaatctcagctcctccggggataacaacagtgaaaggaacgatcacttaggcagacaactcaccggccaaggcgcttggagccccggtgatagcagcgacaatgacgctgagagctgggcggctagtggcagcgcagccgcaggcaccagcgctagccatactcgccattgccgcagcctgtcggtggacagcatcatgggcaatctcaattttggaggcctggaccaggtttctctgagagtgccacctctgtctccggtggcagacgccagtgtcagcctctcgcgcactggaaccggagcatcgggcggtgcggttgcgactgcctcttctcaacctgccaacggagagttcagcgagtctgagatgaaaaagatcatggccaatgatcgccttgctgagctcgctcttgttgatcctaggagggtcaagaggattctagctaatcggatctcggcagcgaagtctaaggagcgcaaggtgaagtacatgggtgagcttgagcgcaaggttcgtgtgctgcagatggaaactagtacgttatcttcaaaagcagcatcgtcgcagagggaatgcgaggcacttagaattctgaacaatgagatgaagatcaggctgcaagcaatggagcagcaagcacagctgaaagatgctctgaatgaagcactgactgctgaagtgcagcgcctgaaacaaattgctggtgaggccagtgatcctcatgtgccgaatatgagccgcaagattgtcgaacagcagctgcagaagcagccatcggaggcccagctggctgagcagcagcagccacaggaatcagaggagttcaaagctcagcagaagcagtggaaccattaataagacgcgtttcacagaggacatgcttgaaggtctaatccatacagcagatccatgaagggacaccttgtgttctcccggacattcgttttttttttccttaggttttagaacgacagcggttggacatcctgtcttttgtggtttcttgcaaaggtatttggttggttggcagttggtaatgcatggtgtgggttctgtgttgtacaagcttccagtctctttagttttccgctagagctattcaaaccattttcaggt

SEQ ID NO: 51852 - DNA, 342 bp, Zea mays
  Clone ID: MRT4577_147285C.1
ctcgacccgccggagcttatcacgccgcccaagatctttgtcatcgaaggtctgcacccaatgttcgacgagcgtgtgagggacctcttagacttcagcatctacttggacatcagtgatgaggttaagtttgcatggaaaatccaggtcagaaaatacttgtatgttccttagcttgctccacatgagccagtaaagggtgtctttctgctgtttaatttctaaaaaaaatatcaccgctactaatttggcagcgggacatggcagagcgtgggcacagccttgaaagcatcaaggccagcatcgaagccaggaaaccagatttcgatgcatatattgatc

SEQ ID NO: 51853 - DNA, 727 bp, Zea mays
  Clone ID: MRT4577_147286C.1
aaagcaatgacgacggggtggctcgcagggtctctccccctccgctccgcatccacagccccgtcggcggccagggcacagcctctcccctccgccgccgcgccacgccgcatcccagcgcgactttcggttgccacgggcgggggggagcagcagctcgtcaccgcgcaggaaccggcgcacgcagaacctgattatggagttgtcagcattcaccatgtcgggatcctgtgcgagaatcttgagaggtcactggcgttctacaaggacctactgggtctgagggtgaatccagctcggccaaacgacaagctcccgtacaggggcgcttggctctgggtgggttctgagatgatccacctgatggagctgccgaatcctgatccgttgaccggacgccccgagcacggcggacgtgatcggcatacccgtatagcgattagagatgttctgaagctgaaagagctggaatcagctacacgctaagcaaatccgggaggccagcgatctttgcaagagacccagacgggaacgcgttggagttcacccaagtgtagcaactggaagactccttccatggctagagcatctcatggataccaagaggtcatagactttgctgcttgtatgctggcagataaataccgcttgtacatatatggacatgtcggatcaaggatttggagcaagtaaaaataaaggcagataaaccgtggtggtttggttg

SEQ ID NO: 51854 - DNA, 972 bp, Zea mays
  unsure (1)..(972): unsure at all n locations
  Clone ID: MRT4577_147287C.1
aattggcgagcgcaaggccggccgtccctggcaacaagggccgcggggtagaacggaagcggaggcgtccctggcaacaaacgcagcaatggcgacggggtggctcgcagggtctctccccctccgctccgcatccacagccccgtcggcggccagggcccagcctctcccctccgccgccgcgccacgccgcatcccagcgcgactttcggttgccgcgggcgggggcgagcagcagctcgtcaccgcgcaggaaccggcgcacgcagaacctgattatggagttgtcagcattcaccatgtcgggatcctgtgcgagaatcttgagaggtcactggcgttctacaaggacctactgggtctgagggtgaatccagctcggccaaacgacaagctcccgtacaggggcgcttggctctgggtgggttctgagatgatccacctgatggagctgccgaatcctgatccgttgaccggacgccccgagcacggcggacgtgatcggcatacctgtatagcgattagagatgttctgaagctgaaagaagtttttgatgaagctggaatcagctacacgctaagcaaatccgggaggccagcgatctttgcaagagacccagacgggaacgcgttggagttcacccaagtgtagcaactggaagactccttccatgctggagcatctcatggataccaagaggtcatagactttgctgcttgtatttcttgtagctgctacaaataaagacctggcagataaataccgcttgtacatatatgacatgtcgatcaaggatttgagcaagtaaaataaaggcagataaacggtgtgtttggtttatggagtcaaaataataaaaaatgagcttcaacttggaagcttgtcgggtagcttgtctagatctagactgagatgctcatctagtgatcaggtgacatgaatgaatggatagtcacgtnggctggaatact

SEQ ID NO: 51855 - DNA, 893 bp, Zea mays
  unsure (1)..(893): unsure at all n locations
  Clone ID: MRT4577_147288C.1
gccggccggatcgaaaaagagggggccatttcggcatttttcgttttcacgctaccctgagacaaagcatcgtggggactgactggggaagctgcgctttccgatctttgctttcggtttcggggtttgagggctgaggccgaattggatcgtcagaagctgggggtgagggagggatggaggcgactgtggaccacctgagcgcggcgtacgacgacttcatggcggcggcggcggctgtggtggaggcccgcgtacagtcgggcggcgagaagaagacggcggccacggacgccgcgctcgaggccttcaagcagcgctgggagatcttccgcgtcgcctgcgaccacgccgaagagctcgtcgagtccatccgccagcgcatcggctccgagtgcctcgtcgacgaggccacggggtccgcctccgccggatccgttgccgcccccggcatcaagcccatcagcgccgtccgcctcgagcagatgagcaaggccgtccgatggctcgtcatcgagctccagcacggcgcctctgctcaagggaccggcggcagtggcggtgccgctaccccaaatgccggcgctggagggcaacacccggaggagggtgcccagtaggtatggactatggagttactgaattaaactagtagcatcgcccttctcatatgaaaattgtagcatttttccttcaatagaaaacaaagaacttgtcgttgctgtgtttctatgagtgacagcattaaccttgcgtgttgatatttgcaagaacatgaactaaggggccgtttggttcaaatcattgcgctgtgctgggtaaaggatctgttgnntttacctttccattttgagatatactactacttaccatttatgttttttatgccaaaa

SEQ ID NO: 51856 - DNA, 486 bp, Zea mays
  Clone ID: MRT4577_147289C.1
aaaaaagggccccccccccttggcttgggccccctagggcattggaaacccggagaaccccaaaagttttttactggtccccgggtttaagggggggaggggaaaaacggggaataaaatttgctaaaggggttaaggggcttcaacaggcccgggggggtttttttttgaaaaaaggcaaaacacctttgtccccccattaagggactgtttaaaaaacccagggctaatttcttggggggcaaaaagtttacccaaaaaaacccaaaatgggctacctggggggctaaccgcttggggaaccccttttggggggggggccccaaacctaattttttactcccccggggggttttttgagaggggggaaaaaaccctaacccggtgagcttttgaaaagaggctttcaaaccccccgggggaaatcttaaagtcccttggaaaattttttttaaaaaaaaaaccggcgaaaaaagattcgccccc

SEQ ID NO: 51857 - DNA, 215 bp, Zea mays
  Clone ID: MRT4577_14728C.1
aattcggcacgagggtcatatacgataaaacctgttagatatgtcataattaccacaatccacaagcaagtggttacataattgctaatggattgtggtaattatgtcatatacgataaaacctgttagatatgtcacatatatgcttgttgcttgaaaaaaaaaaaaaaaaaaaaaaaaaaaaaaaaaaaactcgagagggggccgcgggtacc

SEQ ID NO: 51858 - DNA, 494 bp, Zea mays
  Clone ID: MRT4577_147290C.1
acttaggtgatgaataggaccacaagcgctgaacgcgtcggacttcattttcacatgctaatactgtaccgatcttccaagtgatgatggtaggaaacacccaatcattagccatgggggccaggacacacaccacggtttttcagcacctcatcttggctctagctacagattaattcctgcaagcttactaatattatttcttattgtcaactacatcacatgccgccctctgtggagagctcatagtataacttgtctatggctggcaagtaccaaagggcctctgatagctcatcatagttggtgcccttgtcgacttactagagcccgaacgcgagcttggggatcatgatgtctaagacgtggcatatgcgggagaacacatcaacgacgctagagacattgtaaatattgttgacttcgcgatgaaccttgtccttgaccttatctgaacgcactatgggcacactgttaaatgatgtcaacacttg

SEQ ID NO: 51859 - DNA, 582 bp, Zea mays
  Clone ID: MRT4577_147291C.1
cgcctgcctagggttagggtgtcgggtggtcggctccatttagagggatcctccatggcgtatcctccgacgctgaagtctaagtcccaagggctagggcgtgaagaaggccaccgctgaccatgatgacgccaccgggggggcaaccacggcgaggctcatgaaagatggcgccggggggacgacgaacaaagctaaggtggcggcgcactacctgcttcatccccctcgtgatcatgatatgcttgaactacgagcccaacatctccgtgttccagctgctctccgccgcttgatcgcttcatgacagggccatcctgacgtccccccgcactaatttggaggtgcgactacattagctgacatatgtgccacatcgagtggaaaaaggaggatcatgctctctgggcgaatatgaaggatgcggcctaatacatcatgaagggggggatggattgtatacatatgatcaaaaatggatcgattatgtgaactgcactgcttataacagaatgaacgatgtacgatctcgtctgtaggtactgagtctgatgcgcggctcagcaagaagatgaatgcatt

SEQ ID NO: 51860 - DNA, 578 bp, Zea mays
  Clone ID: MRT4577_147292C.1
aactggagactgctgttcccgtcgaccggattcggttcggaccgcagctccccacactcgtccgtccgcccgtcgaatggcggctcccaaaccctaagccacagatcccttcccctgcctcagcttcgaacgccctcgcctcgccgccggtctttgtgtactgccgctgtgtccgtcggcgcggatcaagggtccgctccgctgcaccccgcggggagaaaggggcgggcctcggcgtcctccgctcgtcgcccgagtgtctgagtactatcaggtgcaagtccagccgaactgattgcatgacatatgaaatagcgagcgtcgaatgaccttctctatggatatggatttgaacgcatcaccggtgcctgacgatgatgagcagcagccttacaatgaaccagtggaggctgagtatgctcaggaggaacatgttgaatctgctgtcgcaacattgcgccgggtacgcaactatcttcattggggctgatgtccattccatgtactgtgcccttggcatatctgttcttggatcttactaatgatgggtcattagttacaataaatgctgtttagcc

SEQ ID NO: 51861 - DNA, 623 bp, Zea mays
  Clone ID: MRT4577_147293C.1
agcacaaattcacgggggttttttttttttcttttcagaacacgaacactttatttttattcatttttatactaaatttaattaagcactcaaatttattgtgaagatccatcaccgcccctaatagcatagctcgaagttctttgcaattttaacttatacgctgatggttactaccgcccgatcatcgaagatccggaggtgccgtaatccgagggatcgcaatccatcgtcgagttgtacaccgccgagagcgagatgaacacctcgtccatggccggtcgcgcccggggctccatcgccacgcaccgcagcgccagagcagccatggagagcgcgaggtccatcgggaagtcgccatgtaggcgcgggtccatgaacgcgcgcaccttggcgcggtccatgtcctcgccgccgtccgccaccagcgcctcctccgcggactcgcacagcaggatttcctcgcccgtgccggcatccgcgaacccggcctccttcccggacaacagctcgaggaggacgaccccgaaggcgaacacatcgagcttgggcgtgatgagtccgtcctcaaggtactcgggagcgaggaacccttgcgtgcccacgacgtggcccgtgagctg

SEQ ID NO: 51862 - DNA, 477 bp, Zea mays
  Clone ID: MRT4577_147294C.1
gcatctatcccgatgccaatcatgctgtaattgaggcaacttgtccccggaagcaacaaaggctgaagaaggaaaacgggacgtacacacggcacaggaaaaagcctgatccgggggaaaacaagattttagatcacataaaaccaccaaaaggagacaaccgacaatgaaaacttgaacaaggagcgtttaacacaagaggctaacttcataaaacataaaacttaagcccttaaatgactccttttatgatagaccccttactttggtcagggaaaaccaaacctgcatccaagggacctatccaacgataatccaaaaaaccaatttccttgggatctctgcccaaaccactgcctgcacaactaactcccaacttcctgatcatcacccgaaggattctgcaaacctggaactactcgaggacaagcgacctgaatcttagggagcccagttccacacctagctagtgcccca

SEQ ID NO: 51863 - DNA, 1035 bp, Zea mays
  Clone ID: MRT4577_147295C.1
ttgaaattatcccaggaattacctctgcttcaggaattgcagcagaactgggcattccgctaacccatcgaggtgttgctaccctcgtcagatttttggctggacactccagaaatggtgggacagacccactatatgtagctggaaatgcagccgatcctgacactactttggttgtgtacatgggtttgtcaacacttgcatcacttgcaccaaagttaatgaagcacggcctgccaccagatacccctgctgttgcagtagagcgcgggactacacctcaacaacgaatggtgtttgcgttgttaaaggatcttgtggatgaagtcaagtcagctgatcttgtttctccaactctaataattatcgggaaagtggtatccttgtcaccattttgggttgagtcatctgaacatgatgccctgaaaattgagagctcgtatgcaagtgaagccagatgataatacgttttcatgattttagtgattggacaatacatacttgagtaacgcaatatcccagatatgagcagttccagttgggatccatttaggacatgcgagcacaggttcgacctggtgtacacaacatttcaggaagcatggattctgaatgacggatgatagcttaagcccataacagcctttggggtttgggcagaagcgcacttgggagttgatgagggcatgtctggaggcttcagcttcagtaaatttacggctttcaattcggtgtcttcttcgtcaaagaagactcggtagatgtatggttttcaattcaatagcacctgcaaactcctttctgactggaggtccattcggagtgcagggattttacagaaattagacaaaaaaagttctgttttttggggggaattagaaaaatctctgcttcccaagcgtagataactgtaagatttttgttgtcatctttaaaataattgtattgtttttatgtgttatattcatctttaaaaactcttggcaaaaaaaagaatgaaaaaggaacctataagctgaattagtgtttggtgtt

SEQ ID NO: 51864 - DNA, 3318 bp, Zea mays
  Clone ID: MRT4577_147296C.1
atgccctgctctccggctgcctgctggaggttgcagctcataatgcagctggatggatccatggatcgatcaccaggtccccttcaggctcgagaggccatgcaccacaacgtgtccctgtcggaggggagccaaaggcccagaacgagcgagatcgacgcccccattgaccgagccttgtttaatggatcaatgggcagggagcttgattcgcagctaacgatcgacctgaccacgcatgagatggttcatgaccaattggatggtggattggtggcatgcaggaggggccgactctgctggtgggtggcgtcggcgccggggaaggtgctcatcgcgggaggatacctcgtgctggagcgccccaacgccggcctagtcctcagcaccaccgcccgcttctacgccgtcgtccgccccctccgcgacagcctccccgccgacgcttgggcctgggccatacaattctcggtagcagctgctaaagcgaccattattgataaggagaggaaggatgtagtagataagttgctgctgcaaggtctgaacattacaattcttggatgcaatgatttctattcttatagaaagcagattgaagcacgcggtctccctcttactccagaggcactgctttcattgcctccattctcttcaatcacatttaactcagaggttgctaatggaacaatgactggagagaaatgtaaacctgaagtagccaaaactggacttgggtcatcagctgccatgaccacatcagttgttgcagctcttcttcactatcttggtgtcgttagcctctcatgtccaggacaatcttctggtgataatacaactacacgagaacttgacttggttcactctattgcccaaagtgcacattgtatagcacaggggaaaattggcagtggttttgatgttagtgctgctgtctatgggagtcaacgctatgtaaggttttctccagaaatactctcgtctcaggctacaggtgggactttcctcccagatgtagtatcagatattgttacacaaaggtgggatcatgagaataaacagttctcattacctcctctgatgacccttctccttggggaacctggaaccggaggatcatctactccatcaatggttggatctgtgaaacggtggcagaagtctgactctgagaaatgcaaagatacatggagtaaactggcctttgccaattcagcgctggagaaccaactgcgaatcttaaaaggactttctgaaaatcaccgagaggcatatgagtcggtagtgctatcctgtagccatctcacttatgagaagtggacagaggtggctactaaccaacatcaagaattaattattaaatcattgttggctgcaagggatgcttgccttgagataaggcttcacatgcgagagatgggcatagcagccggtgttccgcaacatgggagggtcagagacgaggtagctgggatgttcaaggacaaactcggtgttagtgtgtcaggtacagggcaatcgtatcggaagtcttatagccaccgattcgacaccgtgccatacccacagggaactagaataccagacttctctaagttttctggtgaaagtgggaaaagcacacacgaacatataagccaattcatagcacacttgggagaattggctgatggggaagcctaccgcgttcgtttattctcgttgtcccttactgatactgcatttgcgtggtacgcagctttgccaccaaattctattaactcttgggaagaattagagcagaaatttcatgaacacttcttctcaggagaacatgagttagaattggctgacttagcttcagtccgacaggggcctgaagaatcggttaatgactatatccggagattccgggacaccagaaaccgatgctttcagattcatgtcgcagaaaaacaactgacagggctagctttcaatgggttgcgaccctacttaaaagaaaaattagatggcacccaattcttctcactagtgcacttacaccagcgggctatgacctgtgaaagccgaagtaaggaaacatcaaaatcggctagccataagatgcatctagtgggatacgataattcggacgatgaatccacggatgtttacaccgccgaactggtttggccgggacaggctaaaccttcagcgtgttctgctttacagtcgattcgaaagaatcgacaagaggaagttaagtttacttttaatgttgccaaatgtgataaaatatttgacgagttactgaaaaacggcaacattaaattaactcatactattcctcctcctgatgaattaaagaggcgtgcttattgtaagtggcataattctttttctcatgccaccaatgattgtaatgtttttcgtcgacagatacaatcggccataaatgagggtcgattggcttttcaggagatgcaagtagacacacaaccctttcctgttaatacaatagaactcacatgcaaaaaggtcttggttcggcccgaaatggccgataaaggcaaaggcaagggcatcgtcatcagcaatcctcgcatgtcagatatatcacaaaagaagattactcgaaaggcttcggacgagaaggctaaaaggttcgaagacgccggggggcaggcacagttaataaaccaaacacatcagtctagccctagcatcgtagatggtccggcacctacgtgcggacaatccggtgctcagacaaacggtccggctaactcagccggacagtccacctatgaccaaaggcgtcaacctctacacaaagcaaggaaaaagacgcaaggtcaaagcacatataatcggctgatcaaagccgatcctacttttgatcagttgctctccaaaaatactagcaaaaagactgttccacgtgatcggtcaacaaagaaaccccggtcacctgctaaaacaaaacggtcaaacgaaacgacccgaaaggcgacacaacaagcatcgtctattcattctatgagaccagggtactttccacctatttactcatcgtcgattgagccagattcacaaacacggctacttgacgccactatgaatatggagggtgttttacttgctggagttccgggagctggtggcttcgatgcagtattctcagtgactttgggggatgcaagtaatgctgtagcaaatgcttggagctctgctggcgttctgccacttctcgttcgagaagactgccgtggtgtctcattggaagatgctgacccaagaacaagggaggaggtagtggtcgcggctataagtctgtccgtggtcagtggtcagtag

SEQ ID NO: 51865 - DNA, 116 bp, Zea mays
  unsure (1)..(116): unsure at all n locations
  Clone ID: MRT4577_147297C.1
ntccggggctccgacgaaagggttggcattcaagttaaggtggtcgaccgaaaccccccggttcaggacgttctggaacaaattcttggctggaatttggaaggacaactggttcc

SEQ ID NO: 51866 - DNA, 2357 bp, Zea mays
  Clone ID: MRT4577_147298C.1
cattgggtacctcgaggccggccgggccccgccgattctcggttcctccgcgcgggcacgcttcacccccgccgccccgcgcccagccgtcgccgtgatcgcccgagcgttactctgccgagccgttcggccggtccactcccgcgaagcttccagcagaggcgaccttcggatcgagtctcggccgccgaggagtcgaaggccatggaagtggtggcgtcggcgccggggaaggtgctcatcgcgggaggatacctcgtgctggagcgccccaacgccggcctagtcctcagcaccaccgcccgcttctacgccgtcgtccgccccctccgcgacagcctccccgccgacgcctgggcctgggcgtggacggatgtcaaagtgacttcccctcagctctcacgggaggccacatacaagctgtccctaacgaagtcgacgctgcaattgacgtctgcgagggaatctacaaacccttttgtggagcaggccatacaattctcggtagcagctgctaaagcgaccattattgataaggagaggaaggatgtagtagataagttgctgctgcaaggtctgaacattacaattcttggatgcaatgatttctattcttatagaaagcagattgaagcacgtggtctccctcttactccagaggcactgctttcattgcctccattctcttcaattacatttaactcagaggttgctaatggaacaatgactggagagaaatgtaaacctgaagtagccaaaactggacttgggtcatcagctgccatgaccacatcagttgttgcagctcttcttcactatcttggtgtcgttagcctctcatgtccaggacaatcttctggtgataatacaactagacgagaacttgacttggttcactctattgcccaaagtgcacattgtatagcacaggggaaaattggcagtggttttgatgttagtgctgctgtctatgggagtcaacgctatgtaaggttttctccagaaatactctcgtctcaggctacaggtgggactttcctcccagatgtagtatcagatattgttacacaaaggtgggatcatgagaataaacagttctcattacctcctctgatgacccttctccttggggaacctggaaccggaggatcatctactccatcaatggttggatctgtgaaacggtggcagaagtctgaccctgagaaatgcaaagatacatggagtaaactggcctttgccaattcagcgctggagaaccaactgcgaatcttaaaaggactttctgaaaatcaccgagaggcatatgagtcggtagtgctatcctgtagccatctcacttatgagaagtggacagaggtggctactaaccaacatcaagaattaattattaaatcattgttggctgcaagggatgcttgccttgagataaggcttcacatgcgagagatgggcatagcagccggtgttccgattgagccagattcacaaacacggctacttgacgccactatgaatatggagggtgttttacttgctggagttccgggagctggtggcttcgatgcagtattctcagtgactttgggggatgcaagtaatgctgtagcaaatgcttggagctctgctggcgttctgccacttctcgttcgagaagactgccgtggtgtctcattggaagatgctgacccaagaacaagggaggtatcggcagctgtatcgtccattcagattaattgattctactgttaatattttatttatgtattgtgccgaatgctaggaggtacgtggttaaaataagtgctgcacttgcagcaagttagcacgttgtttacaatgactgttcatgagtgtagaaaataaggaattcaatggatttccatggaattagtgcttgtagttgtagctatggaatgtacgtgagaaaatgtcaaggtatccaacaaactcatactgtaaaccttgtatttgtaacttttgcggtttgtatgataattcggcatgtgttaatgtttgatatctgacattatcccatgataggctgagtatgagtttgttggataccttgacattttctatgctataactaattggaaatcaattttgcattgtaaaccaatatcatttattaacgatgttcgcattgctgcagttacaattcatagagacaacatagtataaatagtagaagccgttacggattaaagccaaactagcaggctctatcttttataagtacaaaattgtgccgaatgctctatcttttataagtacaaaattgtgccgaaaaaaaaatgcgacagtcattgaagtcatctagctaaaaaaggtagcaacctctaatacatccatga

SEQ ID NO: 51867 - DNA, 1827 bp, Zea mays
  Clone ID: MRT4577_147299C.1
ccggccgggacatcgccgattctcctcggttcctccgcccccgtagcacccccgcgcgcccagccgtcgccgcgatcgcgagactgcgagagccttccgcccttccccttccccttccccggccctgccgcgctgttcggcccgtcctccttccttccatccactcacgcgaagcttccagcagaggcgaccgccgcatcaagtctcggctgccgaggagtcgagtcatggaagtggtggcgtcggcgccggggaaggtgctcatcgcgggaggatacctcgtgctggagcgccccaacgccggcctagttctcagcaccaccgcccgcttctacgccgtcgtccgccccctccgcgacagcctcccagccgactcctggacctgggcatggacggacgtcaaagtgacttcccctcaactctcgcgggtggccacatataaattgtccctaaataaaacgacgctgcaattgacgtcttcaagggaatcgacaaacccttttgtggagcaggccatacaattctccgtagcagctgctaaagcgaccattattgataaggagaggaaggatgtagtagataagttactgctgcaagattggagcacgtggtctccctcttactccggaggacaatcttctggcgacaatgcaagtgaacgagaacttgacttggttcacgctattgcccaaagtgcacattgtttagcacaagggaaaattggcagtggttttgatgttagtgctgctgtctatgggagtcaacgctatgtaaggttttctccagaaatactctcctcggctcaggctataggtgggactgtcttgccagatgtagtatcagatgttctaacacaaaggtgggatcatgagaataaacagttttcattacctcctctgatgacccttctccttggggaacctgggaccggaggatcatctactccatcaatggttggatctgtgaaacggtggctgaagtctgaccctgagaaatccagagatacatggagtaaactggccattgccaattcaacgctggagaaccaactgaggatcttaaaaggcactttctgaaaatcaccatgaagcatatgagtccatggtgaggtcctgtagtcgtctcacatatgggaagtgggcagaggtggctactaaccaacatcaagaattaattataagatcattgttggctgcaagggatgcttgccttgagataaggcttcacatgcgagagatgggcatagcagctggtgttccaattgagccagattcacaaacacggctactagatgccactatgaatatggagggtgttttactggctggagttccgggagctggtggcttcgatgcagtgttctcagttgttttgggggatgcaagtaatgctgtagcacatgcttggagctctgttggcgttctgccccttcctgttcgagaagactgccgtggtgtttcattggaagacgctgacccgagaacaagggaggtgtcagcagctgtatggtccatccaaattaactgattctactgttaatagttctgtgtttatgcatggtgtaccaatatcatttattaacgatgttcgcattgctgcagttacaattcatagagacaacagagtataaatagtagaagcgaacagtctcataagtacaaaattgtgccgaatgctaggaaatgctaggaagtacgaggtacgtggttaaataagtgctgcacttgcagcaagatagcacatgagcaaattagtgcagaaaataagaaattatatggatttccatggaaaaaaaaaaaaaaaagggcggccgccaccgcggtggag

SEQ ID NO: 51868 - DNA, 412 bp, Zea mays
  Clone ID: MRT4577_14729C.1
accaataggatataaaagataatttttcatggggggtttacagtttagctgtgggaccatacacccaagattttgttggaccataacaccattgttatcataaaactgggtagaaaagacttttccagttttcttaacggggagaaaaccaccggggtccatattttaaaataagagttgggggaaactgggtatgagtttgggggtctttttgccccattttttttagcacaatccgggcacatgtaatttttgggttggttaaagggaaattcccatacaagacggatggaacctggacagttggtttgttggttttttgagggagggtcaacctttttaaaaattagcccatctatccattttttttggggcaagttaaacaacattttttttttgggcttatttttgg

SEQ ID NO: 51869 - DNA, 437 bp, Zea mays
  Clone ID: MRT4577_1472C.1
tacaccgagacttcagtaatcagtgctcgctatcccaccacgccgccctgaacctagcccggacacccgccaggacaggccagcccggcgccagctccagtttcgtgccgtgcattgccttgcctttcccttttcctcctcggccggttgccattgcacctgctgctacatttggtttgtggacatcaaaacgaaccgctggaacagcgattggccgtggtcgtgaactaggttggtggaatatgtgatggagagtgacagagtacttgtcgtgtcgtatcaaggcggcggggtggtcgtcataaaggaggcgaggtcgggccaggctgccgtacatgggcgcccggggaacggacgtgtgttgtgcttgtccggggcgttgtattatctaccattttcctatttcttattacaattcattcctgcagtataccatg

SEQ ID NO: 51870 - DNA, 1342 bp, Zea mays
  unsure (1)..(1342): unsure at all n locations
  Clone ID: MRT4577_147300C.1
gacccccgaggttcggccgggctagcccatcgccgattctcgggggttcctccgccccgtagcagcctcgcgcgcccagccgtcgccgcgatcgcgagactgcgagagccttccgcccttccccttccccggccctgccgcgctgttcggcccgtcctccttccatccactcacgcgaagcttccagcagaggcgaccgccgcatcgagtctcggctgccgaggagtcgagtgatggaagtggtggcgtcggcgccggggaaggtgctcatcgcgggaggatacctcgtgctggagcgccccaacgccggcctagttctcagcaccaccgcccgcttctacgccgtcgtccgccccctccgcgacagcctcccagccgactcctggacctgggcatggacggacgtcaaagtgacttcccctcaactctcgcgggtggccacatataaattgtccctaaataaaacgacgctgcaattgacgtcttcaagggaatcgacaaacccttttgtggagcaggccatacaattctccgtagcagctgctaaagcgaccattattgataaggagaggaaggatgtagtagataagttactgctgcaaggtctgaacattacaattattggtcacaatgatttctattcttatagaaagcagattgaagcacgtggtctccctcttactccggaggtactgctttcattgcctccattctcttcaattacatttaactcagaggttgctaatggaacaatgactggagagaaatgtaaacctgaagtagccaaaactggacttgggtcatcagctgccatgaccacatcaagttggtgcagttcttcttcactatcttggtgccgttaacctctcatgttcaggacaatcttctggcgancatgcaagtggacgagaacttgatttggttcacactattgcccttagtgcacattgcttagcacaagggaaaatgggcagtggttttgatgttagtgctgctgtctatgggagtcaacgctatgtaaggttttctccagaaatactctcctcggctcaggctataggtgggactgtcttgccagatgtagtatcagatgttctaacacaaaggtgggatcatgagaataaacagttttcattacctcctctgatgacccttgtaagtcgccaagcctcaatgtccatattgttgtttccaaaatggcaatcaaatcattttactggtagtcaccagccaccataactactggtctgctactactggtataggatttacagttcctttactagacactgcaatgctatgatgcttataggctatagacattaggccattccttatgctg

SEQ ID NO: 51871 - DNA, 357 bp, Zea mays
  Clone ID: MRT4577_147301C.1
ggccgcttttttttttttttttttctgaacgatgggaaaccatctaagtgataaccacgactagtgacgtactgagatatgacggcatgaaaaatgcaggggagcggacgaacccaccaaccgggatcagtcagcgctggtacgaagcctagtaccccgttgagcgctgtagccaaaaccctctcgagtagttgaccgcgacccaagacattccgtcggggcaccagtgggggtagagccaggcagacgtccaatccggatagggtgcgaacctgaagcttgagggcgtaggacgacgtccatggaagcgcaggtctggcgcccgccgagctcagagtgggctacggcgacaagaat

SEQ ID NO: 51872 - DNA, 142 bp, Zea mays
  Clone ID: MRT4577_147302C.1
tactttcagaaagctgaactgaacagattgtagtacagtagaccaacagaacaaaaaagtgaccttctcttgcttccctgaaacacagaacaaggccaatatgctactagagcagatcccaggagttttgaaatcataagtc

SEQ ID NO: 51873 - DNA, 332 bp, Zea mays
  Clone ID: MRT4577_147303C.1
ttgtaacagttaacgttttgcacattttcaacaacaacaacaacaacaaaaggtcagtccgtgcactggacgattataagggggccagggtgaagtacttgtcgaaaacaacgacaatggaggtgtccggggagctgaggaccctgttggggaggtacccgcgcgcgaaccggagtttgcccgtgccgccaacaatgctgcgctccgagggggccaacacggggaagggccccgttgtcgccagggtgctgccgtttgtactccccgaagtcggaaaaggaaaagtctatggcggggaggcccccggttttttccagggacgcgggcacccc

SEQ ID NO: 51874 - DNA, 373 bp, Zea mays
  Clone ID: MRT4577_147304C.1
ccccccccacaggcaaaaaggcggccccattttggggcccccaaataacggggctcccaaagaaagggcccagggggcccccggggcctaaaaaaaacccggaaagaggggggggggggcccccccgaaacggccagaacggggtcctggggaccgggcccggaaaaatcccaacggaatcaggcattggggctacagattggcccccttcccaccccatggaaaaagacggaaaaaaaaaggggggggggccccccggggggccccaaggcccggggttttaaggcattaacggggggccccaaacccaaaaaaaggggccctggggggggttaaccctggaaaaagaaccgggtaaaaaggggcctggggg

SEQ ID NO: 51875 - DNA, 308 bp, Zea mays
  Clone ID: MRT4577_147305C.1
cccacgcgtacaccgacgcgctctcaaatcccaatttcaccgtatattttgaacagggcgaccgaaggcggtggtgggtttcatcatggacttcgcgcacaatctgatcctccgtatgatggaagacccgtacaagcccaacaagtttcgctggaacatttcttccataataaagaacttttccaacccactaaagccgtgttgaaccttcctcttctcccctaccgattttttaactttaaccgcttcaactcgcagctctccttggatccccatatcaaccataccccctgcctttcttaccccta

SEQ ID NO: 51876 - DNA, 288 bp, Zea mays
  Clone ID: MRT4577_147306C.1
aatattttgaaacaacagaacacacagctaggggggattctataaaaagggctcattttaaccggagaaaaatgaaccatactttatagtgtccaggcacaagaacgaccgagaggaggatgatcatcaaacgcgactaggagtcccgaagcatatttcaaagtgcgctccagaacattgtggaacaaagtgtagtgcacaataacttcttaactgaccatttgcagtggtagacagcattatcttctcaagttaggggaaggtgaacttgaacataacggagaccac

SEQ ID NO: 51877 - DNA, 292 bp, Zea mays
  Clone ID: MRT4577_147307C.1
ttctctgacgtgcacagacccacctcagccccgccccaactctccgacgcgctctcccaagctacagctaccggcgagcgcatccatcacaaccccgcatgaccacctcttcagccgcctcctccgcgccgccgaccgccgaaaaccctacagaggagacgaacacgacaagaaggacgcccatcactgcccacgccctatcaggcgcgcataagcgccacgacgaaatcgcactcacaggagaaggacgccaacacaggaacgagggcccccccaaggagaaaggccgcaa

SEQ ID NO: 51878 - DNA, 368 bp, Zea mays
  unsure (1)..(368): unsure at all n locations
  Clone ID: MRT4577_147308C.1
ctactcggtggccgccggttttttttttttttaaaaagccaaatttatgcttttatatcacccgagcaaaaattgngggcattgggaaacttataacatgcgccgtacaaaaatgcagacaaaaggtccacacataaaaacatatatccagctgcctgatcctctaccagccaccaactatcccaaagcattaaagaatgcattacacatggtattgatcatcatcatcaggcgccttactccttgaacggtgccgaatactttactgaattcttgaccatctatcctggggacctgcattcttccctgctttctgcattgcctctctctttctttttaaatcctctatatactgggtatgcccctct

SEQ ID NO: 51879 - DNA, 274 bp, Zea mays
  Clone ID: MRT4577_147309C.1
gtattattatttctcttgaacttggccctctgcttcacgtccaagttcatcacatccaagtgcaactgcagagcgggcatgcaggcacaagctatacgttgcttctgatgaactgcacaagatcaagcctgtttatttggcgaagaagaagaagaagaagaagaagaagaagaagaagaagaagaagaagaagaagaagaatgcgctgagactgctgcctgggctaggaacggaataggtctagcattgtcatgcagatacatgtatcttgata

SEQ ID NO: 51880 - DNA, 457 bp, Zea mays
  Clone ID: MRT4577_14730C.1
gccgctcgcgatcttagaaactagttctaacgcgagcggcagcctggtttttgctttgtcgcgtgctcgagtcatgctctttatgtgtccctaatttcattcttggccgttttcgttcaagctttttttcttcttggggggcgcccgttttttttttctcctcgccgttctctttttgtctccctcttcttgggtctttcttttcttccttttttttcttcctcctttttctcctgttttcttttttgccttcttttttttttgttttccgtctttttttttcttcctttttttttcttgtttttttttttctttcttcttttttttctttttttttgttttttttttttttgttttttttttttttttttttttttttttttttttttttttttctttttttttttttttttgctttttttttttttttttttttttttttttttttttttttttt

SEQ ID NO: 51881 - DNA, 551 bp, Zea mays
  Clone ID: MRT4577_147310C.1
ccctaacccacgccaggcgccgtcgccagaccaaaccttgcctaacccacgccagccgccgcagccacaccgggacaccgtcggccagcagcagccatgccgtccaagttggacccctcgcaggtggtcgaggtcttcgtccgcgtgacggtcggcgaggtcggcgcggcgtcgtctctggcgcccaagatcggcccgctcggcctctccccgaagaagatcggcgaggacatcgccaaggagaccgccagggactggaagggcctgcgcgtcaccgtgaagctcacggtgcacaaccggcaggccaaggtctccgtagtcccctccgccgccggccttgtcatcaaggcgctcaaggagcccgagcgggaccggaagaaggtcaagaacatacggcacagcggcaacgtcgccctcgacgacgtcgtcgagatcgccaggaccatgcgccccaggtccatggccaaggagatggccggcaccgtcaaggagatcctgcgcacctgcgtcagcgtcggctgcaccgtcgacggcaaggaccccaaggacct

SEQ ID NO: 51882 - DNA, 930 bp, Zea mays
  Clone ID: MRT4577_147311C.1
aattcggcacgaggggcccacctaccgaagtccgaaacctcgccaagcggcaccaaaaaaacgcagccaatcgaaaccctacgtccgccgccagcttcaagctcccagagactaacccttccctccctacacactaacccacaccagccgccggccagcagcagccatgccgcccaagttggacccctcgcaggtggtcgaggtattcgtccgcgtgacgggcggctaggtcggcgcggcgtcgtcgctggcgcccaagatcggcccgctcggcctctccccgaagaagatcggcgaggacatcgccaaggagaccgccagggactggaagggcctgcgcgtcaccgtgaagctcacggtgcagaaccggcaggccaaggtctccgtcgtcccctccgccgccgccctcgtcatcaaggcgctcaaggagcccgagcgggaccggaagaaggtcaagaacatccggcacagcggcaacgtcgccctcgacgacgtcgtcgagatcgccaggaccatgcgccccaggtccatggccaaggagatggccggcaccgtcaaggagatcctcggcacctgcgtcagcgtcgggtgcaccgtcgacggcaaggaccccaaggacctgcagcaggagatcgatgatggtgaggtcgagatcccctccgcttaaagaaagtgtacatgtacttcagagggaacaagtgaagtcagtcatgatggagagttacgtttgttgagaaaatttggagttacttgtggctacttgtagcacatgttcattcgatggttttcatacctgtcagtcctataatttctgcaatcctcgcggcggcgcggactacgacggtggctgactcgtagcgagaccttctcccttctcccccgcctgacgcccggcgaccactactcactcgctgctctggaagtctggca

SEQ ID NO: 51883 - DNA, 460 bp, Zea mays
  Clone ID: MRT4577_147312C.1
gattatttttttttttctttctctttttgtggggtttaacctttctttttttctggacacagcgcccctgagcaactacacccttgagtgggaggccatacacaactgcccgatgctccttgcagactgccgatgcaacttggatcgcgcggggggggggatcgcttttctctatttctaccgtcccgcgcaggacctccatgcctgtctcaccgctttaaaacgttaccctttcccgcgtttacatgttccccaaaaaataggttcgtgactaggtgaataacaccatgaagaatgcgcgagacgtattcaaccacgccctagccatcatcaagcaaggcgccgttctcacctacatgctagacctttacaccatacttgacaagggccgccgtcaaatgaaggaagcacagaaatccaggtcatcatcgtcgtcgagcgtccccacgtgggtgcccaa

SEQ ID NO: 51884 - DNA, 109 bp, Zea mays
  Clone ID: MRT4577_147313C.1
gtccgtccaccgacctccgagatttgagaccgtgctgcgaatcccccactgataaaattgaccactcgtcctcagccctgcccgtcatcatggtcaatctctctccagt

SEQ ID NO: 51885 - DNA, 206 bp, Zea mays
  Clone ID: MRT4577_147314C.1
gcacgtaccggtactaattcggggacgacgtacgccaacattacgcgaagctcacatgtggggtcgcttcaagatggaggatgagcaccacaggaagggcgatgagcgcctcatgatcgtggtgggggagctccacaagaaggtctccgtggagcatattgatggcatctcgtagaagatcaagggcacgatcaccggtgagcact

SEQ ID NO: 51886 - DNA, 124 bp, Zea mays
  Clone ID: MRT4577_147315C.1
gactagttctagatcgcgtcggactcttcatgtgtctgttgtatgttgtctatactatcaataatgctcctgagacttgtatagcaacacttggcgccgttaaatggcattttcgaacaatcat

SEQ ID NO: 51887 - DNA, 658 bp, Zea mays
  Clone ID: MRT4577_147316C.1
ccgggtttgacccacgcgttcttataaaaaaaaaaaaaaaaaaaaaaaaaaaaaaaaaaaaaaaaaaaaaaaaaaaaaaaaaaaaaaaaaaaaaaaaaaaaaaaaaaaaaaaaaaaaaaaaaaaaaaaaaaaaaaaaaaaaaaaaaaaaaaaaaaaaaaaaaaaggggggggccgttttttgggtttccaattttccttccccttctttggggggggttggtttttttttggggccccctaatttaatttcatgggccgtgtttttaaaccttgttgtttggaaaacccttgggtttcccaattttattcccttggcgccacttccctttttccccggttgggtttttaccaaaagggcccccccttttcccctttccaaactttggccccccttttttggcaattggaacccccctttttgggcccttttagtcgcgggggtgttggggtttccccccgtttgtcccttttctttggcaaggccttttgcgccctttttttttgtttttttccttttttttttgtccccgttttgggggttttttccccgtttgtttttttatatggggggtgtctcttttttgggttttccccttttttattgggtttttatcggggcccttttttccccccctaaaaaaaactttttttttttgg

SEQ ID NO: 51888 - DNA, 273 bp, Zea mays
  Clone ID: MRT4577_147317C.1
ggaaaaattatttgttttatttaggggggccctagaaacattaactgggaaacacagggcccccaaaactggggggtggggcacccggaatgtttaaaaaaaacatagggaacagggggtttttaatcagagggcccaatttttttttttgggaccacaagctcagggaatttttgctccgttaaaaccccaggggctaagggagtttttttaaacggggtcccttttttgggggcttttttagaaacaggtgcagcatttgaaaacccaatt

SEQ ID NO: 51889 - DNA, 111 bp, Zea mays
  Clone ID: MRT4577_147318C.1
attgttatgccctgctgcccatgattgctcacggcgttatgcttggagaccaccatcctgctattctgtagcatgctagacgttccaccagcaggcgaagcccttagtggt

SEQ ID NO: 51890 - DNA, 299 bp, Zea mays
  Clone ID: MRT4577_147319C.1
tccttcttgcaaaccgacggccagcccatcctcaccatgttgcacacgctctccagcacgcacaacacatgtgagtggctctcagcctacagctcgaaccacagcgagctcgctcttcaccgcgaaggaagcctcgctattccagctgaagacggagatggacatcttcctgcactccaacaccgcggagcaggcgcgccactacaatacccaggtcagccactatcgacaggtcctgctcctattacctcggcaactacagcaggatgaccgccaagatgaaccgcctgtttaccgtc

SEQ ID NO: 51891 - DNA, 364 bp, Zea mays
  Clone ID: MRT4577_14731C.1
caagagacgaggaggtatcattcagggtgcattcgtactaactggccaaattacatggatcccaaacagtatccccctttgaaggtaaactgtcaagaaagcaaaatgaccccactgaaagattttcttacaaaagaatcagaccccagtccacagtctcaagccatatatctacaatccacagtacaccgtttcaagtatccctaaccatctataacccctcttaatccggaaccaaatcttgtcgtgtttgcgttgaatcatataccgggcctggcttttacctgaagtgctccctgttcgcattgccaccgctcgcagcaaaaacaaataccgccattactctcccttgtattcccgtcac

SEQ ID NO: 51892 - DNA, 355 bp, Zea mays
  Clone ID: MRT4577_147320C.1
gtaagctcggatcctgaatagcgggcgccctctattctttctataggcaacggaaagcacgaacatgtattggcccgaaattttggcgatgacctaaaaactgcattgggacgaagtcattctgaactgactgtgactgtgcattgttaacacaatgaactgggtgctgggaaatacatctactgaaaatggagccctcagacgctcaaaacctaaaagaagtatttttatcaccaggtccaacttctatgtatcctccatcctatgcaacatcatgttagcgttgagatcggaacacagattttcaccctaggctatcctccaggctatttacctaacatacgcactctcctgt

SEQ ID NO: 51893 - DNA, 555 bp, Zea mays
  Clone ID: MRT4577_147321C.1
cattgggacctcgagccggcgggcggatctcattcatatcccttgcagtaagtctcggcgactctagaatacgatggacaaagacgacgtgatcaagagcggcgctggcggcgccgagatcgctgccaaggactacacggaccctccccggcgccgctgatcgacgagcctgagctgcagtcctggtcgctgtaccgcgtcgagatcgccgagctcatcgacacgctgctgtacctgaacatcacggtggccaccgagatcgggtacaaccaccacacggacgcgacctcgccggacaacaacgcggcgcgcggagctgtcacggagctgtctatcgcatggactttcagcgctatgatcttcatcctcggctactgcaccgccggcatctcggggtaccacatcaaccccgccgtcaccttcgaactcttcatgacgtgcaaggcctccctggtgctcacgctgatctacatcaagaagaagagactcgacgacatctagattgtacgactgcaactcggtgcatccataacgcctacatccacaggtacggag

SEQ ID NO: 51894 - DNA, 164 bp, Zea mays
  Clone ID: MRT4577_147322C.1
caggggaaccccccctgtaccccaacttaaagcgcggggggtagagtggtttctcgccaggtggccgatacactaagaagccccctcaggccggcttttttaacttttttccattcttttttgcgaaagttccccgccttttcccggcaaattataaacggggg

SEQ ID NO: 51895 - DNA, 185 bp, Zea mays
  Clone ID: MRT4577_147323C.1
caaaaagagatcaaatcaagaacacctcaatcaatggggtagaaaagtactctttcaacgtagctacataggaaccccggcaattacggaccggggccggttggagcgcgcaggttccctatagtctgccttcgcctagctgggggtaacgatggccctacgttgttccccgtgagaaaccggcc

SEQ ID NO: 51896 - DNA, 480 bp, Zea mays
  Clone ID: MRT4577_147324C.1
tgatggtgttttggaactaatgaaacatgcaaccgagtgtggtttggaaacaaataagggtatctcacttgatgtgtcaacaaggtggaattcaacttttctgatgttgagggatgctttatactataaggatgcttttactcaactcaagcttgctgatcggcgtaggtatgaacacatatctccaactcctgaggagtgggacaaggccaaaatgttgtttcatgccttgaaaaaattttatgatctgactgagcttctgtccggtactttatatccaactgccaacttgttctacaaaggcttttgtgagattagaagtttgcttggtgactggtctactagtgaagatatcaatattcgtgaaatggctatttccatgagcaaaaaatttgagaaatattggaacaaaagcaatgttgctcttgctgtggcaagtttccttgatcccaggtacaagagaaaagtagtagagttcta

SEQ ID NO: 51897 - DNA, 431 bp, Zea mays
  Clone ID: MRT4577_147325C.1
cccacgcgtccgcccacgcgtccgcggacgcgtgggaaaaaatctcgccgcacgggggctgcgagtatctggcaacgctccggtgaattacagcaactggaggtgaggcgaccgctgcggtgccgtgcatcaccaccctgccccggtgcccccccgctccacgacgacgcggcacccgcacgtagtccggacggcgagcacttgagctgagtcggccgcgcttcggctttctcgcccgagttgctcggtgccgcgtcttccctctttcggcggcgtgatctgcgtctcggcgctaagagagctgtcgtctcccggctccggcacttgcacaagaccttgagctgatcggccggccttctgcgcgacggtgaatctccgcttctcattttgataatttcccgcaagtcccctcacttcggatttgactgaag

SEQ ID NO: 51898 - DNA, 610 bp, Zea mays
  Clone ID: MRT4577_147326C.1
cccccaaaaaagggggggggttgggacaatttgtttttcccccaaaaaccccaaaaaactttttttttttttacaaccccccccggggggcccaaaaagacccccccaacccgaccacggacccccccaaaagggggggccccccccccccagggttggccccgggtgccaaccacaaaaacaaccgccgcgggaaagcctccagcgggggccaattaaaaaaaacaccgggggcccccctaaggggacaaatttgcctacttgtccttggggggagctttagggagggccctggaaaaagcctttttttttggccccaaaagattttttttcccgtttaaaaaacggccccctaaccttttgttggggggccggaaactttggggggagacccccccccccccccggggtccggcccccattcctaggggggggccctttaagttttgggaggggggggggttaaaactttttgttgaaccaaaaaacccccttggggccctggggctcaaagaaaatcccccccctggcccccccccaggtccccttggaaaaaggggtggggtcaaaggggtattaccccccgaggaggggcctgacccccttgggg

SEQ ID NO: 51899 - DNA, 149 bp, Zea mays
  Clone ID: MRT4577_147327C.1
ggtggaagttcttagctgtcgacaacatcgaactgttgtaatgctgattggtttttgcgttgagcgaaggtggcgtttattggtgcacgagtacatctgcaatagatctttggaactcacgtctctatggtcgtaatagcgaaacattg

SEQ ID NO: 51900 - DNA, 635 bp, Zea mays
  Clone ID: MRT4577_147328C.1
cactgcacgaaccttcgggatctgcgagaccgacgactactacaaccgagagggaggggacggatcagtgcccgcagggaggtcagaactaggaggcacgatccatactacagcctggcgcgcccataggacaacgggcgatgcctcgaccgcctgctgccgctctttctgatgccgatggtgaaggcgctctcttaccttaccaacctcatcatgagaaaggtgaatgaggttttggcatggtagtaccgaaacacctgaaagaggcccacctgcatgttcatacaatcctgcagatgaaaaaaacgatgaaggtgcgagcgaatgaaaaccgctggacaaaccgtacggcgcttgtgctgccgcggctgaggataagaaagtgtgatgatgcatcaggcgcttaaaatggtggccacacttttgaggggctagctaagaaacaacagcgctgcgggtggttatgtacttggttgatgggtggaactcgttatgacactcccgatccttaccaggtgcattactaatcactgatgctgggctggtctgactcaaagaaaggagctgaacttgcagtcacaaatgtaataactgagagtgaatctgtgctgaccaaggcttaacggatagaatat

SEQ ID NO: 51901 - DNA, 289 bp, Zea mays
  Clone ID: MRT4577_147329C.1
tgtgagttgctaatgaaattttgtacattcaatagagagagagggtagttgatgttaagcgtgttatgtgactgccctttcttttcgctttgcttcctggatccaactgccgccttctcatcctgtcttcgttgattcgctgttcttccatcggatgcctttatctgcctagatcggatcatgagcaaatctcattgtgtaaatcctgataggaggaagagaacgaccatagttgatcgataccgtccctgtattgcttgtgcctgtctcgtacggctcttctaacaac

SEQ ID NO: 51902 - DNA, 673 bp, Zea mays
  Clone ID: MRT4577_14732C.1
aatctcgagcctcggtcacagacgttgaagcatcacgaactaccgccgataactccggcggtcgccgccgatggactcctcttcgtcctcggtccctgctgctgcggctgcggagggggcgcctccggcgggggagaatctggccgtgttctggcacgagggcatgctggcccacgacgccggccgcggcgtgttcgactcgggccgcgacccgggcttcctcgacgtgctcgaccaccacccggagaacgccgaccgcgtccgcaacatggtctccatcctccgccgcgggcccatcgcgcccttcctctcttggcactccggcacccccgcccacgccagcgacctcctgtccttccactccccagaatacatcgaggagctcgcgcaggcgaatgccagtggacccaagaagttatgtgagggcactttcttgaaccctggttcatggggtgccgcgcttctggctgccggaacaaccttatcagctacgaggcacatactagatgggcatgggaagatagcctacgcattggtccgtccccctggccatcacgcgcaaccggaccatgccgacggttactgctttctgaacaatgccggacttgctgtgcagctggctctggattctggccgcgcaaaggttgccgttgttgacatagatgtgcactat

SEQ ID NO: 51903 - DNA, 352 bp, Zea mays
  unsure (1)..(352): unsure at all n locations
  Clone ID: MRT4577_147330C.1
tgatgcnnncacacgtgnngggcagnatnnaatatcagnaaagtgatnnattgggtgcccttcgtctcatnanatataccagnntaattgacccgtggaggcggggagtggtgggggnntttgccggcgcccaaaaatattgnnactgttggagggtgtgcgacgcatggtaggaaagaagnnctatacatctgtggtggacaatcatgggcccnnccttttattgtgnntttcccttgtggnacatgnnnccttccatttgcaaatnntgcttgnnattggacnactgtgacnntcgttgcatgtaaaccatggtnngcaagctgnagaagaatatattggtnnaccttca

SEQ ID NO: 51904 - DNA, 580 bp, Zea mays
  Clone ID: MRT4577_147331C.1
atttttgttgactgtaaatttaataaatatgcatatcacacaaactttgtttaaatactatccaagatggatgcccaaaccacaaggaggcaattcatttctacgtaaacaagctttgtataaattgacttttgcgcaaccaggtcgggctaggaattgttatcgattagctaccagatgttttattcgtcatttacaaatcgatcaagaagaatctaaacaaagatacagttattttcgtgatttaaactcacagcgaatttacgctgcctgtgaagatttgggttatccttataaatacttcattggaaaacttcctaaaatgggaattgaaattgatcgtaaatgtttagcgaatattgcaatatgggaaccccgtacttttgagtctttagtggaaattgcgaaaaaatatgatgaaacaaattttaaactagaataaaattttatttaataagttttcatgaataagcttacccaattcttagaatttactagattggtgcaaattttgtacagattttattgtatatttattaattttgtaaacaaaaataaattatttgtttttatttagtat

SEQ ID NO: 51905 - DNA, 738 bp, Zea mays
  Clone ID: MRT4577_147332C.1
gagcggttaccagaaattggaatggtgttgtgtcgataacgaccaagtgtttcagaatctaagacatctatcagttgctggatgtccgaagttaagagaatatcctacatatccttggacacttgaacatatagctattctggacggggaacaaattcgatttaagacttttattcctagtgctagagtatcgagaactttttgtatcttggtatcaagcttcttccatgtcttacgtgcacatcacctagaatttgtcgaagatatggagatctatgttaaccatgtggtatgcatgtccagagaagtgctagaaaatctgaaatctctccagaatttgaaaatatatggcatacatagggccaacacttgctctgtgattgcaaaattgtgggatgagaatgggtcagctgtgtttccttcatcacttaggagccttcagttagtgcagtgctacctgaaaccatcctatttctccaagcagttgaataacctctcatcacttgagactttgcgcctattaaattgtgacaccattgggatgccctgtccaccagtaaacatgtggcacttgaggatactaaaacagttggtcctttataaatgtgattggatcacctttttggaggggtcagaagcattggtttccctggaagaaatggccataattgacttgtaccacttgaaatatgtaccagatttaaacaatatgccatctcttgagaaattgcatttgag

SEQ ID NO: 51906 - DNA, 290 bp, Zea mays
  Clone ID: MRT4577_147333C.1
aacataaggggtgcagatgacgacgatattggggatgatgaagatgatgtggttgatagtgctaacatggatggataaggtggtaagacagattacagcaaggaggaggaagcagctccggcagcggcaaaggaagttgtaccatgaacaagcatttccgtatgctcgatgccaaacgtgtcgacggcatctaggtaggctacacgtatccttggctttttggagttaaatctgtcagtcgaatcactcaatgcctacgtcaagtatacgatacaacaggagttgtgctg

SEQ ID NO: 51907 - DNA, 304 bp, Zea mays
  unsure (1)..(304): unsure at all n locations
  Clone ID: MRT4577_147334C.1
caggaccggcccggaaaaacacctgggacgacgagctctctagccggcggccgccctcnacaacaggggggttttgaaacagacaaccgaggaaaacccaaaccgagatcccaaccaacgaagcgcagatgagcagatgcaagagaccagacacaccaacacgcatgcgctggaccgggtgctagcagcccgagcatcaagcacgaaatggcccaagagcagcaagaggccagctgatcagagacaatcacgcgcgcaggtgcaagcccagtgagaagcagccagagacgagcaatgaacaaca

SEQ ID NO: 51908 - DNA, 397 bp, Zea mays
  Clone ID: MRT4577_147336C.1
ggccgcttttttttttttttttttctgggggggggccggtggccgcgttctctttgttccggccgtctttcactgggtccagtggctcccctcctcataggtgcctccccgccactcttaaagcttttgcggccacatcgcaccaactggcgattactctgggcagccactgggccggcctgggggggcggcacactcaagactggcaccagtccgcttagtccacctcctagatcttggggccagggccgccgctgccgggaggggcgtcctcgttcatgccgtcagcgccgtccatgtgttcgcccgggccctggcacatcttggcgatggtggggttgttgcaggctctcccgctccttcatcttgcccttcagctcgtccgcctcggcgagct

SEQ ID NO: 51909 - DNA, 660 bp, Zea mays
  unsure (1)..(660): unsure at all n locations
  Clone ID: MRT4577_147338C.1
gggaccctcgggccggcccgcccgaccagccccatggacccggccatctccgcccgcgtggaggagcagtacgtctccaactccctcttcacgggcggcttcaacagtgtcacgcgcgcgcacctcatggacaaggtcatcgactcggaggccagccatccgcagatggcgggggccaggggctcctcctgcgccgtcaacggctgcgacgccaacgtcatgagcgacgagcgcggcgacgacatcctcccctgtgagtgcgacttcaagatctgcgccgagtgcttcgccgacgccgtcaagaacgccggtgccatctgccccgggtgcaaggagccatacaagaacacggagcttgacgacgtcgttggcgctgccgctgatgccacagccgggggcaggcctacgctctcgctgcccccgccgcctggcgccgctgcttccaggatggagaggaggctctccatcatgcgctcccagaaggccatgaccaggagccagaccggagactgggaccacaaccgctggctcttcgagaccaaggggacgtatgggtatggcaatgctatctggcccaaggagaatgaggtggacgctgcaggcggcttgggtggaggtgggagctgatggacagnccgnccgagttcaccaccaagccat

SEQ ID NO: 51910 - DNA, 296 bp, Zea mays
  Clone ID: MRT4577_147339C.1
gcttgctactgaacagggaatctataacgctacgtaaaggtcgttcactggacgaggaattactacatagtgactgtaaaaaatcagtcgttaccgaattaaagtgatcatcaggacatccatctttaagaaggcgacggttgatggaagatgcacatgagagacgaacgctctaacaggtgcacaatctgtatgaccaatgggacgcacccatacacggttgttctatatgaatggtataacagggtacgctctgggagatcgattctgatatcagcgctctatagcccgctgct

SEQ ID NO: 51911 - DNA, 444 bp, Zea mays
  Clone ID: MRT4577_14733C.1
gggaccacaaagaaccttttttttgggggaacggaaaagacccttataacaacagccctaacgaagggactttggaagggggacctgggtttttggcacaaacccgggcaggggaaaaccacccttaagggaagggacggggaaaaccaaaacaattggggggacacccgtccgtcctaagttaaaacaaacaaaactaaaagggaaatgctgttggaaagcccctgggggggaatcccgggggggcccccctttgggtggggggggtgggggaaaaccaccgggaagggaaacccgcccggcccgtgggggttttgggggggagggcccgggttaaggggaacaacccttttttggatctgggaaagccgccccccaaaccgttgaaacccctccgggccctgggggtccgacgcccactctttggggccggcctggccgggg

SEQ ID NO: 51912 - DNA, 585 bp, Zea mays
  Clone ID: MRT4577_147340C.1
gtgcagcatgtaggttagattctctgaaggatgtttttttctggggtgatgcttttggaagtattttagagtgtggtgatacctcaaaaccccttccaatgttagtggactcaacgaacatgcttgatgtacaaagcattgcttgcggagagactcatgcggccataatcactaagcaaggagaggtatactcctggggaaatgagagcagtggcagaattggaaatcaagtaaatatcaaagtctcccgacccaaggtcgttcaatctcttgcctctttacatgtgaaggctgtggcctatggatcaaagcacacttgtgcagtaactgtttctggtgaacttattgaatggggagaaggaccctatatgggccagttggacagctatgcgaggaatcaatggtttccacataaattgtttagtccactggacggcatatctgttgtgaagattgcttgtggtccttggcacacagcaataataacgtcgtctggtcagttatacacatatggggatggaacatttggtgttcttggtcatggagatacacaaggaactacccggcctaaaaagtagagtcttt

SEQ ID NO: 51913 - DNA, 213 bp, Zea mays
  Clone ID: MRT4577_147341C.1
aaaatacatattcacgtcccaaactactgcatctcgagctacttcactcaacatcatcttcggaatccatcaggttaagaacaaccaccagtcctgtatgcacctctatctagaaacgctagctgactttaagcatgcccatctgatctcctaggatccacaacttgacctactgactgattgacctcatacccgatgagcatgtgatggact

SEQ ID NO: 51914 - DNA, 233 bp, Zea mays
  Clone ID: MRT4577_147342C.1
acggccgaggcaatcacaccccccggttattccccccgccagcgcaaccaaaagggggggataaaaaaaacaaagccggggaacccccacggcacccaacaggcaacccaagacgaggggcgagacgaccaccagagcccggcagggcaagcaggggaccaacacgcgcaaccaagaggaccggagcagacccccacagaaggcaaggcacaccaccaagggaagaaccacaa

SEQ ID NO: 51915 - DNA, 1323 bp, Zea mays
  Clone ID: MRT4577_147343C.1
tccgcccagcgtccgcccagcgtcccaacagcgcattagctggtgaagaggcagaaaaggcttcattcggcttctttgaccgcaatgagaaatatgtcgaatgccttctgtcggtgaacaggaaagtaaatgcagatggtgttgtcactggagtgttctgtttcatccatgttcctagtgatgacctgcagcatgcgctacatgtgcagcaagcctctgagcagacagcacaaagaaagttgaaggctttctcgtacatgcgacatgccatcaacaaacctctctcaggtatgctttattctagggaaacactcaagagcacaggtctgaatgaagagcagatgaggcaggttcgcgtcggagacaattgccatcgccagctaaacaagatacttgccgacttggatcaagataacatcactgacaagtcaagctgcttggatttggatatggctgaatttgtgttgcaagatgtggtggtgtctgctgtaagtcaagtgctgataggttgccaggctaaaggtatcagagttgcttgcaacctgccagagagatccatgaagcaaaaggtttacggggatggtatccgactccagcagatcgtctccgacttcctatttgtttcggtgaagttctctcctgctggtggctctgttgacatctcttccaagctgactaagaacagcattggggaaaaccttcacctcatagacttcgaacttaggatcaagcaccgaggagcaggagtcccagcggaaatattgtcgcaaatgtatgaggaggacaataaagagcagtcagaggagggcttcagccttgctgtttctagaaaccttctgaggctcatgaatggtgacattcgtcacctcagggaagctggcatgtcaaccttcattctcactgctgaacttgctgctgctccttcagcagttggacgatgaggacaaactgcaacaagtgtcaaatgctctctcagagttcattcggaaagccacggtggtttgcggagaatgagaaatgttggagcggcgtgtaggatcaccgaatgcatagtacggctccatacttctgctctgtttctgcctgtaactcaactgtgaaaagttttaaactttcagaaagaaaaaccgtgagaggtgcaggttcaagttaatatgaataataaagtgttttttattaaaaaaaaaaaaaaaaagaaatgtcaaatttagcggcagctttggtgccttcttttagtccatgcgtgtgcatgtggttgtatactggtgtaactgcttggtgggctacccatggctcttgttcagcctccttgttcatagtttt

SEQ ID NO: 51916 - DNA, 503 bp, Zea mays
  Clone ID: MRT4577_147344C.1
tttgggcataggaaggcttggtgtaccatgtatggtggtgctggacactcgaagtcgatggttgagatagatcatggcctggatcttctgtggtggttgcactatgagccgacatgagctattgtaactagcgaagctgccatcccagctcatgttctagaagtacacacctgcctgatggcattggctttataccagtgccacccttgaagtagctgactgtactaagatacatttacggaggctgtgcaactggtgcaaactgaagatatctatcggacagcactgatgtttgtggctgtcttgtacggggagcttattatgaatactgatgttcatcaatcgtcatcaactcttgcacccatgaacactcttaagatgctacacttaagacaaactactttatttttgctcaacatgagctatgacagctagtatctatcgcgcactagcagagactgttttggatggccccaacttataggttgagcttgctaataatg

SEQ ID NO: 51917 - DNA, 346 bp, Zea mays
  Clone ID: MRT4577_147345C.1
atgaagcgattgcggccagcgacttacaacaaccaatttcccagttgccacaggaatcgttggaacatttaacaatccaaaccatggcaacacgactgcgacaactattcgtaccaggactgagccagctagccatggtgaacgctgccggctacttgctacagcagctgcttgcatcagacccacttgctctggcaaacttagatgcaaaccaggcacaacatcagctgcaacagctgctgacaacgctcaatgaactagccatggcgaaccatgccatctacctacaacagcaacaactgctttcatctaacccgctcgctgtggccaatgcacctacatacct

SEQ ID NO: 51918 - DNA, 544 bp, Zea mays
  Clone ID: MRT4577_147346C.1
acgcttcgaccactgcccgtttgggcccgctcgtcagatggcctggctgcttcacgcgccgttttgtcgccgattagtgggcccgagctcatggctccgtcttccctgcgcggttgggcgcaacagcctggccgagctcggcgggtctcgcccactagaaccggaccacgttgaccacataggggatgcataaaaggctcggtcgtcgactcaatccactcgtcccctttcctctcgcctttcctacagcaaacgcaagaatttctcgctgctgcggaaggaatcggggccgccacttgtgaacctcagactgtcgtcgaccgcgccctcgaagtcttgcccgagagcttccttggagtgggggaaaacttcatttggtgccgctgatcaggattgctcgcctgcgcactggcaatttctcaccgcgctccttccactgtggaatcgccctcgtcgtggacagcattgttccgaccgccattattggtgagcacactccccaattgcctcatgctgttgtcctccccgtgaatcattgttcgaa

SEQ ID NO: 51919 - DNA, 322 bp, Zea mays
  Clone ID: MRT4577_147347C.1
caacaactacaacaactgtagttaccaacactcaatcacgtaattgcaacgaaccttgctgcttaccttcaccaacaacatgcttgttccattcaatcaactacatggcgcgaaccctgctatctacttgcaggcacaacacactactaccatttaaccaacttgccgggagcccttatgcctttttactgcaacaacaacttctaccatttcatctgcaagctgtggcaaacattgctgctttcttgatacaacaacatttgcatgcattttacccacaggatgtgggaaacattaatgccttcttgcatcatcaacaatt

SEQ ID NO: 51920 - DNA, 620 bp, Zea mays
  Clone ID: MRT4577_147348C.1
ggccgcttttttttttttttttttatttttttttttttttattttttttttttttaattcacatttgtgagtttatctaggtatcacgcgagcgaaacaaggcaccattaaacaactcatcttatatagaaaccacacggatggtaccgggagccctgtatggctagccatgtcaagacgggattaaaaaaagggacctgcaagtatggcagcattcgttgcccaggcaggagggctgaaagccaaagggtgtgccacgaccaaagggttcggtgactggggaggcggccccaagtgcgcaaaacaattccacagaatcaagttgactgaacggaagcacttggggccggtaggcatcagggcatgccacatttggttgaggcaaaccctgtgcactatgcggcaacaggtgttgccgcaggtatttaagagcattgcccacaaagagggggcaacattaaaggagggggagcatgcgacccaatgccccacaggagagcaccactagaagacagagccttgtcacaaactgtggcagcagctttaacacatgattagtaactacgtgtgccaaaaaaacaggcagggatacaagctttcccttttgcaagaacgcaccc

SEQ ID NO: 51921 - DNA, 122 bp, Zea mays
  Clone ID: MRT4577_147349C.1
agaagatcatgttcgccatgacctcaatcaagggtgtcgggcgccatttctccaacatcgtttggaagtaggcccgcatcggcatttacaatagggccggcgagcttacccctgatgagctt

SEQ ID NO: 51922 - DNA, 643 bp, Zea mays
  Clone ID: MRT4577_14734C.1
ccggccgggacaaccaccgtgaaggcgatcttccagttctatttgaccttactgtatcggccgcatcttctcgccctcgcgagctacgacctcccggacccgccgcaaagacggcacccacgtggaacaacacgccgacaacaacacacctccacgtaggaggactccgcgacaaagaaggcgaaaaaagcccggacgccgaataagccccctgtcgagaagcgcctcccggcgagacacccctcggaagggcgcacagggaaacaccgctacttcgaatgcgaagacttcgtggagagctacgacatctacgtcgtcatggagatgatggacgtggacccacgatctccggactgtcgcttagggcatgctacatcatgaactcattgattaacgacatcttcgaaaagatggcgtgcgaatccgacctggtgcgacgctacacacttgaatcccaccatcacctcccgagaaatacatacctcggtgggcctcatactccccggcaaggtcgccaagaacaccgaatccgaggaggctaaagccgttccgtgaatcgcctcgccttaagaacatgtaccgtgcatgcgcgcgacgaccagagtggggaatcaagttatcgagaactgctatcgacgcatga

SEQ ID NO: 51923 - DNA, 237 bp, Zea mays
  unsure (1)..(237): unsure at all n locations
  Clone ID: MRT4577_147350C.1
cccaacaaaaaaatcccaaaaaccttttttcctaaaaaaaaaatcccctcccattaaaaaggnccattcaancacattgcccggggggccccccaggggggggggggacacaacgtaacccatcgccgctaaaggggaaaccaagcggggtagggagccagccaggggcccctttcctttataacaacagaaccggggccgggncccccctgggggcaaattcaggcacacgggcgg

SEQ ID NO: 51924 - DNA, 331 bp, Zea mays
  Clone ID: MRT4577_147351C.1
cccactcttccgcccacgcgtccggcggctcgtgcgcgtgctgcggcgcggtctggggtgagcggtcgactacgaccacgcataccacccgtgatgagaagaaggactagatgatggacgtggcggatcatgaatgcgaccacgactgggacgccgactagtgcgacatctactatgagatgtgtgcgaaccatgatggaaacaatgctggaggcggcatttcatggggcgacagagttgttagcttgctcagtgggatgatctaccagaacggctgctatgactgtgcctaccgatgatcctatcatgattactatcataggaagaagac

SEQ ID NO: 51925 - DNA, 716 bp, Zea mays
  Clone ID: MRT4577_147352C.1
gattcgcctcgacgcgcctctgagagctcggagacgccgacccgtccgactccctctcctgctcccgtccccaaggacaatagtattctggtgacaatggagagaccattgctaaccaaaccactgtaccttcatacaactctggatggctcatactccacctgacgctcgatcatctctgaaggtgtgacgaataccgaaacatactgcccatactgctcatcaacttatgcaaaggagatttgccacgacgaactacatgacccagagacttttgaggccttcgatgtgcatggactacgtgacatcaatgaaccagtgatgcgaaccccgttctgcgctaatgctcctgctgagaaaggatgccagaacttcatgatcgatatcatgatgggggcagttccacctgctgttacaaagactgctgctgctcccatctagcgaagcgtagtatgctgtattactagaacctggatgacatgattaaccctcgaacgatatcacagccgaacaaggatattgctgactgcttcaacgtaccattaaggatgagggtttctcttccttgtggaggggtaacactgctaatgttattcgttacttccctactcaggctttgaactttgcatttaaggactactttcaagaggttgtttaacttcaagaaggatagggatggataatggggaaagtggtttgctggcaacctgacctct

SEQ ID NO: 51926 - DNA, 641 bp, Zea mays
  Clone ID: MRT4577_147353C.1
gcataaatgactcatcatagcacaatgcttcgaattataataaagagtaagtaataatattacagactagagccatttacataatataaatcaaagtacacagaatcaaaaatatttgaaattctatgtcaagtctgaaaagacgtttcaacgtttatttaaacgtttaatctttgaaaagttggttcataacattttaacattttatcgttttaataaccatctaatgaggcatgatttccgtaaagagggaaaaaggtcagcacccaagtgtgcaactgcccagcttaatttcccagcacactgtaatagcgtaacgtgaaagcaggctgaacaaacagggtgttgcggaccatcagatgaactgatgaaaacacgaggacctgtgtacagtaacgcagggccacccgcatccgcgtcacagggaagaggggttgagggaggtagcgcccgctagccgataaaactgggcaaacggggaggacgggggattccaacggggaggagtagggagggtgggggagcacggtggatatggggatggcacggcggaaggcgaacaggacagcggtggggcgtgatctggggcggggaatggaatgaaagtgctcagaccccgatcaaatcgagggccatagtgc

SEQ ID NO: 51927 - DNA, 2474 bp, Zea mays
  Clone ID: MRT4577_147354C.1
aatgacaacagtattgatgatgcaaatataattgacataaagtttcgagatcaaaatgagccttgtattggtgctgataggccatgttcctccaaccttagtgttatttgctcttcacagaagtttgcagaggatcgtatttccatcaatattcctcaagacaaagcaattgatgcaacaaatgataaacctcttgacaaagatgaaaaagaaaagcatcctatatctaacttggttcaggaaccttgaatgaacgtccaattggtcgtgttacacctactgcccccagaactacttcccatcggaaccggtttacgtctatatcacgtgcttttggagatggttcaaaattactgccagaagaccacatgttgactggctttgctggtggttctaagaaaccacatggtcaagtttcatactcactttctcctaaagcgcaggaacatggcataaaaaacaaaggtcatttccgcatgatacaatctcatgttggtgcaaagataaatgatgcaaagaaacttcctgatagttctagaagtgggcatagcagcccggagtcattgacttgcgttgcaaatgttcttgttacagtggctgatagaggttggagggagtacgatacccagatcaccaaggattccgatggtcagagtgtaaggaggatatgcgtgaaacttgctgaaaggaccaagtatgctcacaaggtctgtcaagttttgcatcctggggccacaaaacgctaaacacatgccatgatgtggacaggtggtggttaaaggggccgcgacttaccattgggacactgtcatttatttctgacagaactcaaagcagcttgctatgggcatgacaccagagctgcttgtgtgactaacattccaagccctggtatgcattgcgttgaactccatgatgataacgatgttgtatactttgtgggctcagtgcctgatcctgaaggcagaccttgccatgcataaagccaccttggccatcatggttgctgatgcaacctggacttccatgaagaacaagtgtcgtgattgtcgaaggaaatttgaggaatgaggaacgcctgacttttttttgcctttagccgcgagcccttggcgtatacacacaacttgaactcgatcctattgctgatgatgggagggagtctgcgtttcttagatgaaggaactggagactgatgatgtacctctgcacactattgaagtgatacatgcatattggcaagacaagaggcagaaaaggggaatgccacttattcgacattttcagtcggctatgtggaagatctacgagcagcagctgcatgaatgggaatcaaaagtatgcagaatgcagagttcatcaaatgggtaccaagaaaagaaattgcctcccaagcctgcattgtttgccttctgtttgaggcctcgtggactccatgtaccatacaaggggccaaagcagcgttctcataagaagcttatgtccacaggctgccatagcttttcaagagagcatgatggcttttaccggcaagtatcaggcaggagatacaatgaatgcactggggatgggaggataagcgaatcgtatgacactggttctctttactccccaacagggtactctcccaggttctctacaagaacagattctcctcgggcattcgagtcctcagaacgaagctccacaccaagattttccaggaacaacagtagcaccaaaaggagcgcagcccttgctttctccgacgaccaccagccatcaccttcctgccgcccccagagagcgaaacggagcgcgcacgaccactggaacgctgccatccacgactggcacaactcaaagcatctctttccgggctcgccccgtgtcgatattgaggagctcaaactgcgggatgctgcaagcgcagcacagcacgctgctgccatggcgaagctcaagagggaaaaggctcactgcctgatgcagaaggctgaccttgccctccataaggccacggtagccctcatgattgctgatgcaatcaaatcttccagcagggacacgacccgggattgccgaaggggatttgaggaacgaggagcgctgacttttttttgggccttttgccgtgagcccttggcgcatgcatacagcttgatctcgactcatttcctgatggtaggagtgtgttcgttccatttggtcgagccagtagttagcatccattttgttttctcctttgaatctccagtgtcctgtacatagtatttttttccccttcctttttgccctttttagacctcccggttaatcttttgcccggtgaagaatgggccagggtgtaggttcagctatctgttggtacaatctagcgtgttgtctgaatagcggctatgttgtctcatggtcgagtcaccccatagactggcttcgtttgggcctttgggagagatgaatgaaaggcacacagtatagttaaaaaagggcgg

SEQ ID NO: 51928 - DNA, 178 bp, Zea mays
  unsure (1)..(178): unsure at all n locations
  Clone ID: MRT4577_147355C.1
ggccgacccacgcgnncggtggaagcaagagatctcacacggtttctcttacgaggaggagcacaaggtttacgggcgggatattcccttggacggccacatgcacggcgctgacgttgatttggctgccttcggtgattacgcctcgaagactcaagagctcgactagatgactcgc

SEQ ID NO: 51929 - DNA, 570 bp, Zea mays
  Clone ID: MRT4577_147356C.1
gccatggcgaggctcaaagggagaaggcccactgcctgatgcagaaggctgacctcgcccccacaggggcccggtaccccccatgattgccgacgcgatcaaatcatctgccttaagcagtggtaacaacgcagagtacgcggggaggaacgaggagcgctgactcccctatttttttgggccttttgccgtgagcccttggcgcatgcatgcatacagcttgatctcgactcatcgtttcctgatggtaggagtgccatttggtcgagtcagtagatagcatcatttccccttttgttttctcctttgaatctccagtgtcctgtacatagtatttttttcccttcctttttgccctttttagacctcccggttaatctttttgcccggtgaagaatgggccagggtgtaggttcagctatctgttggtacaatctagcgttttgtctgaatagcggctatgttgtctcatggttgagtcaccccatagactggcttcgtttgggcctttgggagagatgaatgaaaggcacacagtatagtacaggatgttagtgccttctgaagctg

SEQ ID NO: 51930 - DNA, 582 bp, Zea mays
  Clone ID: MRT4577_147357C.1
gttcctcctcggcccttctacgatgggtatttccctcatgctgatgccaccatccatatcggactgggcccctacaatgcgtccaccttgcacgtgacatgaccgagcgcggggtgcctctcacccggctgcaccgcaaagagaattcttagaagagaggacgatgccttagggccggacccgaccagctggtgagaccgctcgttatgtgaccagcatcatggtgcttccgcagaatgacagcgtcaatggtgtcctgaagcttgtttcattcaaacaggctcctctgataactgcaagtaagactacctatgagaccggcgtttcttgctcttgtaagagaggcagagtggacaacactgtgatgactactggtccccagcgtactcagacacgaagctgccagaggatgtccatgattgaccaccatacgctgccttgccgacacctcctgcttcaacatgatctaccgagcctctccctgcgtgtggctgcctcgacgtctgcggcgtggatgcataccccccatcccagggcccctgcatctataccgatgcatgcatgctgtgcgtgacggatgca

SEQ ID NO: 51931 - DNA, 596 bp, Zea mays
  Clone ID: MRT4577_147358C.1
ggtaccggcgcctctcctcgagttttttttttttttttttttttttttttttttttttttttttttttttttttttttttttttttttttttttttttctgggggttttcccccggggggttttagccttttttgggatttcaaaccttttcccattttttccaagggggggcttcccccctaacgggaaattggctaaaccaaatttttccccattggcccggggcccccagtttttccccccgggaaacccttttttttttcttttttccggccgggggcccagggtttttcgcccttttttttttcccccaaaggggggggttggcccttttttttgccccctttgggggcccttaaaaaaggagtttttggggggaaaccccccccctgggggttaagtgggccgtttttcctgggcccccccggcaaaggggttttaattttggggggtttccccctttggaaacctggccccccctttcaaaaggggggggccataaaaaagttttcctttgggtggattaaaccccccccctcccttgttggggggggaaaattttttttttgttgggggggtttttccccaagggggt

SEQ ID NO: 51932 - DNA, 535 bp, Zea mays
  unsure (1)..(535): unsure at all n locations
  Clone ID: MRT4577_147359C.1
tgtggatcctgtttagcattggaaatattgacgctagctgactccctgaacttttcggatagaggctcagatataaagttgccacatggaaaagatgtttgtactcttggttcacgtgatggaagcacatgtgatagtaattagaagttgcatgaaaggttattgaggcaactgagtaaatcctttactagggacaaatgtggtaatccgaattgttaggacaaatttaatattttaaaatagacatgtataaaatttgatgctgatttttcttatattatcaaacatattattacaaataagaatacatttttgcataaattgttttatgcattacttgctctctacaacaaaaaggtaaaaagataaccgaatttgtatccgaatccatatcgaattttatttctatcatttgaaaaaatatatgataaatttgaggtttacactttatgaatctttacaagctcaatgctaaaaataagaatatgaattngcatagtggattctatatnctatttattcgcattcatagaaa

SEQ ID NO: 51933 - DNA, 410 bp, Zea mays
  Clone ID: MRT4577_14735C.1
actcaaaacagctatttgggggagttgtaaaaccaacccagtacgacaaacaaaataactggtgacaaagactgctgagggtccaagagtattgaaatgtcgaacgcaaactagatcaaaagggcacttgggggagatcaaattcacaggggggcataacacatgggaatgggacgcttgagagacatagctccaaaactctgggttcacatataactggggcacaacagatgaactagggggcctaatgcggcacttagaagatgccgcttttgttggccacatcaagagcattatagtcgggagacaggttcacgtaagcctttttctttccatcagggctgaacaagggggtgaccttctttgcctggaaggcaaacatctttttgacgggaggcttgatcttcttt

SEQ ID NO: 51934 - DNA, 705 bp, Zea mays
  unsure (1)..(705): unsure at all n locations
  Clone ID: MRT4577_147360C.1
ctcgaggccggccgggattcctctgccttttccctcacactgcatattctcntgctgtatcctggcttttgcaacacacatcaccccacgactcttgctgagccgccggacccattatctgtatcggtacccccccattacgtagcccacacgacagctgccacacccgcttaaatagcaacaatggcacccccaccgccagcctcgatgcctctgggccagcgtcttgctgcccttgcgcaaactcttcagttcgcctggtttgctggacacgttacgctgctgctctctactctgcgttacggcttgtcttacattacctttaacttttcctcgcgatgggcctcattctcctaccgcaccgccttcctgtcggcctgcgtcacgtacggcatcgtcgtctacaaggcataccgtgcccgcatgagggcaggaaagcagagcggtgttgttgctcttgctactgacgaaaatgtgcaatacttgatcatggccctcacatggctcttctctcgccagatcccacttgccatccttcccttctccgtctactcaatcttccacgtcgctacctatgtgcgctccaacctgttgcccactatccagcccccacctgctgctccggncggcgctaagccccagcatcagccgcctcggacgctatcggcaggtttgtcaaggaatactatgatggctccatgacgc

SEQ ID NO: 51935 - DNA, 527 bp, Zea mays
  Clone ID: MRT4577_147361C.1
ccggccgggccatctcttttatcagcccatacaagccgggtggcaccattgccccctcccccttactaaccgtccatatcctgctctttcttccaatacctgactaccacccacgcacacacgccagcccactcccaaaagacctcctactaaaagtctcacgtccaacgcactctacatgacacctgatctttccaggggggggaagacccccaatatccccccacataggctccagccctctacgactaaaactcctacccctctgttaccctgaaccaacaacacgctcacgccattgcacacccactacaaccctaacatacctcccgcatactacacgaacgaatacgacgccaccgccatcgccctcgactactactctaacgcacctaccgcatacataacggaggagaaatactcaacccgcttggcaccgaactacgatgttaactgacttgccgacgcctcgcccgacatataaccgcctacgatggaaccgaacctgtctccctccccgagcaagt

SEQ ID NO: 51936 - DNA, 630 bp, Zea mays
  Clone ID: MRT4577_147362C.1
gccttagctgtgcgcgcttttcctgtggtgtgtggtggggagaataggcgtgtccgtccgtaatcgagtgaaggatccgttttcgtgcgggggcgtgtgctttaatcggaagaagggggggccttaagcttgggtcctcagttccagcttcaacgtgcgcacgtgctgtgtcgataggggatgtgtgttgttgtctgagtgggggaaaagggtactgtggttcccttgaagatgataattttgttgcaggttgtgatgttaagtttggagtttactgctgatgcttaacataggaatcagcagttttgcttttgaagcagctgggacatgaacttccgtgaatatccctttaggagctgcagatctaggaaatgattcatgtgtgtgctgactagtgaaatttttgaacgtaagttgttcggggaaggacatgaaccgtggattaatctgttaactgttaaccagtcacttatactttttttgccttttatatttgggaagatgtgcgtttgcttctatatgaaagaagaatcctttctgccaattttctatcaatgtgaaaacttgtggcgctcatattatcgttttcctgtaggcaacgacagatagatgaaaaaaggaagcatgatc

SEQ ID NO: 51937 - DNA, 130 bp, Zea mays
  Clone ID: MRT4577_147363C.1
aatcgagggtgcgctttacttgttgtcttccactcagaaagacatctgacggcgactgattggcgttcgcttctcaacccgaccaacctagcctcagtgcgtgcggtgtcactcactagaggctcagagg

SEQ ID NO: 51938 - DNA, 313 bp, Zea mays
  Clone ID: MRT4577_147364C.1
cggacgtcttttcgggcctgaagcttgaacagtttatattcgacgccttcacatactccccgtccacggcacttttcgaggtcagaattctatctagccataggctcacatgttgtctcattcttgctcgccgttcctcgggaagagcaagggaaaaaaaactctgcgtcatgctggaggaggaattatgctcggccaagatacgcaggctgaggactatcatgaagaactggtagcgcaaagctcttgccgtgattaggacacttgctgaagaagaccctgttgagtacagcaactgacgctctctgggccc

SEQ ID NO: 51939 - DNA, 151 bp, Zea mays
  Clone ID: MRT4577_147365C.1
gcgattcccgtcgacccacgctctttttttttttttgctccaagagtaaaagtcttcaatgaaggaggtatggtttctcgcacacgtgtttcatttgaccacctaaacaaaggccccttagattaaaaacttaagtcttcaagtcactaag

SEQ ID NO: 51940 - DNA, 245 bp, Zea mays
  Clone ID: MRT4577_147366C.1
gtcggactcgtgcgctctttccacactcttttttaaattgcaactgacgagcctgatcagcgagcatgcacagctcagtcaccagcatttcataacagttacttcaaataaatcaagttatttactttttaacgaaatacaagacatgaactttttgagccatcttccctggaaagagcagaacgaacaggatcttgtagttttgcctacagatgctgcattatctgaagacccatcggtcaatg

SEQ ID NO: 51941 - DNA, 215 bp, Zea mays
  unsure (1)..(215): unsure at all n locations
  Clone ID: MRT4577_147367C.1
gcccttagatatgtccagaaggagggcttagcattgtctactccgcagtgcgggattgcttttgtggngtggggttcggtgttgcctccttttctccctcccttggggtgtcttaccttctgcctggtggtggcctaatggacgggngtntgtttgcgggggggggcgncnntngctnncgggcctcttcctctccttcttgcgctcgtggcgct

SEQ ID NO: 51942 - DNA, 1656 bp, Zea mays
  Clone ID: MRT4577_147368C.1
cccacgcgtccgcggacgcgtgggaagaaatatgaaactgcccagttccagtaagtttagctctagatctctagaagaaaaacaaaatcagtgcaccgtgggctgctcaatgggtgcaacacaaaataaaggtggtttgagggaaagcttgtgggtaactcggcttttgccaaaagcatcagtagaattgatggaggcaacaccatgcaatgtagagaatgctggtagtcgaattcggcaccaggacaagttgtgttgtccacctcttcagaattttaatttggagaaggaactaaataatatacaatacttcactggaagaggaagcagcgatggtgtaacaagtagtaaatgtccagcaacgcctccagaggaacctaagcaatctgaaacaatggcttctgtttttgcaaagagattggatgcacttagacatgcaaacacctctgcagtaagcttggctatcgcgtgtgagcatggaagtcccaaactgagaaaccacaaaactaactcttttgttgttagttacagcagccatgataaagtagaggcaggacatgaaaatcataaatcttctagtggaaatggaagaatagttttgtgggtaggtgacaaaggcaaggaaccgatgtgtctaaacaatgaagaattaagaggaaacttcatatctgagcgtgagcatcagcatcatggagggaacacagctggaaaattggcaactcagcataatttagaactgaacatattggctgaagatacagacagaagccaagtagaattgaagggaggagtcttagattttatggcaggtccatcagacaacaagcaaattgtaccttatggcactatgtctaatgatgaatcaagtgttatttttggtgccttacataggcttcgcctgtcccgctcagatatcttaagatggctgagatcaccgatcatgcacactacgttagatggcttttttgtccgactgcgatttggtaaatgggaggaagcattgggtggcacaggataccatgttgcccgcctgaatggagcacttgataggagtcgcctttctgtaaccatcagaaattcaacctgtcaagtagattctcgctttgtatccaaccatgacttccatgaggatgagctgaaggcatggtggtctgctgctatgaagggtgagtggaagctaccgtcgaaggaagaactgggtgtgaaactaagagaaaaagagctacttcgcgcgtagaatggaacggttgcgcagtactaaaatatggaggcttctattgtacccatcctactaggaaattatgagccagttgatgaggcatgaattatttcacgacttggccgcggttagtgtgaaaaggcgacgctgctatatatggtcatcacccttggtttgtccgttcgccagatatcacgattatcatatttatcggttgtaatataagcttcttgtattagcatatggtttaatattttttttcagatgggatgaggtcctgcgtgatatcctatctgtaaataggaaggcactagcagatctcgacaaatgtacaactggtttttttttttttttgagaaacttgaaataagatttatcgttcaccactgaaaaaaaaaaaaaagcggccaattgcttcatctgggtcgttcgcggat

SEQ ID NO: 51943 - DNA, 152 bp, Zea mays
  Clone ID: MRT4577_147369C.1
cacctcttctctaaaatcaacttactttttcaacccaacaacccagttcaaggcatgcttccatcccacatatgacaatcaaccatcttccataatctaaataatcaatcacatacacatcattaaacagcaccttccaaccatacagacac

SEQ ID NO: 51944 - DNA, 2001 bp, Zea mays
  Clone ID: MRT4577_14736C.1
atgtcttctttaatgctttgtcacctcaatgacttggtggctgctggtttgaaaacatcaaagggcttcaagaaacatatgtacaatggttgtgcaagggctattaatgaaaaattcagcactagaatcaatggtgaacaagttaagaatcatttaaaaacatggcagaaaaggtatgcaaagataattaaactgaagaagttgagtgctgccttatttgatgaagagaattgcatgattacacttgataatgagcactacaacagctatgtccaagatcacaagtctgatgcagatttcttgaacaagccccttgtgcactatagagagatggaatcaatatttggtaatagcatggctactggaaactttgcaaaagattcaagtgcggctctaggtacagagaatgtgggtgaaagccacgaagaagatgatgttactgctcatgctcaaactgaggggacaagcactcaaggagcaacatcttcttctaccagaccaagtaagaaggccaagctagctggaatggaagatgaagggctagttgcagctttcataagtgtaggtgagaatcttgccgctgccatcaaattagttgctaagcctgataatgagctgccaagtgatctatttgacatgctgaatcaaatgcctggtttcaattctgcacatatatctttctactatgcttatctggtggccaatcctcacatcggcaaagctttctacaacctgccatttgagcacaaattacattggatcacaatgttcatcgctgagaaattccatagaattgcctatgctcgattgctatccaagaggtccttcgtcattgattcatcgatgtctggtgttgagttgggggctattcgagtcttttggtctccgcctggtgcatgggatgatagtgcccttgcaggaagcttcggctttgagatgaaaggtgtgcatggtatgaaaggcgcgatctggaagaaggatgaaccagcttcgaagctgtggatggagaagcttcggcttagcacaaggacgcatttgagaacaagtgaccaacattggcgcccacctccggtaaactcactcgaccactttcggcaagctttgaccttcgtcatgccgctgaagaagacaacagggccaggggctgcactgcaaccactggacgttaatcaggaaacgctatgcgaagctaggagccagaagaggaaggctaccagcccaacatctcaggaggaggagttggaccaagaaattagggacctcgaagccatccatcgacagaggaagattgacgaggccactgaggaaatgcgtcatctcacccaggatgaccaagaccgaaggcctcaacacagagagcttcgtcaagacaattcatacaacgatgatgaatggtatgatgattttcatggcaattcttttgatgatgcttctcctctggcagcatatttgcaggctaccccataccccccatcatacaagccacctcagtgcatgcaagaccatgagaagtaccttcaggcgtatgtccgaaggttcctgcgtctaagagcacaagcgcctacagtgcccaatgaaattgtcattgaggctatgatcaaggggcttcggccaggacctacggctcagtattttgccaggaaacccccacaaactctagagaagcttcttcaaaagatggatgaatacatctgggctgataatgatttccgccgaagaagggaagaagcatacatgttttctgagatgaccaggggcttcggaggaagaattcaccccaggcacgtcaaatcgatccataattccaacccaagtgatgacagaggaagtcaacctcaaaggcagcaacatagctcccagtcttcagggccacaacaaagctccttcaggccaccagcccaagaggcagaggcggcagaggcttcgaaggaagatacagagatcagcccagaagactatattgcttattctacggtgaagacatgggccacaccacaataa

SEQ ID NO: 51945 - DNA, 336 bp, Zea mays
  Clone ID: MRT4577_147370C.1
gggacctcaaccaacaggggaaagccaatctggtgttacaattttaatatccaacgtttcgatggaaaatcccccaattacaatttttaaaacacgggtaagtataccatttacccgactttttttaagttccagcctttaaaaacaagaccttgcacgtaagaaaataaatttcccatttaaggaaataaaaatgtccccttaataaaaggccggggatgaactgggggggggcccatgccggttaacaccttccctgaccttgccatgctgttccgtttcgggctgaaacattaaaaccaggggcgggagctccagcttcctaaccttcacctt

SEQ ID NO: 51946 - DNA, 559 bp, Zea mays
  Clone ID: MRT4577_147371C.1
gtacatctcacaacttgagtcggaggttgccggcaaggtgcaggacaacaatgacctgcgatcccagaaccgcgctctgctcgaggagaacaagcgcctttctgacctcacccgcatgctcctttcctcccctgcattctccaacttcctggaccacctcagcgcaaacccttctgttggggccccggcacaggtcaagccagagccccagcaatcaccagagcagcgctcagtcaaggatgtcaacccttacggatcgcagtcctctcagcaccaaatcggcatggcgatgattcctgagcagaacgttgatttctcgcttatcggcaatggcttcaacttccagccccgagtgtttgttgtggagacttccgagattccctctcccatcgaatccagcatcctgtctggcaaggcacccagcgtgattgagcaggccttcaagtctgaagacgagaaggtcgaggtgcctgtgattgagcgacctgttgagcagactccggtcgcccagtctgaaggaggacctatcgatgaggaatttgaggccgaccccgagttt

SEQ ID NO: 51947 - DNA, 550 bp, Zea mays
  unsure (1)..(550): unsure at all n locations
  Clone ID: MRT4577_147372C.1
gttactgcatattggnatacactggtgtgagggggtggttgatatatattgtaatttcatttgatattacaaatgcggttagcaaccaaattcagctataaatttcgtaaaaaaaaaaaaaaaaaaaaaaaaaaaaaaaaaaaaaaaaaaaaaaaaaaaaaaaaaaaaaaaaaaaaaaaaatggggggggggggagaaaaaaaaaaaaccttttttaaagatccaccttaaattaaattaactgtgccgacgttttaacatcttttatagtgggaaaaaccttgaattaaccgaccttatttttctaccggcaaaaccggtaaaacccgggtggcacaaaactaaaaaggcttgaaccaaatcccttttcaaaaagttggccaacttgaaaggagaccggaaccccccttctttcccaaaattaaccccgcctgatatggaaatttacccccccttgaaccgttacatttaaccagcgccttaagccccgtttattcccatttttacctttacttttgccagccctttaccgcctttccctttaaatttt

SEQ ID NO: 51948 - DNA, 407 bp, Zea mays
  Clone ID: MRT4577_147373C.1
gatagcgcaataataataataataatacacattcacttggtttggcttgtattggtacaaaggcgggcaccggcaccggccttacatatatatatatatataccagggatatgcccgtgcgttgcttcagaatcaatggggggaaatacattaatatataaaaactcttattggtattctacacttttattgggatcactaaaatatgtttgcacaaacaatgattgtgcattgcaacaacataatggcagagacgacgctttctgaaagttctgcagacgcaacgatcgttcctggatcacgcgggcgtggtaaaaatatatcacaatatactgccgagcatatgcttttaagaccatagtcattttttgtgaaatgtgccaacatccgatcaatgaaaacaaaaa

SEQ ID NO: 51949 - DNA, 319 bp, Zea mays
  Clone ID: MRT4577_147374C.1
gacagcaaaaaccattgtttttttaaaacatttaatctgaatgactagcggacccgcttgctaagtgaccacatcaaaccgtgacgcgccttagccgaaactacagataccagaacaccaccaatgcaatgcatgcagagtataagacaggctccctgcttacaagaagttgcaagaactgtgttgacccatgtttgatgacgtccgagggataaataacacatgcatgactactgggacgactaatagttggctgaagccccctcgggcttgttcaaagacccatgcttggtctctccgaacacggagatgccctggc

SEQ ID NO: 51950 - DNA, 272 bp, Zea mays
  unsure (1)..(272): unsure at all n locations
  Clone ID: MRT4577_147375C.1
atatctcgagcggcccccccnngagtagtttttttnnttttttaaccaaacaaccnancacatttncatatatccaatcgtgaaaggangaacanncnngaacaaaaaaaaaatgcacaccttcttttccattatttttactaaaaatttattggaacgaaacacacacattcattattcggcgacggacattcactcataacatgtncgagttatacaatttaaaaatttgatttttatcctggaaaaagccaacagggttatcctttcca

SEQ ID NO: 51951 - DNA, 304 bp, Zea mays
  Clone ID: MRT4577_147376C.1
gaaaacagggagggggtttgtagggcattgcaatcgtctcaaaccataacctaaaacattctttcaaaagctcggccctgcggggccccccccccctttaatattatatgttcacccacacatccacggaccgcgtaattttgggagccccaaacccaccacaatgcaaccacattcccccccccccccccccatttttcttaaaaaagttgccccaccatccccaaaaggccccaccaaaaacaagccatccccccctcaagtcctaaatcttaaaggggtccccaccccctttaaacctttt

SEQ ID NO: 51952 - DNA, 1225 bp, Zea mays
  Clone ID: MRT4577_147377C.1
cattgatgcacccaagcgtccgcccacgggtccgacgacatcgggagatttgcgctctctcttgctatggcgcttcctccccctctgagatgtgcttgcgctggcgccacgcccgcgtgaatggcctcgccgccgcttctcgcgctcgcacgtgctactgtgtctgcgcgcctctccctgcgttcaagcacgccgcctcttctcccaccccgtcgcccctgcgccgtggtggctcccgtggtcgcactcgcatctctctcgccgcagcgctttctctcctcccgagatccctctcctcgtgctcgccgccacgcccgcgtgaacgccctcgctgccgcttcttgcactccccgcgcgccactcctcgctttcgcccaagccgcctcctctccctctccgtcgcccataatcaagcgagactgcgtgcaggggtgcatgctgcacgcggtggcgacgagctacggcacgaccgcgacgtcacgaatgactccgagttccgttcgtggggtgcaggctcaccggctccgcatgctgtaattgggcaaagcgtggggacgctacgctcgggtggtctacttcaatcttagcgcccagcgacatcgtcgtgcaccagggctggagcgactaggcgaccggtccagaacgaacaggtcagcctcatcgaacggtcttcaactactggcaaatgcaacgccgttagttgccgcatgtgactactcgcaaatcagatggtaaacacgagtaaattaaatagtaggattactttacggcatgtataaatagcacatagtgcatgacgaggtgcagcagtagcagcatgatgccaacaactgcactctggtttcttattttccagctggatcttgcacgcacatctaatttgtcttttttttggctggaatttccttcctgtctatacatgtagtatgtcgattatgttgtcttcctattttttatttactactaatagttgtatcacagaagtcccattcttctctactcctttatctaatttactgtttttttgtcttagttgatccaattagaccattttgttatgtgtatatgcaatgattctatctcttttaggattatgtaatgctaggaactgatgttacattttttgccaacttctaattgtgttcttggctatggatttatgggggaagcataatcggttggttcatacctaatgataagaataataataacccttaccattaac

SEQ ID NO: 51953 - DNA, 438 bp, Zea mays
  Clone ID: MRT4577_147378C.1
cctcctcgtccgcgtccgtccccagtcttcggcgagctccttgcccccaccgttggccctgcttcttccctctcccctacgtgtgatgcgctcaacgccgtcgccctctcttcttcaccatcgcctcgctcgcctcctccgtcgctgagagccggcccttctccgtatccgtcgccatcacaggcggatctgcctcccccatgaccgacgaccaacgagagcggcgtgcgacggctttaggcgacgaaggcggcccacaccatgtcaacgacgcgcagcggtggaagcacgcaatggcagccgacgacgcccttcctcggacggtcgcaagtgccgcctcccctctcgcatcctccaccgaaggcctcgggtccgtttgccactgcactcttctctgctcttccatccaagcatgtatgcctactcccaatcaggtca

SEQ ID NO: 51954 - DNA, 346 bp, Zea mays
  Clone ID: MRT4577_147379C.1
aattcggcacgagggtctatttggttaaataggagtatctttttggtgtcctatgatacaaacttgtttatgaataataggattcacttagcagggctggcagagggcagactcagtgttggagactcccacatgagtggggtctgggaagggataaaccgagacaagcctttcctccgcaaatgcggagaggctgctttgaagtttgaacccatgacctggggactcagggagctctgaccattgggccaggattggcttagcggatggggggcgggtgggtggactgcgtgtgggaatgcctgggtgcggctgggggatggggtgggggggtggggggcgcgtg

SEQ ID NO: 51955 - DNA, 315 bp, Zea mays
  Clone ID: MRT4577_14737C.1
attacacctgtaccatttattcggggagctactattgttacgacgcctcctattctaatcacctttcttccaaccaacctaactactgtggcgaatactgttgatatgcaccctgaggcgcttcatgacgctcttacgatcaacaatgtttgtttcaacgtgaaaaacaattatctcaatgatctgcatcaagttttctagaacttcaactccaacgtttaccctgccaagtaacatgctaggttcacctacaaggccatcatcatcaaccatctctttcacattggcatcgacatatccctcactgcttgactc

SEQ ID NO: 51956 - DNA, 292 bp, Zea mays
  Clone ID: MRT4577_147380C.1
acatagagtcaccaagcgatgaactcggctaagtttctatcaaccaaccctacatagctagacacggtacccatggctcgcgctagcgtcgcctttgtcattgccgatctcctgttcgtcgccatggtacaatcacccatggccgaggcatagtccgtcgatgcttctgtggctgactcgccagccgatggacctagcggtccaacatgctgcacctgttccacagggtgtcgaaatgcctatcatgcaatgaagatgacgattattacttcaccaattgatgtctcacacg

SEQ ID NO: 51957 - DNA, 366 bp, Zea mays
  Clone ID: MRT4577_147381C.1
ccttgcctgtgcttagtatgggagaaggcgtctattcaggcgctccgagcgtcgaaaggacagaggttgcatgctacatggcgaaaatcgcagttgaggctatctagcactccgagccagaaaatggcttcactatgacgtagaaggtccagaggcaaatgaaacctgaacagggcagaccctgggtaacacatggggctagaagtcgcgcgttcacagcggtagatgtgcgtatactgcaagtttgtcacggaatctgaagacagtagtgtcagatgcagcattgtgagctacaatagactctccgcgaccttgcccaagctcgacagccgcaccatatgaagtgacatgagctacacgccggag

SEQ ID NO: 51958 - DNA, 259 bp, Zea mays
  Clone ID: MRT4577_147382C.1
catggggaggtttttttgtttttttttttagggcccaagggcctttgaatatactcactatatatggtataatccccgccgtttacgggaagctaaaatggcccttaaacacaagagctgttcaattaatccagatatacataaccaggttagcgctcatgtacaaatgcctgtaaaagaattgttcatggcgatccttcaaattggccattggccttattttattttatgggtcctggaacctcaaacgggcccgtgg

SEQ ID NO: 51959 - DNA, 365 bp, Zea mays
  Clone ID: MRT4577_147383C.1
tattttcggcacagagccgtgttttttcctcatttcgagcactaggactcgcctgtcggctaactgaaccgcttaaccaagtgtgagttgcctcgtgcgaaggtgacgagtgaggtatccgtatcccggaggcgtaggagtccctcggctcggtcggccttgctgcccgaggcttctcttgcttagttaaaggaaccctcggccgctcttcgatgagccgaagccggaggcagcggtgtcagtgtggacagaggctgagttggctcgaaaagaagacttcgtcggccggagcctggccgggccgtccactagtgggaccggcgccgaagttgagttgccgaggccatgagccgggctgatgtcct

SEQ ID NO: 51960 - DNA, 750 bp, Zea mays
  Clone ID: MRT4577_147384C.1
cattgggtacctcgaggccggccgggcattcccctatccggccgcctcgacggatttcgactgcttccagatagctcggtccttccgataatagcatcgctcgcgcgcctccgtttgcttcgcattcttaaaacctagcatatgatttgattccgccagctgcttggtccggaaccgaggaggtggcgagggagtgggggtcacccggccatggcgacgatggacgcacgactgcaccttccacgccctcgccgcgctctacggcgtcgtttcattcctagccctagtaagccgaatccccccgcacgttttttgtttttttacccacctcctgcttagcttagcttgcaattggggctccgctttggtttggagccatgagttaaggcggggacgacggttcgttcaggcggagacgagccaatttccaactgataagaatcgagtgccgggttcctgagtatgggtggacaacggcacaacgcagaagctgttccatttcctaaacgtcattgtcaatggtgatatttcaacctgtgcttattgatttgcctggcctggcattcttcacgtcctacactttgctagtgcttttttgggctgagattgactaccaagttaggtttcagttcaacagttcattttctcactgatgggcttataagagcatgtactcgccaaagaacagtggaaacaggcaaggacaatcatgcgggccgggccctgcgctcttgccagtttccactgctg

SEQ ID NO: 51961 - DNA, 666 bp, Zea mays
  Clone ID: MRT4577_147385C.1
actcccggagaagacttctaaaaaagaaggaatacctgaaagcgtcaccgtccgtttgcaattccattcattgctcccgtatcaaccatatcgaatccaatccaatcgaatcgccggaggtggaagcgcgcatcgaactcggtcggcaatggcgagcctcaccttgccgccggcgcccccgaacccgcgccaggacgccatcgacctccacaaggccttcaaagggtttggctgtgatagtacaacagtttcaaatatactttctcaccgtgactcaatgcaacgtggatacattcaacaggaatacaaaactatgtattctgaggaactttcacatcgtatatcgtctgaactcagtggaaaccacaagaaagcactgtcgctctggattcttgatcctgctggacgtgatgcgactgttctgaaagaagctctaagtgctgaaagtcttgatctgaaagcagctactgatataatttgttccaggacaccatcacagctgcaaataatgaaacagacatattatgcaaagtttggtacttatcttgagcatgacattagtcagcaagcatccggcgatcatcagaagatcttactagcctatgttggcattccacgctacgaaggcccggaggttgatcccactatagtgacacatgatgcgaa

SEQ ID NO: 51962 - DNA, 828 bp, Zea mays
  Clone ID: MRT4577_147386C.1
cattgggtacctcgaggccggccggggtctcccttcgcattccccaatccggccgcctcgacggatttcgactgcttccagatagctcggtcttccgataatacgatcgctcgcgcgcctccgtttgcttcgcattcttaaaacctagcatatgatttgattccgccagctgcttggtccggaaccgaggaggtggcgagggagtgggggtcacccggccatggcgacgatggacgcacgactgcaccttccacgccctcgccgcgctctacggcgtcgtttcattcctagccctagtaagcccaatcccccccgcacgtttttagttttttttacccacctcctgcttagcttagcttgcaattggggctccgctttggtttggagccatgagttaaggcggggacgacggttcgttcaggcggagacgagccaatgtgtgtattcggtattccaaatgcggttgatacaaactgaggcagacaggcagtggttaccagtctcattagcgcatttgatgtcaatttcgccagttccaactgataagaatcgagtgccgggttcctgagtatgggtggacaacgcaccagaagctgttccatttcctaaacgtcattgtcaatggtggtgagtacgccatattctcctggtcagaatctgtgcttgcgggaacttgcaacttgtgcatattgagggctagtttgggagccataaaaccaaagggaattggagggggcgagaggccagattctccttcttatcattttgaataataaagagaatttagtccatctaatcccctccggttttctagcttctaactagtcc

SEQ ID NO: 51963 - DNA, 552 bp, Zea mays
  Clone ID: MRT4577_147387C.1
cagtacaagctttttttttttttttttttttttttttttttttttttttttttttttttttttttttttaccccccccggcggccccccacaagggcgaaaccccccacacaggggggcgttacaaaaggaacccggcccggaaccaagggggggggaaccaagccaaaaagggggccccgggggaaaaaggtatccccccacaaaaacacacaaaaaaccacccggaaacaaaaaaagaaaaccccggggggccaaaaaaaagacccaacccccaaaaaagggggggcacccacagcccgctttccaggcggaaaacccgctttcccagcggaaaaaaagaaacgcccacccccccaagaaaggggccaaccccaggggggggggttcccctttcttgggcacaaaccccctgcccccggacataacgcgggggggagggggttcagcccccccaaaggggggaaaacggttttccacggaaaaagggggtaacccacgaaaaaacgggggagccaaaggccagaaaaagggccgaaaccccaaaaaggcc

SEQ ID NO: 51964 - DNA, 114 bp, Zea mays
  Clone ID: MRT4577_147388C.1
aatagactgtcaacttgcataatcatcgacatcaacatcaacatagccttttggttccaagcaagttggggtaggctagaattgaaacccaacaagaagttatgcagcaaaagt

SEQ ID NO: 51965 - DNA, 1194 bp, Zea mays
  Clone ID: MRT4577_147389C.1
ggaggcaagagcatgaccatatataataattagaggggaattatacaaacatggagtatgctctccactgctcaagtgtctatctagagctaaaggtatagaattgatgaaggaaatacatgtaggattgtgtggatctcacattggatctagacctttgctggggaaagtcttcagacaaggattttattggctgaaggcagcttctgatgcagcggatctagttcaaaaatgtgaaaattgccaaaaatgcgcaagagaccagaaacaaccttcgtctttaacccaactgatacaaccaacctggccattgcaaagatggggcctagatttgttaggtccacttccaccagcacaaggcaatttaaaatatgttgtggtggttgtagaatatttttccaagtggattgaagcaaagtctttggccacaatacttcggtcccagtccagaaattcttttggcaaaacattatttgccgcttcggcgtaccaaaggctataactgtgggcaatggaacacagtttgatgccgaaaccttcaaggaattctgagtaacactaggttagtgttgttaggtgacgtccgcttgacgagtattcttcgaccgagcacttgcttgatttaaccatcttcaggttgattcaacaacttcatcttgcggattagcccgcgcttggggtcgacttggctcatcttccgcgtcacacgattaattaacgtaccctgactaattcgtcgcgatagttgcaagcacggctacggttccagttgacgtcatccaggggtcttctttcttcggtaatcaactgctgaagatcttttccttaattgaataattttgacgaattgaattggagtcgcgtgggatgttggagttttttttatcgcgcacttggtgaatatcaagttgctgtgagctgcacgcacgcaccatgggagcagggaaactcggccagtacgaggagcttgcagggggacgcgcggcgtgccatggcggggagggactcgtcagggagctcgacggcggccgagcagagaggcgagtgtagggaggctccatggcgcgaccctggaggatggcagaggaaaatccgagttgacagatggacggccggcagagggaaatccacgagctgggcagcggacttgggcgcgtgcggcacaagcaggcagcaggacgcgcaggggcccgg

SEQ ID NO: 51966 - DNA, 494 bp, Zea mays
  Clone ID: MRT4577_14738C.1
cacgcctgcgtgtaccgggctcctattacacggtcgacctcagctttctttctagcaacaaactaagcacagtcttgttccatacatggcaagccaaaattcagcctacttacgctattagggatctatgactgagctgataccgaaaccatgtctcccgcaatgctgagcagctcgtataaacactgttctgcccgcgaacctatgcaccagcgaatggtatcagttgttgaaaacccaaatatggaaccatacatgatcccacaggccttctcaaacggcatcatacctttatgaccctagaatgtagcaacaattctcaccacctatacagctgaatacctttggtgcattgattggcacataacatcaagacacaacagctaccacaacttgtgctagcaaaacttgctggctactctcaacaacaacatgtttttacattcaaccaactagctgcatataactatgcttgttaattgcaactaccacca

SEQ ID NO: 51967 - DNA, 234 bp, Zea mays
  Clone ID: MRT4577_147390C.1
aaggaaaccggggcaccccatttagcccaaaaggatctggatcccccaatccctaaaaaaccgccgcaacacaaggttgtatgaaaccgcctcccccccaaggtaaactttcgttatatccccccctggctatgttaaacttccaacatggcattgcaaacttggataaccacaaaataccctcaaacatctcaaaggaaggcccgtttaaaaatcggcatggaaacccccttt

SEQ ID NO: 51968 - DNA, 726 bp, Zea mays
  Clone ID: MRT4577_147391C.1
ggccggggaaaaagttccttgagctagcatacatcacaatggctgatatcgacgcgggcaacctcttcaatgtcaaaggcttggtggccgtggtcactggcggaggcacaggtatcggtctgatgattgctcaagccctagaggctaatggtgcaatcgtatatatccttggacgacgagaggaggttttgaaagaggctgcagctacagcgaaacatggcaacatccattacttcaaagcagatgtaacctcgaaaccggatcttgccgcagcggccgaacatatcgctgcaaaaaccggctacgtcaacgtcgtagtcgcaaactccggcatcattggcccaacgatgcgttatttaaaagacgatgcaacgctgaaggaaacgcaagattacttgtggaactgggactcagacaagttcaaccaggcatacaacgtcaatgtcaacggagccttcttcactgctatcgctttccttgagttgcttgacaagggcaacaaggctaagaatgtcgagcaagatagccagttcatctgtgtcagtagtgctggggcattcagtcgtgttctcatgtcggggttcgcatatgcgggctcaaaagcagcagttatacacatcacgaagcagctcgccactaggctagtgccattcggcatccgctggaacgtccttggaacctggattgtacccaagcgagatcactgccgacatgaatttcaaagag

SEQ ID NO: 51969 - DNA, 605 bp, Zea mays
  Clone ID: MRT4577_147392C.1
ttttttttttttttttttttgagcaagaattgttttttttttttttttttttacatttttcctttttttacaaacggaaattggtcgcaaaattacaaaacagagcaaactacgcccaatccccatcgtctcgaggaccttttatttcagtcgtctcgtcccgtctctctcagctttgtcaacctgcaaaacctttgctttttttttttctggcgatgccgttgtgggcttttgtggtggctgactgcctagtgcctactgttgcaaaaaaaaaaaaagctcacgaaattcggagtacgtttctaccatgcgtttcgggccgtctttattcccgggcgtcgtactacgtctttgtgcctgccggatccgtcacgtccgaaatgccctgcttttttttggctgtctgcgcctcttttttgcctttcaggcgctttggttgaaatccggcgtcggaggctcccacagcaaaccaaacccttcagtcagggcgatcaaaaaccgcttgactttttcatccgtccatcattggctttaatcatctgctaatcttcctcctcttgctgcagacagccggggggcagtcgtcgtcgtcctcgtcgcgccac

SEQ ID NO: 51970 - DNA, 405 bp, Zea mays
  Clone ID: MRT4577_147393C.1
cccacctaacactccgtgagaagcaaacacaataaagaaaaaaaaaaaccgtccgcacaaaaaagaaaacggcagcgccagccaccagtgaggagaaaagcttcagatccagctccaggtcccccctcttccccaatgcctcgcccgtagccgagttcgcagctccgccgcacgttgcaatggccggccccagcgtgcccgtagcggcgctggcggacctgctcgcggtcgccgccctcacgtgctgcgccgtctctgagccgccgcctagcgagcggtccgctctgctggcgttcctcaccgctaccccgcacgagcgccgccttgggtggaacgccttcacccgggtgtgcgtttgggtcgcagtcacgtgcgactacgccaacttcaccgtcgatgaggtgc

SEQ ID NO: 51971 - DNA, 269 bp, Zea mays
  unsure (1)..(269): unsure at all n locations
  Clone ID: MRT4577_147394C.1
cggacgcgtgggtaaaaaatataaaaatatttatttcaaaaaataatctataattacaataagctgtnttttaaaagagggaagggggcacaaacataccaaattatcaaacatattacagtgcctccttattcacattctaccagccctctttttacaaactttgccacttttttaatcccctccgtccccaaattaaaacacctttcaccacatatctcttttttcctccaacttaaatacctattaggcccccacctttttacctt

SEQ ID NO: 51972 - DNA, 308 bp, Zea mays
  unsure (1)..(308): unsure at all n locations
  Clone ID: MRT4577_147395C.1
actgattaaaagactgacaagttcatctaagggtgtgaagactgattactcggtaaaggtccaagagttacagagacaacttgcacttgacagagaagaagcagacaaaatacaggatgatcgcgataatttcttaaatctagcacttcaaggctaacaacgttccattgntgttggtggcaaatatgacctacaagtgggtttttcggttgtctcagtgtgatttagtcttttctcaaggcatcaagttgtgaaagcaatgttgaaaaccacaaaaagacgtcccaaaactacaaatgtcataccac

SEQ ID NO: 51973 - DNA, 276 bp, Zea mays
  unsure (1)..(276): unsure at all n locations
  Clone ID: MRT4577_147396C.1
nactgttctagnacgcgagcggccatcattttttttgggcgggttgtaagttatttgtaaaatacccacacttaagttgagggggtgtattcttgagtcgtcaaagtttaataccggtgccgggtaaatatggatatgggttcaattgtctaaaacgttgtggcttcattgaccggctgggggataaggttttattattttttaaattttttggcaacaaaacattgtaattggggtttgtttgtttggtaaaaacaaaaaaaggccgcacttttt

SEQ ID NO: 51974 - DNA, 155 bp, Zea mays
  Clone ID: MRT4577_147397C.1
ggaagcctcatttgggtagtttataaaaactcaacattattaatacaaaatccagttccacagaaaatttgggggctcagatcctcaagaggaaagatttttaagaggacaacacctggaaaacaaagaatcagggccccagggaagcacagcaa

SEQ ID NO: 51975 - DNA, 346 bp, Zea mays
  Clone ID: MRT4577_147398C.1
gagcatccacaccaacaaaaacttcaagggggccaaaaacaaaagaccaatccacacactccgggggccacgggggcattacaaggaaaagggggcccacacaaaccacttttaggcacataacacaaccaaggggaagggacaaagggccacgtataaagggggaaaaggggcccgttttccaaaccaaacttagtttcccaacgacgaatcaacgggttagacggggaaatatgcgggggggcccggcccactcaaaaaaaggcaaatatgccaccttttgggtgggccaccaaaccccctgggaggaaaaaggccactggttttcaccccttggggaacttgg

SEQ ID NO: 51976 - DNA, 328 bp, Zea mays
  Clone ID: MRT4577_147399C.1
tggacgtagctagaattcgcttcgaggagaagtctgcaggcctcttcctgctagactcactggcttgagaccagggccaatgcctggggggccccactgactgaccgtgtgaccttggataagctagccggcaccacagagcctctgagacgagggggacacccagcctcacgtgcctgggaacctggtgcagcagccatcggagcctcctggaaactggcctcttgagtcgactgtgtatgcagcagcgtctccgcagccttgacagaagctggtgcgaggctggagaagtgacaggccaggcggtctgccctgcgcccgctgccgt

SEQ ID NO: 51977 - DNA, 434 bp, Zea mays
  Clone ID: MRT4577_14739C.1
tctctttctttgcacaccaacacggtctgcgacaatgtgtggaccttcattgtgacagaggcatccttcaatagcgcttatattcaagaaacacttagcttgatgggtttcaatgtcttgtttgcctttttgcttactttttccattacttgtattcattctcactattcgtttattatacattctgtggctcatatgccaaccatttgtaatgtttgttctcttactaatttgcgtattttaattgtctcttcgttctttttcgatattatttttatttattgtttcatttatatcattcatatcttttttttattttattatttactttattcattacttttatatttttatattatttaaattatatatttttctcatttttttccttttattcttttctttattttcatttactgctttatattcacttt

SEQ ID NO: 51978 - DNA, 234 bp, Zea mays
  Clone ID: MRT4577_1473C.1
catagcgaacctaaacaaaccacgcagtaattgggaaaattcaccccctagatgggcaccaaccacaaaaccctgcacaatacgtgaagagtcacatcccgtcgatggggacgactttctgtacaaaaaaacactaacttttggaaacgcggccggtggacaaacggggtcagttaatatatggaaacttggggcaccaacactttaggatcactggaacttacatgcatcttc

SEQ ID NO: 51979 - DNA, 381 bp, Zea mays
  Clone ID: MRT4577_147400C.1
acggctcgagggtcatacatacagaggtttctttgccaggccatataatatgtacaaaagatatatgtacccagctacatcatattattatctccactttctcaatcagcttgatgcctgacgactccaagatctccaatgcttcacgcacgcaaatgcagagtcagtaccgttgcgcgtcatggtaattccacaagggcaaacatgaaaactaagtagcacctggaatgtagatttccggttgcagaggcctgatcactccgttcgtctgtagcaatagctgcaacataacatggtccgagaacaaatgaacatacattgtttttttttctgactattgttcaagtaaaattgtggttaggtttgctaccaaggccccta

SEQ ID NO: 51980 - DNA, 413 bp, Zea mays
  Clone ID: MRT4577_147401C.1
acaagcttgcacaccaacccagctcgctcgtcccagttgctcacggccgcgctcgtactcgccacctgactcacacgcgcgagcgagtccccgcaagaccaagaggaggaggatccatggagaagcgcaggacggggccgcaccagcactcgtcggcgcactacggctgcggaggcgcccacgactaccagagctattcttagaggtgggctggcttctcctccccctccgcttcggtttcgggttcgtgaggctctccggggctcggtttcgtgggtgagcggatcgagatgccggcgccgcacgttgagcaccgctgcttcgtccggggcctcgcctgcgccccggacgagcactccctccacaacgccttcagcacttagtggcgagcgtcctcgagctccggatcctcc

SEQ ID NO: 51981 - DNA, 593 bp, Zea mays
  Clone ID: MRT4577_147402C.1
ggggaggaaatacctttgtaataaaacccccaaagggggcagggggcccccatccatccaaaaaaaggcactttaaattaattaatttcttttcccccacccccctccaaaagttttttaaaaaaaaaaacccaaaagcttgtcccccaccaataagggccggaaaaccccacctattttactgggaaaaaaaatttggcccctccaaaatttaggggccaaaaaaatccaaggaaagggggtttaaacaaacagaataacaaagcccccggatcggggttaaaacaaaattttttttcccccagttagttaaagcttaaaaccccccaaaaaaaaaaagggggggaaaacggaaaccgcaaagctccaaaaaaaaaaaagggggaaaaaccagttttggggccccccctccctgcaaaaaaaaaaaaacgggttaaaaaaaaaattttttgacccttttcttcggggggctttaaaccgggggaggaaaaccagccccacctacccaaaaaaagtcccattcccccataaacaattcgggaatttgaaaaccttgtttaaagaaaacgaaaaattggttttttgttgggaaa

SEQ ID NO: 51982 - DNA, 418 bp, Zea mays
  unsure (1)..(418): unsure at all n locations
  Clone ID: MRT4577_147403C.1
gcgattcgaatactgcatactccattttagggcacaaaaccaaaggatattataataannaaatgctgactaaaagaggaacccgcacttggagattataaaaaaaacactaaaacttggaacaagttgacgaaaacaggaggtttaggcctcaaagaggctgaaacccaattcctaggtcgacttctttttagggttcggaagctttcgtttttccttgggaggaagttgaagcgccagcgtcacagtaagaaccgggggcggaaacagcaaattggttggggccttggaggacttttttgaacttgggaaagaattgggtacaagtagtttggtttgagagcaacagcaagcacattctttgaggatgttgggtggaacagaggggcacagcattgtggacgcgggtccgagatct

SEQ ID NO: 51983 - DNA, 1707 bp, Zea mays
  Clone ID: MRT4577_147404C.1
aatatcgatccatggaagatgctaaatcccgtcttgaaaggaattggcaaaagctaaaaaggaggttgaagtatgaatgcacaatatatttacaatgaaaagcgactagattctctgaaaaccgcttcacaacctaaagctgacgagcttcgcagaatgcaagagctggatggcatcatatctagtgagcaagctgaactagataggctcacaaagtgttccagcaaacttaaagatcaggcttcggaacttcaacagaaagttgaaaatgctggagggaagaagctgaaggaccagaagacaaaagttggcaacatccaatctgaacttgacaaaacaagttcagaaatcaacagacacaaagttaacgtaacttcaggtgagaagttggtgaaaaggttaaccaagggcattgaggagtccaagaaagatagagaaaaactttctgctgaaacagagaagatgatgtctatgttcaaagagattgagaagaaagcgtttgttgttcaggaagagtataagaaaacacaggagatgatagacaaccataaagttgagcttgacaaaactaaggaagaatacaccaaactaaaaaaagcaatggatgaactgagagccacagaggttgacgctgagtacaaattgcaagatacaaaaaagcttgccaaggagtgggaaatgaaggtgaaaacattcaagaaaaggcttgatgaaattcagataaatgttgttaaacacatggatcaaatccaaaaggatgctgttgatcctgagaaactcaaagcgactctaggtgatgagcaactaaatgacacatatgacatgaaaagggcaatggagatggtagcattgttagaggcccagattaaagatttgaacccaaatctggattccatagcagagtaccgcacaaaggcttgcttgtacggtgagcgtgttgatgagttaaatgctaccactcaagaacgtgatgatcttaaaaagttgtacgatgggttaaggaagagaaggctggatgaattcatggctggattcaacataatatctttgaaactgaaggagatgtaccagatgattactcttggaggtgatgctgaactggaacttgttgattccttggacccattttcagaaggtgttgttttcagtgtgaggcctccaaagaaaagctggaaaaatattgccaatttatctggtggtgagaagacacttagttcgctggctttggtgtttgctcttcaccactataaacctactcctttatatgttatggatgagattgatgctgcgttggactttaagaacgtatcaattgtgggacactatgtgaaagatagaaccaaagatgcgcaattcatcattataagtctgaggaacaacatgtttgaactagccgacaggttggttggtatttacaagacggacaattgcaccaagagcataacgatcaacccaggaagctttgccgagagcatgaaagtagtgtagcgtgctcaccatggatccttccgctaaatgtaacctccctagtgtcctaagcgaaactaaccactctggtgtccttcagctaaatgtaaccgttgtagtgtcctcgtgggaaccgaggttcctcgggcattgtggtttgccgtgcactctacaaagcactatgctatgattaagtccggcttggaacaatgggtatttcacttaggaagcgggtaggac

SEQ ID NO: 51984 - DNA, 347 bp, Zea mays
  Clone ID: MRT4577_147405C.1
ggggggaaaaccccaaaaatttttaaaaccaaaagggtttaaagggaccgactttaattacaaatgcaaattcttgagcggtttaaaagggggtgggggggggaaacccccaaacttttcccgggacacaaaaaaaggtttttaaaaaccaaaacctggtttgacgggcaaacaaatttttgcaagcagatcagtttttcttcttcttgggggcggaattattgccgccctttggggggaccttcttgtagtcctttttcagggggggcaggtccttgggtgccttggaaaaattccctttcttaatgcccttgccgacgtaccaatggaaaaacgcgcgcttgggg

SEQ ID NO: 51985 - DNA, 128 bp, Zea mays
  Clone ID: MRT4577_147406C.1
caacctcacccttttttttaggactaaaaatcttgtgtggttaaagtctcaaaatatagaaagtttctttctacatgtacccggaacatgccgaggggaagagagcctcgggaaccgttggacccctt

SEQ ID NO: 51986 - DNA, 312 bp, Zea mays
  Clone ID: MRT4577_147407C.1
gggacccaaaaacattaaatatttagccttgttaattgggggcctccaaaaaaaaaaaaggggcccccaagggaaaaaacaagggtttttttttttcaatccgggcccaaacaataataataaaaaaaaattaaccctcatttgatctcgaaaaattatacagccaaaaacgggctgttcctcgaattttgggaactgggttcctgggacatttaagctccagaaaaaacacgacactgtttttcgaaagaaacagcatttgaaaaagtttggttggccaaagctgttaaaaggattattaaaaagggtgtt

SEQ ID NO: 51987 - DNA, 307 bp, Zea mays
  Clone ID: MRT4577_147408C.1
cccgccgccgcaacatcttctactctctcgtcagatcctccagcaacacagcaccttccccgccgccgccatattttaccctaccaacacactccagactgcggggagtctttccaccctcaacagggaggacggcgacgactacatcaccaccaagaaactcacaactgccatgccctcaccgtggccaaacgccaccccctatcaccatcccgacacaatcctctacctccaccctcatcgcaaaccaaccaacatcttcccgaactaccacatcctcatcgacgacaccatgaaccacacctaa

SEQ ID NO: 51988 - DNA, 482 bp, Zea mays
  Clone ID: MRT4577_147409C.1
gggcgggctaccacccaaaaatatatctttttcggcaaaggttctagataggaagatatattattatatatacggggaaaagtaacaaatatagacagaaagagaagaacaaacttgcttaaagcccccgggcatatgttagccggtagctacttaaactcggccatcagcatgcactggtactcgcacgggcaccaacgatcggggacgacgtacgaaaaccggccgccagggggctcctacccccccgagagagagaagagagcactaaactcaacggggggaaaatatgttacaaaacaatggaatatatgaacaaaacccatccaaccggggattctacgggtatttgaaccaaggggctgatgccctttggacacatgtttatatatgaaaaaccctgcaataaacagacaacaccaggcatttggctcatttggttttgggtttccactgggttaccactggagcacgtttccaaa

SEQ ID NO: 51989 - DNA, 487 bp, Zea mays
  Clone ID: MRT4577_14740C.1
aaagcccccgggcttctttcgcaggtgctacggcgcgcgctagaccgggactagcgaaaccgcctgccaacaaaagaaatggtggacatagataccctaaaggacatgcgtttacccagtaacgagccccgcgacggaaaccacacctgcggtgacccaaaccgtttgatgcacacggcctgattaaatactgtatcaccagtgaaaaaatcgagcctaaatttggggaaccccaaacaaaaactgcatttccaaaggccaaaaaaaaagccccacaaataccccgcaaaaaaaaaaaaaaaggaaaagggcccccgatctataaataggacgcgaaaatcggaccaaccaaaagcgcaccggtacctagtggggtaccaacataccatatagcggaggctgttaaacctagacctaaccatgggcgcacctttttcctgtgggaggttgccaataggtcacaaatcgcacaacatacgaccgggaa

SEQ ID NO: 51990 - DNA, 352 bp, Zea mays
  Clone ID: MRT4577_147410C.1
ggaaacggaaacgaacaacttccacaaccaaagggggaaaacattggggtaaaagcccccccccattaaaacaaaaaggggggccccaaacaaaacccccccccgggggtaaagcccaccaacccgggggggggaaaaaagcatcccaccaaaaaacaccggaacaaacgggggaaaccatccccaaacaccaaaaagggcgagagaccggccccccccgaaaaagctaaaaaaaccaggggcattattttataactctcccccagggccaagcaagcattcctcgcccgggacccccaaaggagccctaactaaaaaaaacggggggaaaaaaacgggggggcggaacttg

SEQ ID NO: 51991 - DNA, 502 bp, Zea mays
  Clone ID: MRT4577_147411C.1
cgagaaaaccaatatatctttgacccaagacattacagttccaaatctctactattatcccgtcaagatggctggacaatcaaaacgaatagtgtaaagaaaagcaggttccatcgatcgtagtaaacgaaagagataggcttcctctgcagtagaacctgctcaaaaaccctattcaatgagaccgcttcctcgcaagtcttggagaaagcgcccctcctacatgcccccgacaagaaatgctgcaccatggagttcttggcgtgcatgatgaggaacttcctgcagatgctgaagaacagcactacaagcatgatagaggtggacactttggacacgaagcactgcacgttggagaggtcgctgacgtctaccattgtcaggaactggcagctgatgcacatcttaatgcccggccaggactagtacacctacatggaaggtccgcatctgttagatgtctcacacatcagcgattgcttcctctcgaaacccatcaacg

SEQ ID NO: 51992 - DNA, 462 bp, Zea mays
  Clone ID: MRT4577_147412C.1
gttttttttttttttttttttttttttggtctgccctgaaagaggcagaggcacactacggttttttttatctcttgaaaactgagaacctgtacagcaacttgagtatgaagttcaattgagctaccctacgcacctagcaactgagaaaaagaaaccctctgcaaccaagggccagatattgaaaagggaagaaagcaaacgaacctaacattatggcagccaagaaagaaacaaaccaacctaacattatgcaaaatccccctctaaaaagtaaaagagaatcattccacaaagatcctagcatggcgttccgcatgcatgacgattgccaaatgccaagagcttcccctgcaatcctcactgaagcgggatcccctctgctgctcatggaacagacaacattatgcttagattcgatcttctaaaaaagcactacacatagatcctacacccggccgg

SEQ ID NO: 51993 - DNA, 1259 bp, Zea mays
  Clone ID: MRT4577_147413C.1
gcccttcctcgagtttttttttttttttttttttttttttgatccggggaacaacaatggtttgcacacgctgatcaaggccaaccatccgccctacggcatggacatgttgaaccacgaggccaccggacgctactccaacggcctcataccaacagacctcattggtatgctatgctatgctatgcctccgtcgtcgtctcgtctgtctgatgcatattatatatataattaacaaacaaacaaacattaaacacatgcatgctagctgcgcccagcccagcagctcggcgtgaagcagctgcttccgccctacctgggcgtggacctgagccccgatgaccttctcaccggcgtcagcttcgcgtccggcgccaccggattcgacccgctgactcccgtcgtggtcagcgtcatctcgatggaccagcagctcgcctacttcgacgagtaccgggggaggctggtggacatcgccggcgaggccgagacggcgcggatcatcgagggcgcgctgttcctggtgtgcgccggcaccgacgacgtggccaacacctacttcaccacgccgttccgcagcgccgagtacgacatccccggctacgtgtacctgctggtgggccacgccgaggagttcctccgcgagctggtcgtcagctccaggggcgccaggaggatcggcttcgtggggatgccgccggtgggctgcgtgccgtcgcagcgcacgctcgggggcggcctcgccaccagggcctgcgagcccaagcgaaacgaggcggcgctgctgtacaacgccagggcccaggagatgatcgccgccttcaacaacaacaacaccgacgccgacgccgacgtgctggtcgtcttcctcgacatctaccgcatcctggaccacctcatggagcgcggggaggagtacggcttctccgagaccaccaggggatgctgcggcaccggcaccatcgaggtcacggggctatgtgactcccgcttcgtctccgtctgcgacgacgtctcgcaacacgtcttcttcgacctcccccccaattcagagagagcctacaggatcatcgtcaacgacatctttcaaaactacggacacgtgctcttctcatgactatatatcacgtactcgctgtctctgtctctggtagctggcccaatcgacccaacagcaaccaaattaaatgagcccatcctccaaataccgcagcccattgttacacttatttcctatcaaaaaaaaaatcatattctgg

SEQ ID NO: 51994 - DNA, 396 bp, Zea mays
  Clone ID: MRT4577_147414C.1
gcgcgttcgataatatacattgccattgcattcaatcgggcgatggattcactgaaaatgagcgcatgatgcttcttatcatgaccagtgtgctatctgactgagtgcctgcagcagtatatggctatacaagctcaagccctatagttgtaccgagcagggtgaatcatctgtgaggacatttggaagctgatgttactgccaaggctgcatgggatgacatgcttacttgtcaactatgtaatataaccaagcttttcacttcatgtattcgttagtgctagcggcctttactatatgaacctacatttgtactactgacacatcacggctctgttttatcgtatgtgcgagatgcattgccaccttctgtactggtatatataaaaaacacta

SEQ ID NO: 51995 - DNA, 733 bp, Zea mays
  Clone ID: MRT4577_147415C.1
aatccattagaggccttgggggaatcgcggcttcagccaaccacgacgccgccgtgcgcgccagcctccgtgggagtgtgggacacggctgccggcttcggtccgctgtcggctctcgcccctcaggcctcagccacgccgcacgcggccggaacggcggcgcccgcctccacggctccacgccgcggccccagccacgatacacgcggccacgccgcacgccagcacgctcagctgcgtgcccgcctgccgcctgccgcctgccgcctgctcggctcctcccctgctcttgctcggctgctccgtggtgcctgatccatggcggagaaggaggcggcggctacgtgggtgtggcgacgacaagctcattctgcgcggacttcagttccatggcttccacggagtcctgcaggaggagaggacgttgggacagaagttcgtggttgacatcgacgcctggatggacctcgccgctgccggcgagtccgactgcattgctgacaccgtcagctacaccgatatctacagcattgcgaaggatgatgtcgaggcgttctggactacctgcgcgtggagataacgaggcgcagaaagaaagaatgagatgctgtatacatgtggtgatgaggagccaggtcaatgctgatggcactgcgccactgcggccataaccataatccacggcacgcttgttgacaactaggcatgtccctttcacctctgaactggtgga

SEQ ID NO: 51996 - DNA, 1283 bp, Zea mays
  Clone ID: MRT4577_147416C.1
gaacagccggcttcgtgccggcgggtgcttgctggccatcgtacctcacccctcgtgcctcaagcctcagcaagacagcaacgcgaccgctgccacccctttgcggaatcgcggcttcggcctccggcctcagcggctcagccaaccacgacgccgccgtgcgcgccagcctccgtgggacacggctgccggcttcggtccgctctcggctctcgcccctcaggcctcagccacgccgcacgcggccggcacggcggcgcccgcctccacggctccgcgccgcggccccagccacgctacacgcggccacgccgcacgccagcacgctcagccgcgcgcccgcccgcctgctcggctcctcccctgctcctgctcggctgctccgtggtgcctgatccatggcggagaaggaggcggcggctacgtggggtggcgacgacaagctcattctgcgcggccttcagttccatggcttccacggtgtcctgcaggaggagaagacgttgggacagaagttcgtggttgacatcgacgcctggatggacctcgccgctgccggcgagtccgactgcattgctgacaccgtcagctacaccgatatctacagcattgcaaaggatgttgtcgagggcacgccacgcaacctcttggagtcggtagctcactcgatcgcagaggccacgctgctcaagttccctcagatctccgcagtccgagtgaaggttggcaagcctcacgtcgcggtgcgaggcgttctggactacctgggcgtggagataacgaggcacagaaagaaagaatgagatgctgtacacatgtggtgatggggagccagttcaatgctgatggcactgcggccataaccataatccacgcacgcttgttggcaactaggcatatccctttcacctctgaactgttggaatatcgggaatctgttcccctagttgctttattacgaattcagactcatatctgggtagtaagatcaaccttcttctggtctgtaacatcttttttttgtccatgttgctagtcgttgctcttcataccaactcatttcttgcacaaccattgagcctcagtttattgctagtaccaacaaattcgtaaccatttgattctttttctctctctctcgatcaactattcgctgtccgaaccattttctatctttcctgatgtttatacatgatggaatatctatgcaaagatcaatataaaggcatcgcggaggtgcattacctagtatttagtagtgtggccgtttgttattaaataaa

SEQ ID NO: 51997 - DNA, 560 bp, Zea mays
  unsure (1)..(560): unsure at all n locations
  Clone ID: MRT4577_147417C.1
tttcctcgaggcnncggccgggaaaaaaaaaaattaaaaaaaaaaaaaaaaaaaaaaaaaaaaaaaaaaaaaaaaaaaaaaaaaaaaaaaaaaaaaaaaaaaaaaaaaaaaaaaaaaaaaaaaaaggccttccggatagggaaagcctcccccataaaagttgccggaaagttctctcggtttcctttggtttccccagttgcccggtttcgtctccggaaacgcactcagtggagggcctcccccacagccgaagaagaaccggaaaagttcacgcaaatggaagccgggggccagtccctcttcgggatttcccagtcggtcccggaggtgggggggcccgtcgtaagcccccccagggggggccgaggaatggatgaaaatgggcacaaggacgtccgggaggggaggtacaggggaaattttttttccttttccaaccagtcgcccgagggggggcctaaaaggggccctcgaaaaaagggggccgcctaaaaagccgcgtttgtgtattgaaacgtccccgcatgtacgtgtacgggtactggacacctaggggg

SEQ ID NO: 51998 - DNA, 1039 bp, Zea mays
  Clone ID: MRT4577_147418C.1
gccacaccgcttttcccgtaaccgctgctgcccaggcccatgcacggcgtgcgctcccacgcggtataaatcgaaatacactgaaaaatggaccggtttccgtttcccggtactcccgatcagtacaggaaacggtaaattttaccggttccagtaaataccggacgagaagttcgtccctgcatcaattagatcatttagttttgtctaaaaaaattagctttatcgtagtagctcggtagccccctctgatctgtttctagatctgccactgtgcggaaccgctgctgctcggcccgttctatcacagatccatggcggagaaggaggcggcggctatgtggggcggcggcgacaagctcattctgcgcggccttcagttccatggcttccacggtgtcctgcaggaggagaagacgttgggacagatgttcgtggttgacatcgacgtctggatggacctcgccgctgccggcgagtccgactgcatcgctgacactgtcagctacaccgatatctacagcattgcaaaggatgttgtcgagggcacgccacgcaacctcttggagtcggtagctcactcgatcgcagaggccacactgctcaagttccctcagatctccgcagtccgagtgaaggttggcaagcctcacgtcgcggtgcgaggcgttctggactacctgggcgtggagataacgaggcacagaaagaaagaatgagatgctgtacacatgtggtgatggggagccagttcaatgctgatggcactgcggccataaccataatccacgcacgcttgttggcaactaggcatatccctttcacctctgaactgttggaatatcgggaatctgttcccctagttgctttattacgaattcagaatttcagatcatatctgggtagtaagatcaaccttcttctggtctgtaacatctttttttttgtccatgttgctagtcgttgctcttcataccaactcatttcttgcacaaccattgagcctcagtttattgctagtaccaacaaattcgtaacc

SEQ ID NO: 51999 - DNA, 1016 bp, Zea mays
  Clone ID: MRT4577_147419C.1
gacgcctccgtgcgcgccagcctccgtgggagtgtgggaacggctgctggcttcggtccgctgtcggctctcgcccctcaggcctcagccacgccgcacgcggccggcacggcggcgcccgcctccacggctccacgccgcggccccagccacgctacacgcggccacgccgcacgccagcacgctcagctgcgtgcccgcctgccgcctgccgcctgctcggctcctcccctgctcttgctcggctgctccgtggtgcctgatctgtcactgtgcggaaccgctgctgctcggcccgttctatcacagatccatggcggagaaggaggcggcggctacgtggggtggcggcgacaagctcattctgcgcggccttcagttccatggcttccacggtgtcctgcaggaggagaagacgttgggacagaagttcgtcgtcgacatcgacgcctggatggacctcgccgctgccggcgagtccgactgcattgctgacaccgtcagctacaccgatatctacagcattgcaaaggatgttgtcgagggcacgccacgcaacctcttggagtcggtagctcactcgatcgcagaggccacgctgctcaagttccctcagatctccgcagtccgagtgaaggttggcaagcctcacgtcgcggtgcgaggcgttctggactacctgggcgtggagataacgaggcacagaaagaaagaatgagatgctgtacacatgtggtgatggggagccagttcaatgctgatggcactgcggccataaccataatccacgcacgcttgttgcttgttggcaactaggcatatccctttcacctctgaactgttggaatatcgggaaatctgttcccctagttgctttattacgaattcagatcatatctgggtagtaagatcaaccttcttctggtctgtaacatctttttttctccatgttgtgctagtcgttgctcttcataccccaaaaaaaaaaaaaaaactaaaagaaaaaaaaaaagaac

SEQ ID NO: 52000 - DNA, 1133 bp, Zea mays
  unsure (1)..(1133): unsure at all n locations
  Clone ID: MRT4577_14741C.1
gccaatcgtgtaatcttttttacttagctggcttgagtacaaagtaacaatatttcttgatataggaaggacgaactgtcgggagttccttgtagtagtttatggtagtgacgttgcagtaatagcgtaccagcagggggggctctgaagcccaccgacggttgatgaagggacacaaattctaggggaggcgctgataagacacaaggacacacgttttctacagagaagcaaagggaaaggctaagacgctcccacagccacgagctttaaaagaaggagaagagagtggcccttaaccctaccgttctcttctccctaatcctggtaatcagtagtagccactagcgctgctgccgttctcttcccctacccgacacaagctccaccacctctatctaccacacgccaccactgtaggagctcctccacgatcatcccgccctagagccataataattcgttgaagaggagggggttcttagaaccagagggcggctacctgtgaaggatacccgtgctgctggctgctgctgttcctcgagctagagccgtgtgtgggctgtgcagattgcagagcgcagcttccagtctcagcattgctttcaatggggaggcactcctgctgttacaagcagaagctgaggaaggggctctggtctcctgaggaagatgagaagctcatgaaccacataaccaagcacgggcatggctgctggagcactgtccccaagcttgcaggtacaaccatcaaaatcaaaatcaaatcctgcacgctttgctctaccttctcaattgtccatctccactgtttcctgctgcttctccaagggcttcagaggtgtggcaagagctgcaggctgaggtggataaattacctgaggcctgaccttaaaagaggtgcattctctgaggaggaggaagacctcatcgtcgaacttcatgctgtactggggaacaggtggtctcagattgcaacaaggttgcctggaagaactgacaacgagatcaagaatctctggaactcgagcatcaagaagaagctccggcagaaaggcattgacccccacaccccacagccgctccttgtcgaggttgaacgcagcanagcagctcccacgaccagtaccgag

SEQ ID NO: 52001 - DNA, 584 bp, Zea mays
  Clone ID: MRT4577_147420C.1
gttattaataaggtaaaaccaacataacttttcgttgtcactcttacgaaaagaacaacgatctgagcatattatagcttaatgtatttcataacatattctgtctacatccatctttgagactttgatcattgcgccagcaaatgctgtaggtccattgtttgatgccaagctagcagcaaaacatgtggtatgtttctctgatggcgtgcatctctgctgctgcatcgctcatcactattcgatcccctggacgaagctttgagcaggatatggctagcctgaagacagaaaccaagcaatccttaattctgctccttataatactatccgttgactctacatgcagccagattgttgaatcaacaatatctaagattctttcgctgagtgcatgtttggcataattatgcaaatctactgtgtctccgaacatgtcatctatggggctccttccagtaaacatctcaagcaacaatataccgagactatacacatcaccaatagttgagacagtagagccttcagcatactctggagcaacataaccaactgagcctcttattccgatggtgctatttgaa

SEQ ID NO: 52002 - DNA, 648 bp, Zea mays
  Clone ID: MRT4577_147421C.1
atccagcaagtcagtcaagaaatattttactagcagtgtacagatttaaagagcagtacgtgcaacacggaatacactgatgctgttgtgactatgaagagtgaatttccttccatatggtggccgggctcccttctggaaaacgaatgaatacgacacacacactctggcatgcttttgctgtaaaagggatcatcaggcagatattcacattctgctctgctccaagtcacttgagcaatgtaccaactaccaaggttatatcagtttggtagactaaaatacaaatctgatgcagatactaacttgagcacgatttagcctgtactggccacaggtattgtagtttgtttgggacataattcttttttagaatacttgattggactggaagtcatcagcgcaccctagatttctgaatgatttgcagatatcttatgaagaccttatattgtcctccgatggcaaggcctcatgtaaatttctcccttgcagtaagtgctccttccgagaatactcagttaggctgttagctccacttcagattctaaatccaactgatcatggatatggcgggaccatttcagctcagcaaataccagttgcaagaaggaagggtctgcttaagattctattggttttagtgac

SEQ ID NO: 52003 - DNA, 970 bp, Zea mays
  unsure (1)..(970): unsure at all n locations
  Clone ID: MRT4577_147422C.1
cggaggaggaggacggcccgggggtggcgagcctggcgacgattctggatgtggtggcgcggacgggcaatgtgtacattgatcgtgcgagtgccgcttttnnnntttttnnttnttnntnttntnttttttttttttntttnnnataattgtacttgatttaagagttttattaaatcatgaatccaccacgacagtgtccctttccttgcagactgtttcaagaactagcagcagttcaaagtgaaacagtgtaggaaatctcggcgggcctaaactcgtcgtacgtacaagaagggctacaggcccatcatccatatcacatgttttttttgggattttacccgtaaagcccagctcgcttctttcctcacccggcggaacaccaccagccaccagggaggagaggagaggagagatgatgatgatgccgacggcggcgtcgctgatggacgatcttgtcgaggagttcctcatccgcctcccgcccgacgaccccgcgagcctcgtcaacgcctccctcgtctgcaagcggtggagccgcctcatcgctggccgcgtcttccgccgcaagttccgcaagatccaccgcgccaagctgctgcacatggcccgggggcaggtctataggcagcggcggcgacggcggcagcggcagtgatggagcggcccgtccggtccgaccgtcgattggctgcttgctctgcatcttctggcttctgcaaccaggaagctgactgaacgctcgctattgccaataattaattagtactattttcttcgtttcttttttttatttgtcgtatacgaactaaaacagagttagtgataatgataatgataatttgtagcagtgcaaagtgccaaaaaaaaaaaaaaaaaaaaaaaaaactagttctagatcgcgacgaggcggccgccttctagagtgattccaaagtcttacggtacgcagtgcaatgcgacagtc

SEQ ID NO: 52004 - DNA, 328 bp, Zea mays
  Clone ID: MRT4577_147423C.1
cgccggggcaccggtccggggttcgacgccacgcgtccgcccacgcgtccgcccacgcgtccgcggacgcgtgggacatctgcgaagttaattgctgcagtgttgggagctagctgcacagaccaaccgaccgagcttgccgtcggaaaccgggatcaatcgagagagtgatcatcggtcgatagcaaccgtgagttcgtgtcgtgaccgagagagagcatgacgaagcagtggctagtgttcgcatgggccttgctggcggcggcctcctcggtggcgcgcggtccccacaacggctgcaggtcgggttctacgagcactcgtgccc

SEQ ID NO: 52005 - DNA, 832 bp, Zea mays
  unsure (1)..(832): unsure at all n locations
  Clone ID: MRT4577_147425C.1
ccggccgggtttgagaatattcggaagctgttttgaactacacaagagtaattaatcaacaacatgttgagcctagagttaggagggttgcattaaatcgtggcgctgaatatttggagagatacctcaaattaattgccttttctgcataccttggtagtgaagcatttgatggtttctgtggacaaggacaaacaaagatctcatttaaaggatggctgcaacagcggccagagatccaaaccatgaaatggagcataagactgcgacctggccgttttttcactgtgccgcatgagcagaaagcaacatatccacctccacaaggtgatgtaacaatggaaaccattgtcaaagctcgtagtggttctgttctgggaaagggatcaatactcaaaatgtacttctttcctggacagaaaaggtcaagcagtgtgaatttccggggtgcacctcatgttattaaggtggatggataccctgtgtatagcatggcaacacccactattgatggagcgagtgatgttttgtcgtatctgggctctaaagacacaaccggaagaaacattgcacagaaggtggtcgtcacagatcttagagaggaagtggttgtttacatcaagggatcgccatttgttttgagagaactagatcaacctgttgatactttgaagcatgttggcattagtggtccaatggtagagaacatagagacaaggctaaggaggatatactctctgaagttaaacagctaggtggtcggntactgcttcatcaagaagatttaatgcagccacaaatcaatgtagtgtggtaggttactgggaacaca

SEQ ID NO: 52006 - DNA, 262 bp, Zea mays
  Clone ID: MRT4577_147428C.1
aacgagacgaattacgttagctcagtgatcgactatttacaacgccacagaatgagaaagccctcgtggatacgccaacttaattcacttgacagcaaatacccctttacttcatttggaaaaataaacaaatacgttcgctccgcactccaccttcccaaaaatcgtacaggacatagaatgctacaatgacatagattgatatgagtaaatattatgcatagaaattcgagaacatattttgtgctaagtcacggtcatt

SEQ ID NO: 52007 - DNA, 537 bp, Zea mays
  unsure (1)..(537): unsure at all n locations
  Clone ID: MRT4577_147429C.1
aacgagagaaaaactgattattgattcgattgttgattcttaatctgtcatattcctccatatttatagaggagggggctagacccgttacaaaccaatctcccgagttaatcccgcgaatttagctaacaaccgtagcaagaaactcggaaccctaattggctctgcgtgagcgcggaccgtccggatcacggatcgtccggcctggggccggaccgtccggtccctcattttgctgctcaacagactgaaatctcacaaagaagaaaaatctacattatatagaaatttataaggcagttgcaattgatcaggtgaggggtgcgcctaatccaattatgatacattctcaaggcacatatctataccatccagtcttattattgtatcccaaattatccacaattccgcatcagttgaagggaagagaagttcatcctcctaagctgtgcttcgcagncacctttctcgtttcctcttcatagggagcaaggtctttggtttttctgatcgcatgttgaccgattcttcatcttc

SEQ ID NO: 52008 - DNA, 336 bp, Zea mays
  Clone ID: MRT4577_14742C.1
cgcataccagtcattcggcactagctatatgccgcgctatgaccgcatgacgaggcgggtcccaaagcaactgctcgtggtgaccgtcggagcagctgctatcaccatcgaacaggaataggcggctcaatgtcgactacttcagcgtacccaaccctgtgactgcccttctctccaggacgtccgactgggacgacaccattcatgagcacctcgtccgtgatcgtcgtccgctataacaccaagttacatgtcgacaccaccgaaggtttcatcgtgatctggggcacctgctaacctcggtgtgctctcgcgccatactatccctggggcccc

SEQ ID NO: 52009 - DNA, 1007 bp, Zea mays
  Clone ID: MRT4577_147430C.1
ggaagttacaacgagtttgtgaaactgagcttggtttaatcactcagtgctgcgcacctaagaatgtaaggaaaggagggaatcagtaccttgagaatctttccttgaaaatcaacgtaaaggttggtggccggaacacaatgctcgaagatgctttcaaccggagaataccgcttctgacagattgtccgacaatagtctttggagctgatgttacgcacccatctgctggggaaagttcatctccatctattgcagcagtggttgcatcaatggattggccacaagttacaaagtacaaatgcttggtgtcttcacaaggtcaaagggttgaaattataaatgacctttatacagaagtggaagatccacagaagggcattgttaaaggtggaatgattagagatttgcttatgtcattcttcaagtcaactggccaaaagccttcgaggattatattctatcgtgatggtgttagtgaggggcagttcagccaagtcttgctttatgaaatagatgccattcggaaggcatgtgcaagtttacaggataattatctcccaagggtcacatttgttgttgtgcaaaagcggcatcatacccgcctgtttcctgaaaatcatcgttcacgagatcaaacagacaggagtggaaacatcctgcctggaactgttgttgatacgaagatctgccaccccagcgagtttgatttttacctctgtaaaagttctggttcttgtggacctactcgcccggctcattatcatcttcttctggagaaatgttgttgatacctgatgctgtgcccccagcgagtttgatttttacctctgtagccattctggtattaaggggacaagccgcccagctcattatcatgttcttctggacgaaaatggtttcagtgctgatgcactgcagaccttgacttataatctttgctacacgtaagcttcattgatgatggttcctcaatttgcataaaatatgtaccattttgccatggt

SEQ ID NO: 52010 - DNA, 399 bp, Zea mays
  Clone ID: MRT4577_147431C.1
aaggcacgcgaggcacacctacgtaagcgcgtcgagaacgcttaaaccgtcacgcactacataaacaagggcggcgggaacatttctaggatttcgcccaaccccacggagcacgcataccggctgcgcaacacgaccttccacccgatcgcgctggaggacctgcttggcaaggacgaacccaactacgaaaacaagtacctacgcctaaagtccaccttcatgtactacaactccgacaagctaatctccgacagctaagacaagccgacctctgacgaccttgtcaaccgactctgagacagagtggagacgctccaagaagccgggacagccaaggacgacaccacggatcagcaaccgctacgcctagacaaagctcatccttcagaagctcat

SEQ ID NO: 52011 - DNA, 478 bp, Zea mays
  Clone ID: MRT4577_147432C.1
ggatggaaaagcatgcgggtattcaaaggctatggatgcgcacatacgtttaggctaaagattgcactgagacattatttttcgagtcaaggaaacactcctataatgcaatccctgcgatactaatccaacaccagctctgattaacaattaagagggcttttgacaaaaaatggaactactctctttagcaactgtgctctctaaaggcaagcttttaatggaccgatcatcaccggacactggatgatctcgtgccactcttactgaccaacaatcacgcattgtatagagcctttaggtagacccaactgtgtacaagaaatcttcacgacagactacatctccgcccgtggcagtcaacaaccttctgcacgcacagtagaaccatagggatacacctcaccatttccatcctccggaaagattactgcaagagacggttgcatcagctccgccaccgtcttgggcttgcatg

SEQ ID NO: 52012 - DNA, 289 bp, Zea mays
  Clone ID: MRT4577_147433C.1
tttatttcatgtcgaaccagatcgagaccacgtgctgtggtgcatagcgagggggtgcacaccaaggaggatgtcgcgtggaaccctggcaagcgcatggtgtacatctacaaggtcaagaccaagtgtatggaaacccggtacaggtgcatctggggcaaggacacccgtccgtacggaaacttaagcgttgaccgcgccaaggtcaagaccatcctgacgcctgtattgataacacaaaaggttagagtgttcatgtacccgcacaggataaaaagtttagctggag

SEQ ID NO: 52013 - DNA, 1169 bp, Zea mays
  Clone ID: MRT4577_147434C.1
tgaattcggcacgaggggcagatgtgctgaagtgtcttggtgacaataagaagcacatgcgagaatgcacattgactgctctagattcatggattgctgcagcccaacttgacaaaatggttccatatattatagtgtctttgggtgatcagaaaacaggttcagaagggcgaaaagatctctttgattggttgtctaagcacgtttctaaaatgagtgatccatctgaggctttgcctttgttgaagccatctgcatcttctttgatggataaatcttctgaagtccgcaaagctgctgaatcctttatgaatgaaattctcaggatctgtggccaagaagtggttggaaggaacttgaaagatttgccatcacctactttggctattgtatcagaaaggctgaaactgtctactgtacatgaaggattttctgaatctgttaagatggtgacaacaagcatgagtttgccatcaaaagctggtttgaagaacaataaacatggtcttaatgatcgtggttctaatgtgggcaaacctgtgtcccaaagaggacttcccgccagggcatctgttagtatggtttccacccaagaccctgcacaatcccaagcattatttaacataaaggactcaaacaaggaagagctctgaagagaaatttttgaagtacttctggtggtgctggaacaagttgaagcctatttcaggttcctcgcgttgctcgcattcaagatattttctgctgagcaggtagatgttgctgttctcgaggttggcctaggagggaagtttgatgcaactaatgtggttaaagcacctgtagtttgtggcatatcttcccttggatatgatcatatggaaattcttgggaatacacttggagaaatcgcaggagagaaggctgggattttcaagaaaggagttccggcctatactgctccacaaccagaagaggcaatgactgctctcaaacaaagagcttcagaattgggtatctctctccaagtcgttgatcctttggagccccatcacctaaaagatcagcatcttgggctgcatggagaacatcaatatataaatgctggccttgcagttgctttggctagtacgtggcttgagaagcagggacataaagatacgttaccactcaatcgtactgatccctta

SEQ ID NO: 52014 - DNA, 284 bp, Zea mays
  Clone ID: MRT4577_147435C.1
ggggccaagccaatggtttatttcccggggtttccctacaaaaaccgccctttgggaaaccttccttcacttttcctttggttcggccccggcatccaaaaacatgaggggggttttttcctacgggaattggaatcctacacttttcctccaaaattccttcaatccaaaggggcccttagatcgggacccccttagtggagccggcccgagggccaaagaaaaccaaaagctggcccggcacccaattagggaggggaggaacccattatttttcggggatt

SEQ ID NO: 52015 - DNA, 231 bp, Zea mays
  Clone ID: MRT4577_147436C.1
acctaggatttcaattcgagtctggcccctaccaacgaacacgaaccttggcgggtcgaacctaaagtaggtggttgtgaacccaatatggcaaacacaccgaggatcctgtccctctgcctgctaacgctactgtgcgctgccaacggtcctttcacctcgcataactgcggctgccatccaaacttctgctataccaaattcggatactgcatcacgaccgacacctac

SEQ ID NO: 52016 - DNA, 409 bp, Zea mays
  Clone ID: MRT4577_147437C.1
gcaaaaataacttcttatttttaggaggccacatacatcagccaaaaaacttcattattgaatgacaactaataagcaatctaaaagagagcaccgccaatgatgtgttgctggtaaaaagctgctgggtttgtcaaaacaagttggacaaagggcaacaactgttgcaattgtaaaagggttgcggggttagccacaaactgttggtagaacggaagcaattgttgttgtgtcaaaaaagaaacggggcttgttgtatctatactggccaaatggtagtacaatatgctgctggaaataatcaaaagggttcaatgcggcgaattggttaaatggaaaaaattgttactgctgagagcatgcaacaaccttactggctgaatgggattagttcatgttgctgcaaaaa

SEQ ID NO: 52017 - DNA, 292 bp, Zea mays
  Clone ID: MRT4577_147439C.1
agccttccgacacaattacatctatgcattctacaaattataacaacaagctcgacacccaaaaggtggggctctttggcctccccatacatgatatcataataaacgcattctacaagcatacaatcagacagatgacccttacaaccacccacaaccagatatctatagacaacagatcatctaccagctacgaagacctaacacctacttttcatctgaaaccaccagtccaattgtcggcgacaaccaatctttcactgaactatcatgaacgcaacaatgttcatat

SEQ ID NO: 52018 - DNA, 777 bp, Zea mays
  Clone ID: MRT4577_14743C.1
gtacacgggcggaagaggagggggggcttagaaccagagggcggctacctgtgaaggatacccgtgctgctggctgctgctgttcctcgagctagagccgtgtgtgggctgtgcagattgcagagcgcagcttccagtctcagcattgctttcaatggggaggcactcctgctgttacaagcagaagctgaggaaggggctctggtctcctgaggaagatgagaagctcatgaaccacataaccaagcacgggcatggctgctggagcactgtccccaagcttgcaggtacaaccatcaaaatcaaaatcaaatcctgcacgctttgctctaccttctcaattgtccatctccactgtttcctgctccttctccaaggtcacttctttctcccactcctctccctctcgtacctgctcaattgattacttaattaattaattaattaatggtggcagggcttcagaggtgtggcaagagctgcaggctgaggtggataaattacctgaggcctgaccttaaaagaggtgcattctctgaggaggaggaagacctcatcgtcgaacttcatgctgtactggggaacaggtaagaaagctaagcccaaaatcatcacaaacacacaattttgcacagaccgattgcttccaagcaagctttctttttaaccaggcctttttctttttttttcaacatccatggacaggtggtctcagattgcaacaaggttgcctgggagaactgacaacgagatcaagaatctctggaactcgagcat

SEQ ID NO: 52019 - DNA, 1546 bp, Zea mays
  Clone ID: MRT4577_147440C.1
ctggggggcagagaccatgaacatgcatgtgccagctgccagggtttacagttgttttgattctctctgtcttctgtttccacagcggatgttgccggccttcgccgcgtgctgcacggacctggtggagaggtgggaaggcctggtcgcggatgggcagcagccgtgcgaggtggacgtgtggcctgagatgcagaacctgacgggggacgtcatctctcgcgccgcgttcggcagcagctacctcgaaggcaggaggatcttccagctccagggggagcaggtccagctcgtcgtccaggccatgcacaagcttcacatccctggatacctgtacctgcccacgaaaaccaaccgaaggatgaagcggatcgcgtcggagatccaggagctcctcaagggcatcatcgccaagagagagaacgcgctgagaaccggcggcggcgcggcgagcgacgacctccttggcctgctcctggagtccaacatggagcactgcaggggtgacggcggcaagtccaaggcctccggcatcaccaccgacgacgtcatcggggagtgcaagctgttctacttcgccgggatggagaccacgtcggtgctgctcacgtggaccatggtcgtgctctccatgcacccggagtggcaggaccgggccagggaggaggtgctccacgtcttcggtgacaggacgacgccggactacgacggcctcagccgcctcagaatcgtgacgatggtgctctacgaggtgctgcgcctgtacacgccgctgacggcgctccagcgccagacgtacaagccgatggagctcggcggcgtcaggtacccggccggcgtgatgctgatgctgccgctgctgtgcatccaccacgacaaggacgtgtggggtcccgacgcgagcgagttcaggccgcagaggttcgccgagggcgtctccagggcgtccagggacgcgccggccttcttccccttcggctggggcccgcgcacctgcatcggccagagcttcgcgctgctcgaggccaagatggggctctccatgatcctgcagcgcttcgcgttcgagctctcgccggcctacacgcacgcgccgtttgcacacggcatgctgcagccggagcacggcgcgcaggtcatgctcaggcgcctcccctgagacgatgatgcatggcccgggcggggttaggttatttgatttgatggcttcatgtgtgcatgtacagcatatatatgtactacgtagtagatgtaaatcatgcaaggaactacacttgcaaggcgcgcttgtgaaaagttgattgcctttctagttactgatgagatgtatctcagttgttacggctggttgagataggcagctacccatattcatggtccggtgtatgtatgatgccttagggcttgttcggttgtccaggattggacctagaattattccagctgataaaatcttatataaaataggtaaacaatccagccaggaataattccatgtcaccgttcctgagcaaccgaacaaccccttagggtttttttttctcac

SEQ ID NO: 52020 - DNA, 958 bp, Zea mays
  Clone ID: MRT4577_147441C.1
agcatagccatttggtgcgagcgagataactacgcgcggctccccggtctctctcgctgtccacctccgaccccctcccctcctccgcccattccccttgttctcgtgatcgcctccggccccgaggtccggcgagagggacgcgccgcgcagctcgcgggaggttcttgctgcggagctcgtccatttgcgagcagatcgggcgagaagctcgccgccggcgtgaggggccgtcttccgcgtccgtccgttggttggggtggagacagtgacacaagtgggctggctgcttcgccgctgttgcttgtaggtggcggtagcctctggaacactcccgctgcaacaggcaggcccaacagtttatatatttggaaatactacaagtagccaaatcaggcgtcgtcggcatgcagtcgtattgggcaccgctcttccctaacactgccgtggaaaagcagggggtgcattccttgtacagcgattatgcacatatatttgacttgtcatcggagaatacaagcctgggcagctacatcgttcctaaagtggggcacctggctgtcttgttgaaacgttctgccctccttactggaagcgcattttttaccattgccatccgctacagagctctgctggacagatggatactgcaaaaatgcgccgtctcccattcccagggtgcacctgttcagtccaccatgatgttgcgatcctgttggcagtgtagatccctgcctttgtttgttggcattggtgttctaatggcaaggctctgtagttacattaccattcagagtcataacaataatcggcaagtcatccgcggcattgaagctaaccttcagggtgattcgatcattgagagtaacaagttgtgcaatcagcaatccgtccttccaagtttgcttggcagcaagcatgaattatgtccgtttgctgcttcattttatttgtagca

SEQ ID NO: 52021 - DNA, 206 bp, Zea mays
  Clone ID: MRT4577_147442C.1
ggcaggggaccattgattacaccagtcttatttaaaacaaaaaagaaaccactgcatcaaagaataaatatcctcaaaacttttaggagaaacggcctgtaactattctattcaaagtagtaaccatgacttttgaaaactggacataaaatttcatagaaattcctgctggctatcctgaacaattccaagaaggcacctgcaat

SEQ ID NO: 52022 - DNA, 274 bp, Zea mays
  Clone ID: MRT4577_147443C.1
ccgggtcggtacccacgcgttcgccggacgcgtgggcggacgcgtgggtttcgcaaattacagccattgtgtacttagttattttttaatttatatttaatacactatcatgtgccgcaagattcgacgtgacggaaattttgaaaagtttttggtgaaggccttgtttagttcctacacgaaaattttttggtgcattgtagcacttttgttttttttgacaaatattgtccaatcatggagtaactagacttaaaagattcgtctagtggat

SEQ ID NO: 52023 - DNA, 152 bp, Zea mays
  Clone ID: MRT4577_147444C.1
aaattttaaattttgaaacattgaactgcggtaattgcaacgggattgcacattacagcatccattacactggaggcttaaataacctagatacaacccatggcaggtttttcggggctaacaaataatccttatcaaatccctgaaataaa

SEQ ID NO: 52024 - DNA, 358 bp, Zea mays
  Clone ID: MRT4577_147445C.1
agggaaaaaaaccttgtttgttttttttttttaaaggggcaaaacgggggccccctttttttatataaaagggtcgaatagcttgttccataaaaaccccccggggcttaaaaggggcctccccccccccatggtttacttgttcaacattttaccgggatttttccccccaattaggggaattttttttaaagttcccccggggccctgcctgaaatcccccacccaaactttggactaatttttccggaagaaacccaagccaggtttttagttgttccccctataaagggttagccccaatacatttttttccattgggggcggcttttggaaaacccaggggccgtttttttaa

SEQ ID NO: 52025 - DNA, 513 bp, Zea mays
  unsure (1)..(513): unsure at all n locations
  Clone ID: MRT4577_147446C.1
caaatattatcatgggacctaaatgctcaacgggctacaaggcaaaacatacaaactggctaagttcgaaggtggccattggtcctaggtaagccatatcagtgaatatataacaaagtgccatatgtaataatagtgcaacaaagaggatattaactgtagctctatagcccaaactggtaaacaccggtggcggacccagaaatcttcgagagcctgggcaaaaatgatattcatactgtaagtatatagctttacataatttgtacccatgtttaaatatattttactgtttgttgcacgtgtatacgttcgttaacactaatcttgagatgaaatatgtagtaattttaaaacccgcacagagatacaaaatgcaagcacttatgtcgcgaaacggatactccaacacctcattatcattagacactagcaagtaagaaatcattctactaaacaaacaattttaaatacagncataataacacatgaaacaaaacaaaccttcaaact

SEQ ID NO: 52026 - DNA, 335 bp, Zea mays
  Clone ID: MRT4577_147447C.1
ccatgcgctttttttttttttttgtttttcttcctttctacattttttttttttttttctttaaaacacccatgagagtgcaaattaacccccgcccaaaatactaagccttctccagcgataaaaaattctccgacagtttgtcctcaaagacctgcattaggtgcctaagctctaaataacactgctacaggaaaatttaccaagggcactgtttttattactgtaaccaagcgcgactaaaatgctggataacacccccccggacaaatgtgacaccatttaaaagtcttgtgtatatcaccaaaatgagaaacagaacgccttatttgttt

SEQ ID NO: 52027 - DNA, 555 bp, Zea mays
  Clone ID: MRT4577_147448C.1
gcggggatggcaaagggcaggacgacgggcagacgacgacgaagaagaagccgccgccggccactggcagccggactccgccggatgggaccggcggcaacaagccgctggccgacggcgccagccgcggacgtcgttgagtccaagaccgacaacgccgccgccggcagctagctagctagcagctgactgtgactgcacgtacgtacgggtacggcgctatgtttttttgatccattcctatgcatgtgtgtcctagctccgtcggatggcagctgcaggacctgcgctgctctcccaaagtattcagtacccacactcctccccagcccacacggacggtgttactgttaaccagagcataggacatgctaatgatgctaagctgttcttttggcaagtgaaagctgctctgcatcagtttatccatcaccatacctagattcaaacaaaacaatgttttagatgattatatagatgaaccgctggacacgatctaagacaaacaaatttatattctcataaaaaatcatgatacattatggtcgcggtcct

SEQ ID NO: 52028 - DNA, 486 bp, Zea mays
  Clone ID: MRT4577_147449C.1
ctcttggcttgaccagtcttagttactgtgctactggcaagctccagcatcaggattatagacgagctggctttatccttgtccctatcagttccttcttacttccagcaggacggggaacatgctgacgcacactcagaagtggcaccttactttgaaccatacgctgtggcatatcatggcacctagtacacactggaccgggcggcgtgaactatgagctcaacacgatcctttcgctcaacatggtcatagcatttctggctgctctgcaacttgacaacacagacgctgaaggtcattaactacggcgattgtatgatcgggcatgaggagaggccgcgaggagagaaccgactttcaagaaagaccatgaacttactttcaagatcggacgccctatcatatgggcgaagagcgcagaactataacacaactgtggatagctagtagctgtggcacactttgaagatcacacgctatgat

SEQ ID NO: 52029 - DNA, 638 bp, Zea mays
  Clone ID: MRT4577_14744C.1
gttatataggcatgagataagctgttttgcatctctacgcactgattgtaatcacttaccctagtattggatctccatcgaatccgtgggtcccagggatggactcttaacttgcctcaggctgctcttccatggagaccagcatgtgggagagaccctattgctcttccacaagagaacctccccggctgagataggcatagcgaagctggaatccttgctgtacaacaaagatggacacgaacggtgtatcctaaggaacttactctgccgaggaggatctctggcccgagactagatgtggttactgcataatgcttgactgagagggacaagatcgggtcatgaacctcggaaaagaagtagctgatcatggagaaggagaggatctaatagcgcatgacacatctgatcccatcgacaaaagatgctggaatcgatatacggagcagaccgtagtatgtccatataaaggctgatgaagaagggttccccacccgccttgttgatcggtcacgctgatgctgcatctacctcaagctatccgtgagatggtcatcatcgagagtgtacacaagtcgatactgaattatcaaactgttgcattgacgtgatgttgtgttgcacagatatgtgtc

SEQ ID NO: 52030 - DNA, 886 bp, Zea mays
  Clone ID: MRT4577_147450C.1
caacagcaaaaagggctaagcccagacttgcttagatacaaaggtcccatacactgcgcaagaactatagttcgagaggaaggcctctttggtctttggtctggagcactaccaaccgtcatgcgcaacggcacaaaccaagcggcaatgttctcagccaagaacacgtttgatattgttctgtggaagaagcatgaaggggacgggaaggtgctcctgccgtggcagtcaatggtctctgggttccttgcaggaacagcaggccctgtctgcaccggacccttcgatgtcgtgaagactaggctgatggctcaagggagaactggggacgccaagtacaaaggcatggtccatgcgatacgaacaatatatgccgaagaggggctgcgagccctgtggaaaggcttgcttccccggctcatgaggatcccacctggacaggctataatgtgggctgtagctgatcaggtgatgggcctctatgagcgaactcatctgcagccagttcatatttgaccattctattgcagtgctggtgctgcactgaatttttttttgttggttctcaatcggtggttagacgtggaagtcgtcgattaagtgtaaactgttccagtgactggatattcgtttgttcattgcttagagttgggtattgatggaagcaatggaagactcttgtactactattttgttgtcaataatcatgaaaccctccaccttttggactggggatatctcggttgtggtgactattatggttgttagactgcagtagcatcaatttgtatgattgaatatactcatgtgttcatctggaaagctgagggttatttttatgcccgggcgagccgtcaaaaagataccgagcaaaaaccgaaaaaaa

SEQ ID NO: 52031 - DNA, 629 bp, Zea mays
  Clone ID: MRT4577_147451C.1
ctcgaggccggccaggttacctatctctacagtattgtattcctatgacatgcagttctcttgtgccgttcaaggaaaaaattgactactgaatttatggttgttatttccataccaaatttcttttacatggtcatgtacatgttgttttagttgctcacgcaagcagcttttttttaaaaaaaaaacagcatggcacattatgttggtttactattctcttttttttttcaataaacattttaaaaatgtgactgtccgggtgctgttgcagctttgttctggattaaagcacatgcacagttttgatccaccatatgcgcacaatggggttaaaccagataatgtcctcataacacagaggaagcagtctcatctagcaattttgatggattttgagagtgctgtccagcaagaaagactattagatcacaagctgaagctttgcagttacaggtacctttgtattcaaatatgcaaagaatattgttagtgcatctgaactgatgactggttattgattgctgccatggtaatatagttggtgaatttaccaaacataaatggtatgtttgaagcctcattactcaacatacctttgatatgttatggatgcttggaggaatggg

SEQ ID NO: 52032 - DNA, 273 bp, Zea mays
  Clone ID: MRT4577_147452C.1
tttttattgagcgagcaaaacatctatttgatgaagtattgcatgctttacacatgatatctgacaaaaaggttcaaggcagttcgattaacatggaatttagcaattacattgctgatcttgaaatcatgcttcgaaaggaaaagtcagaatttgagggatgcttgaataaagtcttgagaagggatatgcagaaaggccaaccggacattcttgagatcaataggctgcgaagacagttactcttcattcatacttgggggataaaaagac

SEQ ID NO: 52033 - DNA, 363 bp, Zea mays
  Clone ID: MRT4577_147453C.1
cttccctgctgtgagcgcttcaactacttggtgcccctcataaggggcaaggcgagcctctgcatcaatagccatccatagcaatgggcagcagcacaggagatggagcccccagctaggggctggtagctggctagccagtgggcccttatggctgatgcccttgcctttactgaccacctcattctggtcaggaagtttggccaacggacacctgtccggctcttctcaaggaatggagagggcgacgcaagaattcagttccgcaatataattgaattgctagcacaattggagtacatgcggtaactgaactcgtgacctgggattctcagtacaaatggcatgaattaatgatggatc

SEQ ID NO: 52034 - DNA, 335 bp, Zea mays
  Clone ID: MRT4577_147454C.1
gaccacgcgtccgctcttcatccatgaccgctaacaccttaatcgtcctaaccgcttcaatatccatgtgctcctgcacaaccacggccaggaccccttaggggtagctcgcaacttaagccgccgaatgcacacgaaatgttgacacccgatgccattgtcaatctctgttggatgctgcagactgatgaacacgccgcgcacatgcgtaaatgagtaggagccaggagttcaagcctacgtatatgcttaaacgggttatgaggtggtcgaaccacacgcggacgttgccgctgaccctaacaaggacgacggaaccggttatattacctgcc

SEQ ID NO: 52035 - DNA, 510 bp, Zea mays
  unsure (1)..(510): unsure at all n locations
  Clone ID: MRT4577_147455C.1
aaaaaaaaaaaaaaaaaaaaagacacccagcaacccccaacangcgccacttgtccaggtgggcgcgtcaangctttgcttagctagccgccatggcccctccctcgccgccgtctccgtgaagncccgtggccatcaagggtctncgccggcagcttccatcttccggaaggaagnctcgccgtcgccaggcccgtcggccccgctccattccgcaggnnccccgcgcatgccgcgcggtggtggcccaagtacggcggagcaagagcggtctacttttgaccctcgacgacnatcggcaacacccaccggacagggtgggacctctacggcttctgacgccgccgtcgccctacatacccgctacagagcaagttacttcgagacgttcgcggctccgttcaccaagagaggtctgctgctcaagttcctgctgctgggcggcggctcacttctggcctacggtagcgcgatggcgacaccggacctcctgccgatcaagaagggacc

SEQ ID NO: 52036 - DNA, 1877 bp, Zea mays
  Clone ID: MRT4577_147456C.1
ggaccctcgaggccgggccggggaaaaaaaaaaaaaaaaggatgggactagaacactcccaccaggccaccacctccacctcgtcgtctcccaccaccgccgcgcgcgagccctagcccgatctagccggcggcaggcaccagatcccgccgctcgtggcgcgccgatacgcgccccgccgaattcaccgctcctcgcgctgcagcacgcccgggcctggactgttactgcgtgacatgtagtattttataattggaggttgtcaccatcaccacaaaacatatgttgtgatttctcgatggcgaggagatgaaacaggtgtgggggcggagcagcaaggacatgacaaccatgccccctccgcgccaccgtggcgctgctaagaagcccatgtggatcatagtgctattgtcgttggtttgtgttgcccttatgggggcctatgtctacccaccacggcactactctgcatgctacttctttgcttcgagtgtctgtaccccgttcaaggattggctacctgctgttgctcgggagcgaactgatgaagagatagtgtcatcggtggttattagggatcttctttcgatgcctatggctatgtcaaagaacccaaagattgcctttatgttcttgacaccgggttcattgccttttgagaagttgtgggagaaatttttacagggtcatgatggccgatattctatctatatccatgcatctcgtgaaaaacctgtacattctagctctctttttgttgggcgtgaaattcacagtgaaaaggtagtatgggggaggatttcaatggttgatgcagagaagaggctgttaggaaatgcattggaagatgttgataatcaatttttcgtcttgctttctgacagctgtgttccactacatacatttgattacatatataattatctgatgggaaccaatgtcagtttcattgattgcttcttcgatcctggcccacatggaactggaaggtatacgatggaaatgcttcctgaaatagaacagagggacttcaggaagggtgcccagtggtttgctataacacgaaggcatgctttattgattctggcagacaacctttactacaataagttcaagctgtactgcaagccagcagaaggacgcaactgtattgctgatgagcattatttgccaaccctcttcaatatggttgaccctggtggaatagctaactggtcagtgactcatgttgattggtccgagggaaaatggcatccaaggtcatatagagctgcagatgttacatatcaactcttaaagaacataacgtctgtcaatgagaatgttcacattacaagtgatgataaaaaagttgtgacacagaccccatgtatgtggaatggaacaaaaagaccctgctatctttttgctagaaagttttacccagaatctttgaacaacctgctgaagctattctccagttacacatcggcttgagttctacatgattcttttggcattttgcctaggagattcctctaggatttatctttttgtgcttcatgtaaattgtggaattgatacttagaggcttaacagagttacagatccagggccttgatgtaattctgagtcccttggtagggctgaggtgatgtttgtttattattgacgctgccctccctgtcattcgtggtgctctctgtatgactatgtttcttttagcccttcacttttttctcttctcttttattcttagattcctagctcccatattctgagtaacaggggttttgtcagttcttactgttattataagattatttttttgtagacacgaagatattatgaaatcagttacactaatagtttaacctggtcttgtgagttacagtgac

SEQ ID NO: 52037 - DNA, 258 bp, Zea mays
  Clone ID: MRT4577_147457C.1
attttaggtcgaccacgcgtccgcccacgcgtccgcatactcacacggaataggcccgctcgagaatctttttaaccacaataacgatcccttccacggcagggtttgtccctacaccaccaacttcgtccccggctagtgagggaagcttcctctgtgatctttaggtgttcggccgcttgtgagcgctcgctggtatttaggatcgaaccatgatgtaaactattgttcaatagacaaggtatcattgcgttcatt

SEQ ID NO: 52038 - DNA, 1830 bp, Zea mays
  Clone ID: MRT4577_147458C.1
ctcgaggccggccgggccgggaacctctctccttcgtccttcctcgccccttctcctccacgactccactaccaccgccttcacttcgtctcccacaaccgccgcgcgcgagccctagcccgatctcgccggcggcagataccagatcccgccgcccgttgcgcgccgggacgcgccccgccggattcaccactcctcgcgctgcagcacgcccgggcctggaaaaagaggcaactctgggggaataacggatttcaccttgtttgcaggttactgcgtgacatgtagtattgtataattggaggttgtcaccatcaccacaaagcatatgttgtgatttgtcgatggcgaggagatgaaacaggtgtaggggcggagcagcaaggacatgacagccatgccgcatccgcgccaccgaggcgctgctaagaagcccatgtggatcatagtgctattgtctttggtttgtgttgcacttatgggggcctatgtctacccaccacggcgctactccgcatgctacttctttgcttcgagtgtctgtactccgttcaaggattggctacctgctgttgctcgggagcgaactgatgaagagatagtttcatcggtggttattagggatcttctttcaatgcctatggctatgtcaaagaacccaaagattgcctttatgttcttgacaccgggttcattgccttttgagaagttgtgggagaaatttttacagggtcatgatggccgatattctatctatatccatgcatctcgtgaaaaacctgtacattctagctctctttttgttgggcgtgaaattcacagtgaaaaggtagtatgggggaggatttcaatggttgatgcagagaagaggctgttaggaaatgcattggaagatgttgataatcaatttttcgtcttgctttctgacagctgtgttccactacatacatttgattacatatataattatctgatgggaaccaatgtcagtttcattgattgcttcttcgatcctggcccacatggaactggaaggtatacgatggaaatgcttcctgaaatagaacagagggacttcaggaagggtgcccagtggtttgctataacacgaaggcatgctttattgattctggcagacaacctttactacaataagttcaagctgtactgcaagccagcagaaggacgcaactgtattgctgatgagcattatttgccaaccctcttcaatatggttgaccctggtggaatagctaactggtcagtgactcatgttgattggtccgagggaaaatggcatccaaggtcatatagagctgcagatgttacatatcaactcttaaagaacataacgtctgtcaatgagaatgttcacattacaagtgatgataaaaaagttgtgacacagaccccatgtatgtggaatggaacaaaaagaccctgctatctttttgctagaaagttttacccagaatctttgaacaacctgctgaagctattctccagttacacatcggcttgagttctacatgattcttttggcattttgcctaggagattcctctaggatttatctttttgtgcttcatgtaaattgtggaattgatacttagaggcttaacagagttacagatccagggccttgatgtaattctgagccccttggtagggctgaggtgatgtttgtttattattgacctgccctccctgtcgttcttggcgccgtctgttagattcctagctcccattccttgagtaacagggtttttgtcagttattactgattcattctttgtacgacatgaagcgatcccgaaatcagttacactt

SEQ ID NO: 52039 - DNA, 839 bp, Zea mays
  Clone ID: MRT4577_147459C.1
cattgggtacctcgaggccggccggattccactagaacactaccaccacctccacctcgtcgtctcccaccaccgccgcgcgcgagccctagccctagcccgatctagccggcggcaggcactagatcccgccgcttgcggcatcccgggacgcgcctcgccgaattcgccgctcctcgcactgcaacacgcccggaccactaaaaaagaggcaactctggggcataacgtacttcaccttgattacatgtcactgcatgccatgtagtattttattattggtggaggttgtcaccacaagacacatgttgtgatttctcgatggcgaggagatgaaacaggtgtgggggcggagcagcaaggacatgacaaccatgccccctccgcgccaccgtggcactgctaagaagcccatgtggatcatagtgctattgtcgttggtttgtgttgcccttatgggggcctatgtctacccaccacggcactactctgcatgctacttctttgcttcgagtgtctgtaccccgttcaaggattggctacctgctgttgttcgggagcgaactgatgaagagatagtgtcatccgtggttattaggaatctcctttcgatgcctatggctgtgtccaagaacccaaagattgcctttatgttcttgacaccaggttcattgccttttgagaagttgtgggaggaatttttacagggtcatgatggtcgatattccatctatatccatgcatctcgtgaaatacctgtacattctagctcccctctttgttggacgtgaaattcgcagtgaaaaggtagtatgggggaggatttcgatggttgatgc

SEQ ID NO: 52040 - DNA, 301 bp, Zea mays
  Clone ID: MRT4577_14745C.1
aataaaagagttcgaccggccccgccccgccccaacaaaccgcccccaccgcagcgcccgcaaagcctccaaacaccaccacctatccgccagaagcctcttcctccctcgcggtcgcgccatctgcgccctgccaataaccgcggtggtgaacctcaccctactgaagaagcactcaccaacacccaagccccctgttccctcgccctctccgcccgcgcaagattgacatcccggattcatacatgtgctaccattccatttgatttggcgccgagcactttcctattgccgcctccat

SEQ ID NO: 52041 - DNA, 380 bp, Zea mays
  Clone ID: MRT4577_147460C.1
tcggctcgagcaaagttttttctccatcagttaaaagaaactgatggacctttaactatgtccttttaggaaacaaaagcttggactattttttcaggcatgactgcgccacaagcagctggagttattcatagcgactttcagaaaggatttattagagttgaaactgtatcctacgatgattttgttgcagctggttctcttggagtagcatgggagaaaggaaaacatttcgaaaacatccggtcaagaagttctggcagcactttcatttcatccttattgcagtgcctccatagtagacaaaattaagttatgtcaatgagtgggatttgggtctttggttggcttggttgcccactcggtaatcaccatgaagc

SEQ ID NO: 52042 - DNA, 320 bp, Zea mays
  Clone ID: MRT4577_147461C.1
tccacatctactcatacctctgttttaaagttcacgcttcaacactcaacaaccgggcgtggtatatatgtaaagggtctacacttacaatctattgcatatttgattattatacataacttttatcatttgatgattccatcttaatctctatatacatctgaaatgtatgcataacccaataacgaacgatttgaaagtgtactcgatcattctaccattagacaataagatcttctttctaaaaatattctattttgaactcttatatgttcaaaatttatattgaaattcttttataaatttttccttactttttc

SEQ ID NO: 52043 - DNA, 562 bp, Zea mays
  Clone ID: MRT4577_147462C.1
cccacgcgttcgtgctccacaaaatgcaagcgcgcacacacacgtagtatgcatcgcggcaatacacacacagacacccacgcgcacgcagcagtacaagcctagactagactagttttaggaccggccgggatgctggactgggcgcccgtggtggtgggcgtcgtgctcttcgtgctcctctcgccgggcctgctcatcgagctccccggcatgcaccgctgggtcgacttcggcagcctccgcgtcaccggcaaggccgccaccgtccacaccatcatcttcttcgtcctcttcctcattgtcaccatggcgtgcaaactccacatctacaccggcgcctagctgatgtatacctcagctcgctacctgtgggcaactagctgagctccccagctaatcttcaccgcacgcaccgtacctgttcgtcgtcgtctatgcgtcaacccgttgttttgtattgtgctctctcgtcatatatatcacacggtcgctcgcccggccatttcatatataggctgtacctgtattcctactttaacaagggtttacttgtatacgc

SEQ ID NO: 52044 - DNA, 787 bp, Zea mays
  Clone ID: MRT4577_147463C.1
ttgggaccctcgaggccggccctgcttatatccctctcagtctctccttcctctcacacactagaacactaccaccacctccacctcgtcgtctcccaccaccgccgcgcgcgagccctagccctagcccgatctagccggcggcaggcactagatcccgccgcttgcggcatcccgggacgcgcctcgccgaattcgccgctcctcgcactgcaacacgcccggaccactgttactgcatgccatgtagtattttattattggtggaggttgtcaccacaagacatatgttgtgatttctcgatggcgaggagatgaaacaggtgtgggggcggagcagcaaggacatgacaaccatgccccctccgcgccaccgtggcgctgctaagaagcccatgtggatcatagtgctattgtcgttggtttgtgttgcccttatgggggcctatgtctacccaccacggcactactctgcatgctacttctttgcttcgagtgtctgtaccccgttcaaggattggctacctgctgttgttcgggagcgaactgatgaagagatagtgtcatctgtggttattaggaatctcctttcgatgcctatggctgtgtcgaagaacccaaagattgcctttatgttcttgacaccaggttcattgccttttgagaagttgtgggaggaatttttacagggtcatgatggtcgatattccatctatatccatgcatctcgtgaaatacctgtacattctagctctctctttggtggacgtgaaattcgcagtgaaaa

SEQ ID NO: 52045 - DNA, 1173 bp, Zea mays
  Clone ID: MRT4577_147464C.1
gggaccctcgaggccggccgggccgggatgcatgcaatgcaacacaggcagccagcccatcgatctatcgcacatttctcaggcccttgctcatcagttcggagatcgagtggaaaccttgtcgagaatggttccagatacagttcgtgtagcagtaggaatcctaggaaatgctgcttccatgctcctctatacaacccctatactgacgttcagatgggtgataaggaagggcaacgtggaggaattctcctgcgtgccatacatcctagcgctgctcaactgcctgctgtacacctggtacggcctcccggtggtgagctccgggtgggagaacctgcccgtggccaccatcaacggcctgggcatcctgctcgaggtcgccttcatcgccatatacctacggttcgcaccggcggagaagaagaggtttgccttgcagctggtgcttcctgccctggcgctgttcggcctgacggcggccttgtcgagcttcgcggcgcacacgcaccgctcgcgcaaggcgttcgtgggcagcgtcgggctggtggcttccgtgtccatgtacacctctccaatggtggccgctaagcgagtcatcgcgacgaagagcgtggagttcatgccgttctccctctcgctcttctccttcctgtccagcgcgctctggatggcgtacgggctgctcggcagggacctcttcatcgcgtcgccaaacttcatcggcgtcccggtgggcgtccttcagctgctgctgtactgcatctacaggagagaccacggggcggcagccggtgcagaggcgcacgcgcatggccctgccgccgccgccgatcaggagaagggcatgaaggcagcggcgccggtggccgtgcagccgcaggaggtagccgccagagtgtcggaatataaatgagataatatgtctctctcttttctgaaatcgaatcagaatcccttgtgcgttgtgtcagtctgtgaagtgaatgtttcgttatctccatctgcggcccaagcccaacaccgaactggactctccaagtcgaatgaaattgaaggcttggctcttgggctgtacggccacatagcagcgacccaactgttgagaactacgtatacggatcagcagatccacttatggcgtgtttggtttatgaagtcactctatacttc

SEQ ID NO: 52046 - DNA, 104 bp, Zea mays
  Clone ID: MRT4577_147465C.1
tctctacccacctcgtgcaattgcaacccctccaccaacgaggagaactcgatcccaatttacagcggcgttgaataagtccgtcggtaattcgagcggggaga

SEQ ID NO: 52047 - DNA, 732 bp, Zea mays
  Clone ID: MRT4577_147466C.1
cgcacaagggattctgattcgatttcagaaaagagagaaacatattatctcatttatattccgacactctggcggctacctcctgcggctgcacggccaccggcgccgctgccttcatgcccttctcctgatcggcggcggcggcggcaggaccatgcgcttgcgcctctgcaccggctgccgccccgtggtctctcctgtagatgcagtacagcagcagctgaaggacgcccaccgggacgccgatgaagtttggcgactgcaccgcaccgaccgggtcaaaactcaaaagcaagcaagcaaacggaatcgacaggaccagacgacccagatggttttgctgctaaccgcgatgaagaggtccctgccgagcagcccgtacgccatccagagcgcgctggacaggaaggagaagagcgagagggagaacggcatgaactccacgctcttcgtcgcgatgactcgcttctgcagtagcgatcgacaggggtcgtcgttgggccccagccagagatttcagtgccagcagatgctgtgaaataaagtgggaaaccagcagggggggaagggggtttgggcgatcgatagatactgacagcggccaccattgggagaggtgtacatggacacggaagccaccagcccgacgctgcccacgaacgccttgcgcgagcggtgcgtgtgcgcccgcgagctcgacaaggccgccgtcaggccgaaagcgccagggca

SEQ ID NO: 52048 - DNA, 148 bp, Zea mays
  unsure (1)..(148): unsure at all n locations
  Clone ID: MRT4577_147467C.1
acgggactggctccggacccganacactgggatcgaaacgcccagcaggggcggatcccaacaaanccaagctggggnccaccacgcacccccccccacaggngccaacagcgggggnagagccaaacaacagggacccagccaccca

SEQ ID NO: 52049 - DNA, 832 bp, Zea mays
  unsure (1)..(832): unsure at all n locations
  Clone ID: MRT4577_147468C.1
gtatgcaatgcaacacaggcagccagcccatcgatctatcgacacatttctcaggcccttgctcatcagttcggagatcgagtggaaaccttgtcgagaatggttccagatacagttcgtgtagcagtaggaatcctaggtgtgtgtagttcaatcacatgtacaactacatgctgttcagatcacatcactatttcttgaattctacgcacacatgcctatctgtctctctctcttgcaggaaatgctgcttccatgctcctctatacaacccctatgtatgtatatatatcctaaattatattaactactactctctcggtctcaaattaaaattcgtattaggtaattaatgaacccacacaatacttgatgtacgtgttttctatatgtgacaagattcattatcattcatttgaatataaacctaaaaatcaagagataatatgaatattattttgagacggatggagtatatatgtatgtatatattcgattctgaactatatatattaatcacctgtacgcacatgctcagactgacgttcagatgggtgataaggaagggcaacgtggaggaattctcctgcgtgccatacatcctagcgctgctcaactgcctgctgtacacctggtacggncctcccggtggtgagctcccgggtgggagaacctgcccgtggccaccatcaacggcctgggcattcctgctcgaggtcgccttcatcgncatatacctacggttcgcacccggcggagaagaaggcagtccaagtcaaagacctagggatcagctagcaatagcatatgcaggctgcttatccattctatg

SEQ ID NO: 52050 - DNA, 240 bp, Zea mays
  Clone ID: MRT4577_147469C.1
gcctttattatctggataatactgtcttgtcacctcagattggggttgtgcactttagatctgaactgtacagtgttgcaaatcaacatgtgtttctgtaaaagcttgtacaatatattattgatatgtctttttctgtgtggtagctgtattgaactttgatattatgaaaactacatttgcatctgttcctgttctctctctctctctctttcctaactatatgccctccacatcggc

SEQ ID NO: 52051 - DNA, 308 bp, Zea mays
  Clone ID: MRT4577_14746C.1
ggggcccaagccaaacctggatttaaaaaaaaaggggtttttggggatagttttaaaaaagggcccccgggggcagggttcgggttgaaaaaccccaatgccccctagggggggataggggggaagatctatcgcccccaaaatggggggggaaacgcctattggagtttccccggtaaccccgttgaaattaaaagggggccaaacaataaaccctggaaagtcaatattctctccccactttttcaggaaatggcccggggcaaaaacttgggcactagtaccccttcggggaccttgcggaacct

SEQ ID NO: 52052 - DNA, 375 bp, Zea mays
  Clone ID: MRT4577_147470C.1
gaatattcagttggccaaagcagtggaacaggacaagctaatgaacctgcttctccatacactccaatattaagtatgatgcaaaatgaagggatgggaactccatctgttcaacaatcagagagctcagggtcaggaccatacaggttcagaacattgactgatttgtttgatgcaactgaacaagtgcatgactttgagtatagcggagtgtgcatgctggcagctgatgaacctgcatgtgtggaacatgctctttcacaggactgttggaaaagagctatggaggttgaactgaagtcagttcaagaaaatcagacctgggagattgctgatctgccaagggatcactaaggctataggactcaaatgggt

SEQ ID NO: 52053 - DNA, 443 bp, Zea mays
  Clone ID: MRT4577_147471C.1
cggctaatggctagacacatcaagaacataacacagaagctctatttcagtttttctgccaaacataaaatcggagaggacggtgcttttattcataggaagattcacatgtcctactacaccagcttgaacaaagcacatagtgacagcatgacgcataaaagccatacttacatcaccaaagatgggcctatctccttagctaacctgtgccagtctaacattgatgatctagccgacgccatcatctattccatccataatgcgaaccatgcttacgtacgaacattaatggtcaacctattgatgatttacatccgaaaactctaggctgctattaatgggttcttgcaactatacatctcttccgacgtgctccatctgatgtaacctggataaataaatattttgtcgctgaactaaaactcctgtgcctttttacc

SEQ ID NO: 52054 - DNA, 270 bp, Zea mays
  unsure (1)..(270): unsure at all n locations
  Clone ID: MRT4577_147472C.1
tttcggttcatggttnggtnnttggggtgtgtgtttcacctncggggccttcttttcggtgaaggttttgtcgcttctggtagagcgtgcatgatctgcccttgctttcggnttgcntgccncttcntgttgtcgaggctgctcagtgctggtggttggggagaaagcctgtgggtgtgtggggcgaggtgtgtgttagtctcaggggtggccgtgctcacgctgtgtttgccgcctgggcattgctcgctttagtttatgctgggctgt

SEQ ID NO: 52055 - DNA, 822 bp, Zea mays
  Clone ID: MRT4577_147473C.1
gccggccgggtccggaattcccaaccccgacaggcgttctctctcctcaagctatgaccttccggccaaatccgcccccttctcccgatcatcgctccttctgcctaccgtctccgcctaccactttcgacatcctctgagagtcccgatgtccatgcacatccatttgtgactgatccagtatcgcctagcgatctggtgttgagatggactgacgcaacgctgacgattcatcgctggaggtgagacgccatcagagctcatcattgggggtaggtgatcatcttcttctgcaccatttgtcaaggatactggcgatgcgaagctcaccccccatgcagtttttgttgatgtttcatcccctgtcatcgaatagagactctgtgcatcccataggcaggtcttcaatacttacaacacttctcgtgtcaacgaaaaaacgcgctaccacttccctctcggtccctacacaattaccatgcagattgctgacctgtgtctcgatccgatatcgaagcttgcatactgtcgcactggtctccagagattcctcgactgacacactcctctcgtaagaacgatactgcgattgattctctcctcctggagcaactgtctgttcaatatgtctatataaaccatttcgacgttacctgcgtctcatcctcacatgtgtcctgatccgtggttgagccatacaacagcgtcctagctcaccactctctcctcgagcacactgatgctgatgtcctgctccacaatgaagtcatctatgacatctgccgccgatcacttgaaattgaccgcccatgctacaccaac

SEQ ID NO: 52056 - DNA, 675 bp, Zea mays
  unsure (1)..(675): unsure at all n locations
  Clone ID: MRT4577_147474C.1
attccgccctcgcacgacctctcgccccctcctcatccttccatccgacgcagcacggggacgccattccccgattctcccgcgccgcgccgttcgccgccccgccgcccccatcctcccgtgtcgtcgccgcccgccgtcctctcctcccgtgtctcctgccgcttgcccccacatcatggtgcgccatgggtgccatccagatcgagcacgggctctgccttcgtcggcggcggcggagttcttctcctccgtcgagcagcggcggcggcatgggacgcagcgggatcggcctgccacagggtcctctcctccgtcgagcagcggcgtccgcgtgggacacagcaggctcggcgcggtgatggatttctcttgtgggtcattcgaaaccgccgatgtgccaacgattcctcatctatgttcctcaatctgtagctgcgagaaactgaaagagccatggttctccctgtacataaagaaatcttctcaatttaatgcttcgaggacgcaaggatctgaatcaacatagtgcagatgccaataacatgcagagatgccaaggctgtcacggctaaatctcattccggtagtgatctgcggtcattaacgacatgtgtcgtacatcaaaggatgtgagattgngagatgntgtcaaagagtatgcccaacaaccat

SEQ ID NO: 52057 - DNA, 376 bp, Zea mays
  Clone ID: MRT4577_147475C.1
aacatgttaagctttcattacaaagctagggttgtgaccgatacttttaaacgtgtgcataccccctagggtgacctttctttaaacattaatataccaccgcgcattgctttgttacagattagtattattctgctccttggagcaaaccaagtttcaaatttgttactagatgctactgtaaaataatactttccatgcattcgtgagaagataaactctatatttgactaccacaatgtctgaataacaatgtacacctttttggctcatatcgcttatacgacccaattgctgcctcctttactcggttccctacccttactatgttccttatctgctcaaactgcattatttttatctcttttgagataaa

SEQ ID NO: 52058 - DNA, 1547 bp, Zea mays
  unsure (1)..(1547): unsure at all n locations
  Clone ID: MRT4577_147476C.1
catagtgtacccctcgaggccgggggggaacacacaaaatagggcgtctggatgatccttgtgttctttgtttcccgtcccgcggtgtgcgcgcgcacgtctgccgtctgccaagaggagtaggcagagatggcttgccctgcgcagtccatgctctccgccagcggctgcatcctcctgaggagcaagcctcgggcttcctcctcccacgtgcgagggggcatcatcggcggtggctgcagcagcaggccgttccagctaacctgcaacgcttcctcttccccgtctcctccctcgccggcgccggcgcaggaagaccccgactgcaacgacgaggagtgcgccccggagaaggaggtcgggagcttgagggccgagtggctggccgaggagaggacccaggtcgtcggcactttccctcccaggaagagagggtggaccggcttagtggagaaggacaccgccggccagaccaacatctattctgtcgagccggtggtgtacgtggccgagagcgccatcagctccggcgcggcgggcatgtcggcggagggtgccgagaacacggccgccatcgccgcggggctcgtcctcatcaccgtcgccgcggcctcgtccatcctcatccaggtgaacaagagccagccgcaggtgccggaagccgcctacaacggcccgccgctcagctattacgtggccaagttccagccggcgcagacccttgaggcccccgccccggcggaggcggtagaggcgcaggatggcgccgccactgtccaggactcggcggctccggaggcgcaggaagctgtcctcatcagctgattcggttttgtggcagcttacagatgaggttgtagtgatgtgcatgatgatggaagagacacatgtataatacattcattgtatgcatgagagagaaagggagaaaggagcatttcggagtcgtattacgtttcgtgtatatttacatatacatgcattcaggtcgcctatgcttattggaattcagacatcacggcactcccacaaaccattcattcagttgtaacaacggggcatgagcagagctatatatatatatatatcgcggtagcagagccattcacaataactgcgtgtaccatgggccatggacctgctctgacaccattgctgctttgataagcacttcagctgccttcaccagccgcgcagtgagttttgttgccccgacgcgcctcagggatgcatcggcgagcatccggcccttctccccactgccgcccagggtgactgcacggaatgcacagtatacggactgagagaccttcttgaagacggtgtcatcggtctggaggcttctaaggaagaccctagtcaatatctcttttctggcgttcatcctttcatgatctgacaagctccttgaggttgacgagtacatcatggcctcaatgattttctcagtactgccacttcggaactgttcaacgtcctcacaaggctgctagacaacttccagatgtntggcactgagaaaatcatggcctcaatattaaaaacgc

SEQ ID NO: 52059 - DNA, 706 bp, Zea mays
  Clone ID: MRT4577_147477C.1
gatgaaaatcgccgctcacatctcatctggcatactatggcggcgcctctcctcggtcggacctcggcttccaccggcggtgcctagatcggcggcgcccggaccttggcctctgtcggcggtgcccggctcccctcggcatccaccgacgccggccgactcactatctccctccccccgttgatgcccgacatcaatggcggagcaccatcctgatctcatcatatgccggaagcagcctggcatcgtgattggtcgcgtgtgcgagaaatgtgatggcaagtgtgtcgtctgcgacgagtgcaattatggttcgttccagggaaggtgtgtgatatgtggaggagtcggcatctcggacgcttactactacaagaagtatggttttaagaagagatgatcgagatgatttgggctgtgtgtggttctctttggctgtgtgttctgttctatcgcactgaatactgagagtaggcagctgaggcagcagctttgtattcctattatggtttgatagttgttaccgttgtgaaaatgtagctccgatatgttttttaataactagttctaattgtagggtgcaagagactgcatatgtaatctgtgcttgatggtaatggctatgaatgaacttgaaacgttggcatgatatttgtcatcacatgacatgttactgctcaaagaatctagttgtcatttagaacgg

SEQ ID NO: 52060 - DNA, 846 bp, Zea mays
  unsure (1)..(846): unsure at all n locations
  Clone ID: MRT4577_147478C.1
taccggtccggcttcccggggtctggnagatccttgtgttctttgtttcccgtcccgcggtgtgcgcgcgcacgtctgccgtctgccaagaggagtaggcagagatggcttgccctgcgcagtccatgctctccgccagcggctgcatcctcctgaggagcaagcctcgggcttcctcctcccacgtgcgagggggcatcatcggcggtggctgcagcagcaggccgttccagctaacctgcaacgcttcctcttccccgtctcctccctcgccggcgccggcgcaggaagaccccgactgcaacgacgaggagtgcgccccggagaaggaggtcgggagcttgagggccgagtggctggccgaggagaggacccaggtcgtcggcactttccctcccaggaagagagggtggaccggcttagtggagaaggacaccgccggccagaccaacatctattctgtcgaggtgataatactcgcgctcttcctacattcaaacgctctagctagccttcgatgccttgcgtacagattttgcgaccactggtgtcccgccgtgtccgacgacctctagcggtctgactccctgcgtgcttataatgcaccagccggtggtgtacgtggccgagagcgccatcagctcccggcgcggcgggcatgtccggcggagggtgccgagaacacggccgnccatcgccngcggggctcgtcctcatcaccgtcgccgcggccttgtccatcctcatccaggtgaacaagagccagccgcaggtgccggaagccgcctacaacggnccgccgttcagctattacgtggccaagttccagccggcgccagacccttg

SEQ ID NO: 52061 - DNA, 1910 bp, Zea mays
  Clone ID: MRT4577_147479C.1
attctttcaagcaaaagagaagaggagttccattgcaactacagttgcaaatgtagcatctccttcagttacatgttattcaggacagtctaatgattctgatactggggagaattgtaacatggatgctgaaaaggcaagtcgagttgtccaatctctttttggagcattgtcttcacgatatgaaaatagcaaaggtggcaagctgatgagtaacgcagcaccagaaaaaatgcctactgagaatgagcaaatagtcaatgagatactacatgatatacatggttcttttgctgacatctctgatggtgctggtaccgttgaaggtgacttcaaggtaaaagtcaaggaaacaatggagaaggctttctgggatgtggttgctgattcaatgagaggagacatgccagactactgttatctggtcagcctggtaaaggaaatcagggaagcactggaagagttatctcctacagggtggaaagaagaaatcagtgacaatattaaccttgaaatattgacccagttacttgaatcaggttcccaggacagacaataccttggacaaattttgcagtactctctggataagctgcgaaaactgtcttctcctgtgaaggaacacgagatgaagaagagtcatgatacattgttgggagaattggtcgaagactctaaatccaattataaagatccaaattcatttgttctttgcgttatcaagggtttgcgcttcactatggaggaattacaggctctaaaaacagaagttactagagcacgcatccaactattggaaccattgattaagggatcaggtggagtggagtacctgcagaagtcttttgctggtcgctgtggttccccttctgatgcgttagcttctctcccttcaactgcccggtggattttctctttgaaagatgtcgtggaagaacaatggaatgaacatgtcagctcgttatcaattctgccagaagcagaccatgttcagacacttgttgccaccctccgaactggccatgcagttgcaggtgtacaatctgtgatacctgcagcagacaatacaggattaccagagtgtaggggagaaatacttggcaagctaataaggattgggctattacagctcatcagcagcatggagggtgtagaaagggaatcggttcctgagacctttatgttgaattggttgaggctgcggtctgttcagagtaagtttcaacaagtgattgtgatagcgacaagcatgcttgttttgcatcaggtgttagcgagtgagaacccaaagatcacttcttctgagctggagaatgccacttcggaactgttcaacgtcctcacaaggctgctagacaactttccagatgttggcactgagaaaatcattgaggccatgatgtactcgtcaacctcaaggagcttgtcagatcatgaaaggatgaacgccagaaaagagatattgactagggtcttccttagcctccagaccgatgacaccacacactctctgcttttgctgtcctgtgctggcgtaaacaatctacggctgcgcaacgagggaggcacgccaagtccagggcggaaagaggagcagcagtacctccttctccggggcgcactcctcgtcgttgcagtcggggtcttcctgcgccggcgccggcgagggaggagacggggaagagaaagcgttgcaggttagctggaacggcctgctgctgcagccaccgccgatgatgccccctcgcacgtgggaggagaaagcccgaggtttgcccctcaggagaatgcagccgctgccgaagagcatggattgcgcagggcaagccatctctgcttactcttcttgccagaggcaagaggggggggggaccccgccggaccggaaaccaaggacaccagggatcatc

SEQ ID NO: 52062 - DNA, 260 bp, Zea mays
  Clone ID: MRT4577_14747C.1
atatctttatctaccaccctggggggatttttttattttttgggatcccccaacaaaaaaaacataccctaaacatcacaaacaagtcaccaactagcaaccgtaactaataaaagcccgaccatactaacaaacacgcctaaaatctccctgtaatttgactctaaaggctagtaaacctgaaaaaccaatccaagctcacacttacatcttctaccacaccgacaaaaaaaaaacaaaaaaaaaaagtctagcaccaa

SEQ ID NO: 52063 - DNA, 445 bp, Zea mays
  Clone ID: MRT4577_147480C.1
cttacagatcgttctgctgggcacgggcaagttggttgaatggcagctattgttgcatttgtaatagggtgccagtcgttaggtgtcaacgttgctggtagtaacggcgactactgtggttgagtcaataaggtaacagggcttacaccagctagctgtctgaatggtagtagttgttgctgctgtaaataagcaggagagttcaatgctgacagttggttgaatggaagaaatttctttgggtagacagaagataactggttgaacagttgttttttttgttgcaaataaaaagtttagtttaatgcaaattggtggttgaatggaataaactgttgttgctgagagtacgacatatggtttgttagcacactttgtggtgtgagacgtgctctcttgttttgagaccctcaatgttcgacaggtgtatcatgtaatagggctt

SEQ ID NO: 52064 - DNA, 623 bp, Zea mays
  Clone ID: MRT4577_147481C.1
ccggccggggccgtcgtggccaagcaaacgagggagaaggggttggccgccgcaccttcaattcggctatggcattgttcgggctcaggtggtggcatggcggggcttcgcatgatcgcgaggatcatgcccaaggcctcttcatggggagcatggctcgaggaatggtgaattcctcaccagaggtaggacaccgctgtgaacccatcgttcaccgtggacaacacactgctcggcacaatcaccgcggtgaggtcacgagcatctgaaaaccaagttggtacctgggatctcgagtctaaggcaagcgaaacaaggacatccatccacaggaagatgaccgggggtatcactagactagcatccatggagttcagcatcatatcttcatctgcaagcttctgatcaaaattaagcaagggtcaagaacatgtaccataggatgaggcacatgaaggatgctgcgatgagttcgtgagtggtctaggtcgtcgtctcccagtcaactttggttgctcgatcattatcttcatatgatgtaattatttatctattttgtacagaactctgttatgtattaatgatgtgacattcgttacaaaaaaaaaaaaaaaaaagcggcc

SEQ ID NO: 52065 - DNA, 262 bp, Zea mays
  unsure (1)..(262): unsure at all n locations
  Clone ID: MRT4577_147482C.1
tcttcttctgtaaacagtgaatcagaaatcanatacgctggtataggaactagagaagtggatcatggaagatgctgctgctaaaaatgaatttggatactatccatcatttgtgcctgccggattgagggcaaattaattaagtacttatatttgtaaaaaaaaaaaaaaaaaaaaaaaaaaaaaaaaaaaaaaaaaaaaaaaaaaaaaaaaaaaaaaaaaaaaaaaaaaaaaaaaaaaaaagggggcggcccgttttaag

SEQ ID NO: 52066 - DNA, 173 bp, Zea mays
  Clone ID: MRT4577_147483C.1
gtggaacacgccaagcgtacgtaaaataccaagcacacgtttctctttcaatcaccgaaacggatactaacgacgggggggagtgataagacaaaagcggacactaatcagaccctctcaccgacgagggagccatccaccctataaaataatgtcaatgcggatgctgctat

SEQ ID NO: 52067 - DNA, 197 bp, Zea mays
  unsure (1)..(197): unsure at all n locations
  Clone ID: MRT4577_147485C.1
tttttcaaacaacaaacttatnctggatttgtcatagnncnggggagcacccacagggaacactaccggtccattacccaaccaacacttacactaacatttttattctttttcaaccctccatatggagtaggccaccaatacaactcatagcacatttcacatcctttaacttacctataactttactgaccacc

SEQ ID NO: 52068 - DNA, 698 bp, Zea mays
  unsure (1)..(698): unsure at all n locations
  Clone ID: MRT4577_147486C.1
agccggcggactgcgcgatgagccgtncgctggaggaagaggagnaggaaaaggaggacccgctcacctccctcagcctctcgcttccaggcacggaccagcggttccaccacgaccgcgcccacagccagttccaggagctcccggcgtcgccgccctcgccctccccgcctccgccgccggttctctcggcgtacccgttcagccccgtgttcatggaggcgatgcaggagctgatccgcacggaggtgcagcggtacatggcgagcgtgggcgtgcgcgccgggtgcggcgccgccggcggggccgacctctgcatgccgcaactggtcgacggcgtcatgcgcgccgccgccgagcgggtcggccggatgcagtagcagtagctcctgccatcaaatgctcccgaaccgtcaatcgatcttctaggacgaacgcgcagcagctgttgttatcagtagcaaacttccaagttattattttcctttttttaaaactttattctctcgaaccgctgtgaaaccgaaacagcagtgaaaagagtcagcaactgaaaaaaaatgtgggaactgaaaggtggaggaaaatgtagtaaaggcttggctgaaagccgtgtaaagcgctgcctgcctcctctctctctttgtacaggaaaggatcggatcggaacggaatgaatcgagaagaggggacggcgc

SEQ ID NO: 52069 - DNA, 261 bp, Zea mays
  Clone ID: MRT4577_147487C.1
gcattagattttatacaccgaatgactatcgttactaacacgtgttttacagcgccagcatccctcgtaacattacatgaatgcaaaggggcgttccacattctgggccaataaaaaacgccaacattatgcccaaaaaacttaaagaaatctgaattccgggggtttgaaatatctccatcccatatgcacagaggtcaaatgcactgaaaaaaaaagagtactgcattacaggagttaattttacagatggagatttct

SEQ ID NO: 52070 - DNA, 1512 bp, Zea mays
  Clone ID: MRT4577_147488C.1
cacacagcgcgcagagagagggagagagagagagagggtttgtcctcctgcctgccttggctagcttggcctcccctccacctccatcggggcattacatccgagggcactccattcatggcgtgcagtaacccctccactagtcgaatccatgccattatttccacgccccaatcgctgcctccgaagccttttctttttgtgactggtccggaccgggtcccctcaccggaccccttttcgtggctcttacgaagaggtctgatgggtgcccatctcacgttgagcgttgaccggctgcttagaaagtcgacgctagaggcggcgatcggcggtgggacggacatggtcgatctgcgtcaggaggaggtggacgtcgagtactgccattacgggctaggcggcggctcggcgaaacaggtggtggagtgcaggatttgccaggaagaggactggcaaacaagcatccttccaacctcccatcttagagggaatcccagctcctgacttcagatgtgagatgcaaggatgaatggtgagtcacgcggggggatgttagaaaaatgtgaatatcatgacagggtaagttagactgatgccaatcggttgtatgactatggaagagtatgtagtggccctgctacgtgcacagagaagagagtacaggagctgaatgatgcccagataagaacattgatccccagggtgcgtgatattatggataattaagatgactactttcctatcaggacaagaagcagcaccttgtgttgccggacaattgccataattttcatgtcactcctggtccttcgccacactcttcctcttgtgattggtgacaatggggagtactcattggccttattctcgcttctggtgctgagaactgcgggaatcctctttccaatcctggtgatggtgagagcattggcaagcttccatcatcgacggcggcagcagatcatttaacactgcaggaaagccaggaagcatatatatcttcatcagagagcgaggaggaagaggaagagtatacagttgccaattctgcacaaacaaactactcgcaaccgcgcttcataccagtctactgacatggccaagaacaagccttccaacctcacatctgacagggaattccagcgcctgagtttagctgacagatgcaaggatgaatggatgatcacaaggggggaaattacaaaattgtgaatgtggtgacatagtaagatagcctgaagccactcgcttctatgcccatagagaagaatgtagtggccctgctacttgtacataggagagagtacagcagcagagtgctgacaaacccggatactgtgactcgagtctctactgcagtaacccttgtgcactgctctccccgtctcaaattatttgttatgaccttacgtagtttttgttatgcatctagatatcaactatatctagatacatcacaaaaatatttacctaagaaagttaaataatttataatttgaatttaaggtc

SEQ ID NO: 52071 - DNA, 597 bp, Zea mays
  unsure (1)..(597): unsure at all n locations
  Clone ID: MRT4577_147489C.1
ttcttttttttttttttttgcttcaactgttagcattttactgattctatgtcgttccaatagggcgcccttgcgggcgcctcatgttctagtatatatacatgaccaaacaaacgacccgactggtgagtggtaagcactatgccttattcatatatagcaatcagaaactatacgagaaaggaacagatagatgagccacaaacatctatttcacacagtcattctaaagcaaagatcggtttccagagaaccatttctcacgcgacaaggcaaaacctccctgaaacctaaacaccggataagtattcggtgcaccgcggcaccgagcaggtttacttccgcgacatgctgccgagcaggtttacttccgcgacatgcagattacagcgacatcgtgaaatcatcttaagagctgtccatcaggttctccattgaagttgggtttaccctgccatcactattgttatctcgagggttagcttctgctttcctctcaactccaaaagtgaaattggcggngcgatcattttgggttgaatcgctcgaatatggatggcattggtcgtnttggttgaacaaacagcgtttgcatgt

SEQ ID NO: 52072 - DNA, 428 bp, Zea mays
  Clone ID: MRT4577_14748C.1
acatacgcggcatagcaaatcacctccattcctattccaccctccttccaccggtactcaactcgctaccatacaacatcccttcccgctcccaacaatcccaaccatacaaacacacacacactaaaccactgtcgccctctctatcatcataatctctaaccactacaaccaccaactccccgctcactcctcacctcctttcccctaccatgctcatccatcctacccttcccctaactcccattaccactctacctctgaactaactcatatcaatacgaatacccaccgctactctcactcagagcactctctcacctactttctctactccaccaacttgaaccactcgttctttcccccatccctcatcttccacctagccaacaagctatgctcatccactctcctcttcacactcctct

SEQ ID NO: 52073 - DNA, 129 bp, Zea mays
  Clone ID: MRT4577_147490C.1
aacaggctccggaggcacgcaggttcacggacctagctcccacgtagtggctcaccaactaggcgcagggctgggagccctccaagtgatgggagcaacgatggggatggcagggggaggcctaatgac

SEQ ID NO: 52074 - DNA, 1694 bp, Zea mays
  Clone ID: MRT4577_147491C.1
agaatccgtgtcaaagcctcaaagcgtggaaagctatccgtacgattggataacgaggcggtcccacctcccacggacatccccgtccccaccgatttgtttgtcatcactcgtcactcatacactcgatcagctattcttctcttctcctggacaactcaagctcaaaacccaaaatcgaccttgtcgacccggatccgagctaggcacccgcacgaccacccgcctcctgccggtcaccgggacctagcatcgccgggcggcggcgggggaggggaaggtaggcgatgaggaaacgtgagcgggagaatccgtgcgggatctgcgggcactaccacaagtacgaggagggggaggtatgcggggtgtgcggccaccgctggaaaccgtcggacggggagggcgccccgtcgaggcacgagtccgccttccccacagaggtgctcaaggacttcctcttcctcgggagctacgacaacgcctcacgctccgaggtcctcagaacgctcagtatctcccacatccttaatactgtgcctgattgccacaatctgtacaagaattcattcacatatcacagtcttcaacgggacaggcctttggattttgatgaggcaaaccaatatctagagaaatgtgaaagagataaatcgcgtgttcttgttcattgcatgactggaaaaaacaggtctgctgctattgttgcagccttcttgatgaagtctagagggtggagacttgcacaatcttttcaatgggtgaaagatcgaagaccacaggttcaactgacagatgcttctcagaaggagcttttggagtatgagctgaagcttttcggacccagtactcaaaccttggttcccactgaatcatttgcttctcttggatttggttatacaaaaccagcaggtgacatgcaaacgcctgtgttcaaccaaacgaccatgccatccatattcgagcgattcaacccaaatgatcgccccgccaatttcacttttggagttgagaggaaagcagaagctaaccctcgagataacaatagtgatggcagggtaaacccaacttcaacggagaacctgatggacagctcttaagatgatttcacgatgtcgctgttgaatctccttgttccagaagtaaacccgctgtaatctgcatgtcgcggaagtaaacctactgctcggtgcctcggtgcaccgaatacttatccggtgtctaggtttcagggaggttttgccttgtcgcatgagaaatggttctctggaaaccgatctttgctttagaatgactgtatgaaatagatgtttgtggctcatctatctgttcctttctcgtatagtttctgattgctaatatgaataaggcatagtgcttactgcttaccagtcgggtcgtttatttggtcatgtatatatgtagtcgtccgtaaaaggagagagatggagagatttttcaggtcggcagctggtggtgacgtgatgagttttagatctttagtccaatgcaacaggagattaagaatctagattatcgcctttttagttcgaaggtttgagaattaatgacagattgataaggtaaacagttatttatttatttatttatttatttattttaagtttgtgaacccaactgagtcaattttagagacctttagtcaggtgcatttcaaaaaaaaaaaaaaaaagcgg

SEQ ID NO: 52075 - DNA, 619 bp, Zea mays
  Clone ID: MRT4577_147492C.1
gtgttcaaccaaacgaccatgccatccatattcgagcgattcaacccaaatgatcgccccgccaatttcacttttggagttgagaggaaagcagaagctaaccctcgagataacaatagtgatggcagggtaaacccaacttcaatggagaacctgatggacagctcttaagatgatttcacgatgtcgctgtaatctgcatgtcgcggaagtaaacctgctcggtgccgcggtgcaccgaatacttatccggtgtttaggtttcagggaggttttgccttgtcgcgtgagaaatggttctctggaaaccgatctttgctttagaatgactgtgtgaaatagatgtttgtggctcacaaaaaaaaaaaaaaaaaaaaaaaaaaaaaaaaaaaaaaaaaaagggtgggcgatctaagatgatccaacccttcctaccgcacgcatgcacacccaatatatctttatatatattgcccttcactacatttaattggctcgaccttttacaaccgcgcggactgggtaaaacactccactttaatcaccttaattaacatccatctaatacccatttctttagctggcttaatatccaaaaggaccgcactgaccgaccttc

SEQ ID NO: 52076 - DNA, 362 bp, Zea mays
  Clone ID: MRT4577_147493C.1
gatcttggatcacattcccagagcacgcggacacccgacagcgaggaaaaagagagccacggagcgcgaccaggcagacgagatcgcgtgtcacaccaaggctgactttgacgcccacatgaccaaggccctactaactcggcaagctggcgggcattgacttcactgtcgcctggagcgcgccctggcgtctcactcgcccactgttcggcgaacacccaggaagatcactcatgtcgcgtccctgaaggcgcacgagcacaaagcgcaggaagtaaccgtgctatacgagggcgaggctatggcgaccttgcacttcgtgaagaacgggaagacgggcgtgaccatcgtggccgccagga

SEQ ID NO: 52077 - DNA, 242 bp, Zea mays
  Clone ID: MRT4577_147494C.1
tcatcctctcataataactaatatttatctttctccccaaaatactccactcggtgtgggagctctttaccaccacgctgccacccaaatatccattttacattactactccatcactatcattgacacctttctattcattcttacactttattttttttccttccaccttaattaccatccctatctctcttacctcctccatttcctctccaattactccaacacttttaactttacca

SEQ ID NO: 52078 - DNA, 262 bp, Zea mays
  Clone ID: MRT4577_147495C.1
atagtgagtcgtattaaaatgttcctcgcgccctcctcacgggcggtctccgtctgttctgtccaggcagcgcctcggtcgtctcccggccagatgcgtctcctgcagggttggggtgcgagtggcggcgcaggatgatgggtgggttcctctccacggtcggcctgctggccttgtggcgatgcctatcgtgcctatgcatgctacgggaccgttgaacgcgaggagcgcgcagagtgagcagctcagattgtggggtcag

SEQ ID NO: 52079 - DNA, 417 bp, Zea mays
  Clone ID: MRT4577_147496C.1
tcccactcgtccggtttctacagaggaagcagtatatttgacaaaaggtgctcgacatgggcatttactagttagaaaggatcaactacctgcttccaaagctatgcacgacaggttgataattgcgaatgtttcatagttctaaacgaccttaacatatcaccatactgcattacacttgccttttatgataatgacaatgtctacagtcagacttttgacgctgatcttattagctgcgacacgtgcatgacctaatctgcaacaaaggatgccttacaccttcgcatccgagttcaccccttccatgtgcttcgtatcaacaagatgctttcgtgtgctggtgctgattagctccatactggaatgatgggtgcctttggcaagccttatggcacctgttcttaggttgacatt

SEQ ID NO: 52080 - DNA, 1887 bp, Zea mays
  Clone ID: MRT4577_147497C.1
ccggccgggagcagagtccactgtccacggccaaaggcgagagagagtccacggccaaaggcgagagagagagagagagagcacgggatgggttgaggaacgagatggagggagaaagtgggcagcctgctggatcttggcatctcgccgccgccgctcacttccgctccacctgtttggtgcagtgtgggctagttatctactagacttgccactggtgcagattccgttgatcccacatctgaaaagcaggggagtcgacgaccctcatggttttgaggataatatattgcatctctgcactgttctaagcgtgaggaagtaaagcattatttattggttggagtagtttctgttgctatccggcaccaatggcgactttggttcgtcatgattcaaggcagtactcttggtggtgggttagccatatcagccccaagaactcgaaatggctccaggaaaatctcagcgacatggacacaaaggttaaagcaatgatcaaacttatcaatgaagatgctgattcttttgcaaggagagcagagatgtactacaagaaacgtccagagctaatgaaatttgtggaggaattctatcgagcataccgtgcgctggcagaaagatacgatcaggccactggggcacttcgtcaggctcacagaacaatttctgaagcatttccaaatcaaatgccgtcaatgtcagacgagtcaccctcttctttcagccaagagatggagcctcatactccagatatgtctacttttacacgtgcggcatttgattctgatgatcttcagaaggatggagttggtatgtcaccacagcgtttcacctccaagagaaatggtacacaccctgaggaaacaagtgcattgtcaagtagaaaaggtctaaagctgttcaatgatttgtcatcgagtagtgaaaatgctcctcgtgctggttttgatgggaaagtacggaaaggcctaacctttgaaagcccagaagttaaagggaaagatggtatcagcaatgagatggcaaatttgcagcaagaagttgcaagactattatccgagagccagaatctgaaacagcagatgctgtcagaatccgagcgggcaaacaaagctgaaaatgagatgcaaatgctcaaggcaacagtattgcaattaagtgctgataaagacacatcacttacgcaatataatcattcctctgagcgaatatctacgttggagtccgagctcttgaaggcgcaggctgacctcaagaagttaactgatgaaatggctgcagatgtccagaagctaattaatgctgaaacactcaatattgctatactgtctgaggctgagggtttggatcagaagatgaagatgcaacaacaagaactagaacaaaagcttaaggaattggagagtttccgctcaagcttccaggaggagcatgaaaagcgtatgcaggctgaaagtgctctactttcccaggggaaggaacttgctcaatctcatgaagaagtacagaggttgactatagaaataaagatggcgaatgaaaagttgaatgagctcaagcagaccaaggaggaccttcatgacactgtttgtgagctgaagagggatgttgagcgccttacagaacaaaaccagtcatctgaggtgcttatacgggaacttggtgacgagataaatacactcaaggattcaaaaaatgaactccaaagtgaaataaaaagccttaagagcaccatttcacagctaaacactgagaagaatgcagctgcgcttcaacaccagcagtctgtggagcaggtttcggtaatcgaatctcagctgtcaaagctacagtcagagctagatgagactgagcagaaagtacagttgctgacacaagatcttg

SEQ ID NO: 52081 - DNA, 541 bp, Zea mays
  Clone ID: MRT4577_147498C.1
cgaaaggcttgcgccctttgggcaaaactaagatccaaagatgggatttgggcccattgaacaatcggacaggggatcccttcccacccgattgggattccctttcacacccaaaaacgggtagcccgaggggcttcagaccccaaacaactggtggcccttgccccaccgaccgacccgcacaggggtcaagggacccgtgaccacccccgaacggaaaggggcggggcgccccccctccgggcccccaaaggggaccaaggcgtgcggaggccccccatcctactgtggcggcggccccgcggcggaggtgaccggggggaaaaagaaatcgggataggcgtccggcggagtccaagagggcttgaggggggagcgccagaccgagcccgctttcaacttgaggaagtcggcgagatccaaccccttgacgggggcatcaaatccaccaaggctaacctgggtggtcaccaagtcgcccgcccgcggggccccggaggaggctgccgccccccggagcgatcccatgggtgggcggttg

SEQ ID NO: 52082 - DNA, 432 bp, Zea mays
  Clone ID: MRT4577_147499C.1
gagagagagagagcacgggatgggttgaggaacgagatggagggagaaagtgggcagcctgctggatcttggcatctcgccgccgccgctcacttccgctccacctgtttggtgcagtgtgggctagttatctactagtagtaccttcggccttcgggccagttcaagacttgccactggtgcagattccgttgatcccacatctgaaaagcaggggagtcgacgaccctcatggttttgaggataatatattgcatctctgcactgttctaagcgtgaggaagtaaagcattatttattggttggagtagtttctgttgctatccggcaccaatggcgactttggttcgtcatgattcaaggcagtactcttggtggtgggttagccatatcagccccaagaactcgaaatggctccaggaaaatctcagc

SEQ ID NO: 52083 - DNA, 511 bp, Zea mays
  Clone ID: MRT4577_14749C.1
cttactttcattaattgcgtaacttttcccttgctgtcaggctctggaccgccatgcttgcgtctgccgcgggacgtccacgccgccatcgtccgtgagcagctccgacagcctcatcgccgcgttgcacctgctcttgtgtcgcaggctcgggttaccgtcggtgctcacgccgaggaaggcatgatccatgcggagcagcccaaggcgcgatgccacctccgctgtcacgcatgatgagctgcttcgcctctggcaccgccttgttccttcgcgatctcacattggtactgatcgcttcgcactgctcttgattgattttcttttagacttttatttagctctgtggaatatttttttgctttggcaaaattgagatgctaacttttagaatacttccaataatctcaattaatgttgacttgccccttgtcaaaccaggacggtggatgaacttgggcttccaagatccgtaatacaaggtaaaatgagtccctttgtgacctcttct

SEQ ID NO: 52084 - DNA, 297 bp, Zea mays
  Clone ID: MRT4577_1474C.1
aagaaacacatcaagaggcgctacgttttatctacttaacaacactgcgtaccaagatattagtcaatgctgagctgcttgcattgtttgcgagcgcaacacatgcgttcaatattccacagcgctaacttgcgtaaaccgacattttacacacatatacgctcgaccaggcacttcaatgggcgcaacaacacctagattgtgcaatgtctacaggaatacaacaacgggcttgtggtgagcgcattacaacaaccaaaccaccaagtgccacaacaatccttggcatcatgttac

SEQ ID NO: 52085 - DNA, 326 bp, Zea mays
  unsure (1)..(326): unsure at all n locations
  Clone ID: MRT4577_147500C.1
ggcgctcttctatcacattanaaggggcggcgtgtgatatcattatgtgacgaggaatgnngnacacgctcctattgcctgatatgcgctaggcatccatttgaacagattgtgttgttgtagattaaacataccaagttattatgcaagacaagtatggtgcaagtaacagtgcatagtgcacaatggagggtttgcattgccattgtgacctgtgagttagccagttaggagggtgttaatctctagaatgcttcgactgaacaatgtttttgcatgtatcttaccgcctcaatatggctggccaaacatagaacatacattac

SEQ ID NO: 52086 - DNA, 643 bp, Zea mays
  Clone ID: MRT4577_147501C.1
cctgcacacgcaaaactttgcgtgaccgccagcacactcggccaacggtcgggcagctcgtatcatttactgatggacgtcggttgaggcttgctgggcgtctcgcttcaccatgagctcatccacagtttccgtgtcggcggcaacgccgacccagcatcatcctttccagaggaaggtcgacgatgtcaaaccgtccaagacggacatcaactttgtcatcatggactacctcgttagcgaaggctatcctagagctgccgaaaagtttgcaaaagaagcgaacatccagcttcctcttgaagaggagtccatccaatcccgcgtagaaatacgtcgggctattcatgctggtgatatcgacactgctatcaccaagatcaatgatttgaaccctcagattttagacacagacccagcattgcacttcgatctacttaggttacagcttatcgagctcatccgggtgtgcacatcatctgcttcttctgatatcacgcctgcgcttagctttgcttcgtcccagcttgctccccgtgcagccacaaaccctgattttctgagggatcttgagcttacaatgtcgttgcttatatttcttcctgccgcccctggtactctgcagagggagcttagtgagttg

SEQ ID NO: 52087 - DNA, 769 bp, Zea mays
  Clone ID: MRT4577_147502C.1
cctcgaggccggccgggaaaactatctacgctacgcccgcacccagcagcagagtacaatgtccacaggcaaatgcgataaggagaggaagagagagcacgggatgggttgagaaacgagatggagggagaaagtgggcagcctgctggatcttggcatctcgccgccgctcatttccgctccacctgtgtgggctagttatctactagtagtatcttcgggccagttcaagacttagccgctgttctaagcgctgaggaagtaagatatcatttatcggctagagtagtctcagttgctatccggcaccaatggcgactttggtccgtcatgattcaaggcagtactcgtggtggattagccatatcagccccaagaactcgaaatggctccaggaaaatgtcagcgacatggactcaaaggttaaagcaatgatcaaacttatcaatgaagatgctgattcttttgcaaagagagcagagatgtactacaagaaacgtccagagctaatgaatttggtggaggaattctatcgagcgtaccgtgcactggcagaaagatacgatcagtccactggggcacttcgccaggctcacagaacaatttctgaagcatttccaaatcagatgccgtcaatgtcagacgagtcaccctctgctttcagccaagagatggagcctcatactccagatacctctactctcacacctgtgggcatttgattaccatgatctttcgggagaagcagttggagcgtcccccccacttt

SEQ ID NO: 52088 - DNA, 1727 bp, Zea mays
  Clone ID: MRT4577_147503C.1
ctccgcctccctgcctgcataccctgaccggaccccgatcccgccggcgtcgcgcggaatcgcggcggtcaaagcctatacgccaccccacctcacgtcgcgccgcgtcgccgcggtttccgcgtgctagtgctctcgggagctcggatcagaggggcgggctagggttcgccaatcgccagcgtgggtgctgccgtcgggcgccggcggctgagtagtacgaggagagatggacgcgttcctgcacaggctcaagcggctggacgcgtaccccaaggtgaacgaagatttctacaagcggacgctctccggaggcatcgtcacgctcgtcgccgccgtcgttatgctgctcctcttcatctccgagaccaggtcatatttttattcgtcaacagagactaagttagtcgtggacacatcaagaggggaaaggctacgagtaaattttgatattacttttccgagcattccttgcacactcctcagcgttgatacaacggatattagtggagaacagcatcatgacattaggcatgacatcgagaaaagaagattagattcacatggtaatgttattgaagcaagaaaaggaggcattggcggagcaaaggtcgagagaccgttgcaaaaacatggaggaaggcttgacaaaggtgaacaatattgtggtacgtgttatggtgctgaagagtcggatgagcaatgctgtaattcttgcgaagaagtcagggaagcatataagaagaaagggtgggctctaacaaatcctgacctaattgaccagtgtgcaagagaggattttattgatagagttaaaactcagcaagatgaaggttgcaatgtccttggctttttagatgtcagtaaagttgctggaaattttcacttcgccccaggcaaaggattttatgaatcaaacatagatgtgcctgagctgtcattacttgagggtggtttcaacattagccacaaaataaacaaactgtcctttgggacagaattccctggtgttgttaatccacttgatggtgctcagtggacacagccagcttcagatgggacataccagtatttcataaaagttgtccctacaatatacactgatattagaggacgcggtattcattcaaaccagttctcggtaacggaacattttagagatggaaatgttcgtccgaaatcccaacctggagtatttttcttctatgatttctcacctataaaggtgatattcacagaagaaaatagatccctactccactacctgacaaacctttgtgctatagtgggaggtgtgttcaccgtttctggtatcattgactcgttcatataccatggacagaaggcgctcaagaagaaaatggagttaggcaaatacagatgatcaacttggaccttgtactggccccgtcgtttccaaattttgaggcatgtaaggagcttatatgcctgctaaacatgacgagtaccacttaagtcggagactgcaaggccatcaaactgatgttattgcacattagctgatcagataacttgtaaaatgacaaggaatagcctggtctgaggggtgggtggcggtgtgtgtgggtgtgtgctttgatgcctatcattgttgactgttgttgaatgacatgtttgaaggtggataggtcagatcacagaatgtttctcatgaaagtttgttcaaggaaacagcttcactcaaaaaaaaaaaaaaaaaagcggcc

SEQ ID NO: 52089 - DNA, 475 bp, Zea mays
  Clone ID: MRT4577_147504C.1
gtccttgcttctaaacggagtgagtagcgatagtgacgcagtcgtcttgccgccgcgctcccaaacgtccgcgcggtcgtcctcgatcttcccgtaccatcccgacgcgatggccgccggcgcgaagcccgataccgccgcgcccccgcaagcgccttcggcggcgaagggggtcttcatgcgccgcatcttccccttcctcctcgcgacgaacggggtgatcggagttacatttgatgggatttggtgctgttggaccagatccctaatgttcctcggcttcactttgtagattatggaccacgaatattgcgcagctgacactaagtgcatagacgctagatgttgtcacaatcacaaatgttttgcgctggtggtagttttacccaatgattgtgcgattagatcacatcaggttggtcctggtgctttttgcaaagatatttcatttgtcttgtataagtgctggggttgg

SEQ ID NO: 52090 - DNA, 1482 bp, Zea mays
  Clone ID: MRT4577_147505C.1
gaatcctccaagggcaatgggaaaaaagcaacataatcaatcgaatcgttccaggtcttcctgaagagcagcactaccaaatgaacaaagttagagaaatgggtgacaccatgagtgaagctgttccttgaacaaactttcataagaaacattctatgatctgtgatatatccacctccgaactcaaattactccaccgcaccggttcgggccatttcaatgtcagtgaacaatgatggacatcaaagcactccccccagaccaggctattcattgtctttttacatgttatctgatcagctcacgtgcaataacatcagtctgatggccttgcaaattgcaacctcagcaatgtaaatggcatcttgtcgtatttagcaggcatatcccctccttacatgccacaaaacttggaaacgatggggccagtacaaggtcgatgttgatcatctgtatttacctagctccattttcttcttgagtgccttctgtccgtggtatataaacgagtcgatgatacccgagacagtgaacacacctcccactatagcacaaaggtttgtcaggtagtggagtagggatctactttcttctgtgaatatcacctttataggtgagaaatcatagaagaaaaaaactccaggttggggtttcggacgaacatttccatccctaaaatgttccgttaccgagaactggttcgaatgaatattgtgtcctcttatatcagtgtatattgtagggacaacctggacagaaaactcggtaagttctttatgcagcgttaaaccatagaactgaaacattcatgtacgaagaaagactgcacttttatgaaatactggtatgtcccatctgaagctggctgtgtccactgagcactgtgtgttttagagtaagaaaatacatatttatgttaataggagtgcctgaaaaacaattagcgcaattttatgctcactgagtgaaacatatatagttacccatcaagtggattgacaacaccagggaattctgtcccaaaggacagtttgttcattttgtgggtaatattgaaaccaccttcaagtaatgacagctcaggcacatctatgttcgattcataaaaacctttgcctggggcaaagtgaaaatttccagcaactttactgacatctaaaaaaccatggacattgcagccttcatcttgctgagttttaactctctcaacaaaatcctctcttgcgcactggtcaattaggtcaggatttgtcagagcccatcctttcttcttatatgcctcccggacttcttcgcaagaattacaacattgttcatccgactgagctttccaagtaggttgaagcaattcgaagttgagaagtaaagcataacatggataaagaatgttgaaataaaagttacattaaaacaaaattaaccaaaaagggaaaaaaaaggagcacgtacctcctcagcaccataacacgtaccacaatattg

SEQ ID NO: 52091 - DNA, 256 bp, Zea mays
  unsure (1)..(256): unsure at all n locations
  Clone ID: MRT4577_147506C.1
attgtgngattgatttggttaaaagggggggaaaattttccaacagnaggaagggccctaggcaggggaggacgggggtatatactcttcacagagcctgttgtttccgtgcagcgtggggggtgtttggccctaacgataacaattgttatttttcccaaagaacggggggcttttgccacaaacatttaatattggggcccctcaatgaaaaggggaaccaagggcttcaccccggttttctacgaacccccct

SEQ ID NO: 52092 - DNA, 1833 bp, Zea mays
  Clone ID: MRT4577_147507C.1
tctctcgccccacaatgggcacctcgagcggacgacactcgcttcaatattgacaccaccaacgcacgcacgacccttcttcctcctcccggcggcggctaggctaccgctattgatttctccttgcatcgcctttattgcgctcacctgctctgccaagtgccaacgtcgtacacttccagcagtggagggagccggagcacgagctgcccgctggacgagccgtcgccgccacagaaatctacatataattgcagccccaaccacctcgttcctcttccccttcccccctccccagccaaatccgctttcctagctctaatcgccgccgatctcgccggaggaactgctagctagctgctcccttcacttctcaggagtcaggattaaaagttgcctcaagaagaagatccctctgcgccgctgcatgttgagcgagcctaccgtagcgacgagcgcggatatgaattggtgttgtgttcctagggccaagagagaagagaacccttactccaacagcatcggcggcatctactccgagaagaacataaggctcttctcctatgccgagttaagatctgctaccgacaacttcaaccgcaccaacaaagtgggacgaggcggattcgggacagtctataagggaaccatccgaagcgggcgagaggtcgcggtgaaggtcctctccgccgagtccaggcagggcatcagggagttcctgacggagatcgacgtcatcagcaacgtcaagcaccccaacctcgtcgaactcatcggctgctgcgtcgagggaagcaaccggattctggtgtatgagtacctcaagaacagcagccttgaccgtgcgctgctggcttctaacagtgagcctgccgacttcacctggagcgtcaggtctgctatatgcctcggagtcgctcggggccttgcgtacctgcacgaggagatcgcggcgccgatcgtgcacagagacatcaaggccagcaacatactgctcgacaggaactacgtccccaagatcggggatttcggtctggccaagctgtttcctgacaatgtcacccacatcagcacccgcgtcgcgggaacaacaggctaccttgcgcctgagtacgcctggcatggccagctcaccaagaaagcggacatctacagctttggtgtccttgtcctggagatagtgagcggcactagtagctccaggagcatactcatggatgacaagattctcctagagaaggcatgggagctgtacgaagcgaagaggctcaaggaactggtggatccagcccttgtagactgccctgaggaagaagccatcaggtacatcatggtggccctcttctgcctacaggcggccgccgcgcgccggccgacgatgccccaggtcgtcaccatgctgtccaaggccggccgacgatgccccaggtcgtcaccatgctgtccaagcccgtccggatcaacgagagcgagctgacggcgccggggtacctccaggagtacagcaggcggagccccttgtccaaggccaccacttccaccgactccaggttcaagaacctggcgtcccaggaggactccaacatgttcagcacggtggtgccacccacggtgaccgagatgagccccaggtgaagcaaccgccatgtaattttgactaattccttccttgcgttttgtcaaccggcggcgactatatcatgtagtgccaagtgtgttttcctcctgcaaatgcggcaactagatcttgtacatatagattagtgaatccatgccagacccagagcaatgcaagattgatgtttgttgcacaaaaaaaaaaaaaaaaaaaaa

SEQ ID NO: 52093 - DNA, 104 bp, Zea mays
  Clone ID: MRT4577_147508C.1
gggagcggttcttactaaggggcaactctattccacacgccaacccaaacggctttacgctttcattacacgaaatcgcagtttggcagtcaactttctaacca

SEQ ID NO: 52094 - DNA, 407 bp, Zea mays
  Clone ID: MRT4577_147509C.1
atcgatgaaccttccaggctgcatttatagataagaaccggatgtatgaggttaaagtacaacatgaacttggttagtcgtgagaaaggacgcatgcacttatatgtcataatatacacgtaagtccattgctataaacagatcaagcgctttactatcaacaggaacaagatatatgaaagattgactaaaaagacaactattcgaccgcccaaagtaatcaaacgggaagtactggcttatatactaatgacatttgtttggtgggctgatttcatgcacataatttatatgcatccggagaaaagcaccgaaagattataagctcatccaccgatcatactttggagctttataaactagcttacaaacttcacaaaaaacctgcacaacatgcacgggtacgc

SEQ ID NO: 52095 - DNA, 168 bp, Zea mays
  Clone ID: MRT4577_14750C.1
aattcgcagaagtggctacacactttaaaagaaagatagcgtggaagaattttatttggggggaggccaagacatataaaaaggtaccaaccaaatgtaataccctgtatacaattacgtattaatagtttgaatttcaaaaaaacaataacccacatatttcatttc

SEQ ID NO: 52096 - DNA, 794 bp, Zea mays
  Clone ID: MRT4577_147510C.1
aaaaaattcctcctcccggcggcggctaggctaccgctattgatttctccttgcatcgcctttattgcgctcacctgctctgccaagtgccaacgtcgtacacttccagcagtggagggagccggagcacgagctgcccgctggacgagccgtcgccgccacagaaatctacaatataattgcagccccaaccacctcgttcctcttccccttcccccctccccagccaaatccgctttcccagctctaatcgccgccgatctcgccggaggaactgctagctagctgctcccttcatttctcaggagtcaggattaaaagttgcctcaagaagaagatccctctgcgccgctgcatgttgagcgagcctaccgtagcgacgagcgcggatatgaattggtgttgtgttcctagggccaagagagaagagaacccttactccaacagcatcggcggcatctactccgagaagaacataaggctcttctcctatgccgagttaagatctgctaccgacaacttcaaccgcaccaacaaagtgggacgaggcggattcgggacagtttataaggtgccagccaaactcgatcatatctattatattgacggcccgcgcgtcacatggatcatctcttgtttattggcgtttcagggaacatccgaagcgggcgagaagtcgcggtgaaggcctctccgccgagtcccagcagggcatcagggagtccctgacggagatcgacgtcatcagcaacgtcaagcaccccaacctcgtcgaactcatcggctgctgcgtc

SEQ ID NO: 52097 - DNA, 680 bp, Zea mays
  unsure (1)..(680): unsure at all n locations
  Clone ID: MRT4577_147511C.1
gggttacaagaccgcacgctccccctctagtcatctntctcaaacaaaaaccctagccgccgcgccgccccgctccctagtggtgctccctcccccaccactgcagctccgtcccggcggccccaagagttgcggcgaggatgaacgtgaagggcggcagccggattccggtacccccgccgggggccagcgcgctggtcaaggtggccgtgttcggcggcgccgccgtgtacgccgccatgaacagcctctacaacgtcgagggtgggcaccgcgccatcgtcttcaaccgcatccaggggatcaaggacaagattgtaggaggaggtaggaagatgggggaatggcgaggcgatgctggaccatggttgcccacaggccatgtgcaagggaggctggctgcagcgctggaagaagggtcggtgcaaggcggctagggagcaggagattctaaggaacagttctctatttcttgcttgattgatatgagtacatgtcccttcccccatatttgtactctctatgacttgttcctaagcaaacttcactctagcctccctcatgcggtcaacaagggataggctgngcctggcttctctctggacccactctttcgggcctgttcggaccatgacagtgnttttggtgctgtttatctttcanataaatattcttttggt

SEQ ID NO: 52098 - DNA, 785 bp, Zea mays
  Clone ID: MRT4577_147512C.1
gcgcctgagtacgcctggcatggccagctcaccaagaaagcggacatctacagctttggtgtccttgtcctggagatagtgagcggcactagcagctccaggagcatactcatggatgacaagattctcctagagagggcatgggagctgtacgaagcgaagaggctcaaggaactggtggatccagcccttgtagactgccctgacgaagaagccatcaggtacatcatggtggcccttttttgcctacaggcggccgccgcgcgccggccgacgatgccccaggtcgtcaccatgctgtccaagcccgtccggatcaacgagagcgagctgacggcgccggggtacctccaggagtacagcaggcggagccccttgtccaaggccaccacttccaccgactccaggttcaagaacctggcgtccgaggaggactccaacatgttcagcacggtggtgccacccacggtgacagagatgagccccaggtgaagcaaccgccatgtaattttgactaattccttccttgcgttttgtgaaccgccggcgactatatcatgtagtgccaagtgtgttttcctcctgcaaatgcggcaactagatcttgtacatatagattagtgaatccatgccagacccagagcaatgcaagattgctgtttgttgcacagctgacaaaaaaaaaaaaaaaaaaggcccctaaaaaaaaaaaaaaaaaaaaaaaaaaaaaaaaaaaaaaaaaaaaaaaaaaaaaaaaaaaaactcgagggggggggcgtgtaccc

SEQ ID NO: 52099 - DNA, 576 bp, Zea mays
  Clone ID: MRT4577_147513C.1
gtccagtctagttctgtaagttgtcacgtggcgaggatagtttatcgtttgtgaattcaatgtagatatgtttatgcatagtcagatcttttatttatgaacggttatgttgatacctataggttttttttttgaaagttatggaacgcattatcaagctggccaagagctatgtgttgaaacggaagaggatggcataacatcatatattcatatctgcctgtaaccatctgaatttcgacacttggtggattcactaattagaaaataagtctcaaaactaagacaaagctacatgcatcaactgaaacattatataacttaaaaatatctcttccttgctcaccattattggtttactatagttttgtgcacatatatttccctgtattgacgtttacggtgttcggttagtaccagttggctgaaccctcttgtgttcattccagctaggctttattttaggttcggtacggctttatcttggtgttacaaactattgtaatttcatcgctcgcaagaaatgaaatttggttcatctgtggtggaaaatatttctctgtattggctatgaca

SEQ ID NO: 52100 - DNA, 350 bp, Zea mays
  Clone ID: MRT4577_147514C.1
gatactgcagctgtcgagctttatgggtgcttgcagcccagatgctggggggtgttagctatgggcgcgggcataccgcttgtctttggtatgaaaaacctctaatgctttcaggtgttgcgatgtattacattcaagctgcacgtttataacagcaaggccgatgacctgatacgggccacagatcgaactacggcatagagttctcatgacttgctggagcaattgccagcactgcaacaattgttatatctgactgattggctgtcgagcaggaggaggtaggagatacaattatctggtgcaatatgctctagcccaggtgcttgaagaaagctttaaaatttatt

SEQ ID NO: 52101 - DNA, 293 bp, Zea mays
  Clone ID: MRT4577_147515C.1
catgtactctactgatatctaaatattgatttctgccttccttgctaatgcaccattagaagatattagtcttggggcaggatgattttggcctcattactttaccacccccacacctggaaagcatatactatattacaaaatgacattttgccaaaattattaatataagacgctttcagtattagtgatgtcatctgtcactataggtcatacaatccattcttaaagtacctgtcatgtgtgtaaatcattactgtatatgctctccccagggctcagtcctcaagggg

SEQ ID NO: 52102 - DNA, 270 bp, Zea mays
  Clone ID: MRT4577_147516C.1
ggtcccgaatttccggggtcacccaagccttccggaacttaaaggggttggtttggtggcctttggaaaaacctccgttcattctttaaaaaaacctggggcccttgaccttgacccctggacaccctggtccattgctgtcaattccttaaaacttacagttttgttgggaacttctggagtgggaaaacctttcacaaaaaaagtggtggaggccttggtttccttaattgaaaggcctttatttttttaactgccaattccaacctt

SEQ ID NO: 52103 - DNA, 408 bp, Zea mays
  Clone ID: MRT4577_147517C.1
tttttttttttttttttttttttttttttttttttttttacagctgcacccatgatgttgcattggattccagttgttgcagtacactcgccggatgttcaactcaacacacacagtgcaagtccaaaaaaaaaaaaaaagaacaagaaccatgccttattaattgacgacggcagcggacagcggggggcaggcatttgaaagatgacagagaccacgagcgaatgatttatgatcttggtcgtcggatcatcatcacattaaacgacccgggggcaaatggtgaccccctcggcgatggcgagctggcaaacctcgacccggggatcctgaaaaagccggacgttgagttccctgatggcgggggaaaacctgcggtcgaggtccctgagcggcgcgtcgggggga

SEQ ID NO: 52104 - DNA, 451 bp, Zea mays
  Clone ID: MRT4577_147518C.1
gggtccacccacgcgtccgatttttgttaatgttcagtggatcgtccactttttcgtgtcaatagggtaacactacgaacttggttcttgtttcttcttcctaacggtgtgcagttctgatgcataacttttttttttttgctttgttcaggtggccttacccatttctagacttgacattccctggtgcacctgtatggtaaggtcgactagacgaaacaagtgactctatttttgctaaataccatggtctcatgtgtagcttacgcattagtttggctctgtttgtttacttccaggattatataatccagcttagggcctgttcggttagctctaaatccatgtggattgagtgggtttgggtgggttcaaatcccaaacaagtcaaaattgttctcaattttttccaatcccgtccaatccatagctaacgggattaaccgaacaa

SEQ ID NO: 52105 - DNA, 350 bp, Zea mays
  Clone ID: MRT4577_147519C.1
gtgggcactacactaccattagttgtacctactccagagcgcagaaaaacaccgatcgactaccatggagggggactgctagagaccctaactctcctgggtctcgctaggagcgccacctccacccatacaagtgggggatgaggctgctcacccaacgcgtcgacatcatctaccaccgccagggcataggacacctccggttaacctgccacctggcggctacatcagccactcgactgacacctggcaacaccagctcacctaacacctccgggccatgtggccttcacaagatcaactgccgccgccaccataatagtaccctactaccacactcctgcctgagc

SEQ ID NO: 52106 - DNA, 179 bp, Zea mays
  Clone ID: MRT4577_14751C.1
gggccgccgcctcggtgcctcctcgcttcgaagggttcgtgcgaaggcgaccctccagggggggtccttacgcgccgcctcccgggcgtcgcgggcatggagaaagactcggaggagaggggaaagacaaggaaggcagctaaggtcacggagagggaagtgagggaacaatcgaagag

SEQ ID NO: 52107 - DNA, 731 bp, Zea mays
  Clone ID: MRT4577_147520C.1
tggtacgcctgcaggtaccggtccggaattcccgggtcgacccacgcgtccggaagatgtgaaaatgacatattgctgaagatgccgatttccactgtaaaaatgttcacgagctgatggagtgtatgaacacattctgtaaactgtgatttctattgctttcgttggtgtgtaaaacgggatttttttaattgaaatttgtgtttttaaattgtggtttgtttttactgaatcatttcattttcgtgtttgctcgctggatttagtaagaagttgtgtgtgggggcttaggtgaagttaaactgccttttgaacctggtatgacttcaggtttattttactctaaaacccattaacatgagttaagaaaaatgttactttctttggatctctgtttattaaagtgtgacaattcagatggagtgttttctgataagattattcctaatccgtgagttcttaacagttaacaggtggtggccactctgttaatgtgcacaccctgtaagaaagaactatccttggactgttcttaccatgtgaccccctcaagggaaagatggcaaactgatggtcagtagagtgacaggtacacatgacactcgagtgctgggtctggagaagctgcagttagtatttaggataacagtatatataatatatagttctacatttgggcagcacagttgggttcaggctatgaataaaaatcattggagtgaaaccttaag

SEQ ID NO: 52108 - DNA, 400 bp, Zea mays
  Clone ID: MRT4577_147521C.1
gacttgacccttggtgacaatgaggatgatgaaggggaagaagctgtggaaggcaacactcatgctggaatggtggaatgagcctcatgctggaatgattgagagctacagggagaagcatggccagaaaaagctcaatgcgttgtttggcctctagtttcagtttattctaggtttgtaagctatgtttccactgggatcgacagcaccgaattgttggtaggaaccgtgttttttgtcagttttactctattggtagccaaattttcagtttcatttttttttgtgataggcatggtgattgctttcaagtaattatatcgattcttatgtgtgttcttctaattcagtggttactctctagttgaacaaatttaagtcatgtagtaattaagctttt

SEQ ID NO: 52109 - DNA, 430 bp, Zea mays
  Clone ID: MRT4577_147522C.1
agggagaaaaaaaaggcgggggggggctcaaaaagggaaaaagaggccccccccccaacagacaaagagaagataagtttaaaacatagaccacccggacgaggggggcacgaccaaaagtcccacagcagagaagaaagcagggcgccgcacaaggcaagcaacgcccaagaggagccgaggacaaggcgacccgaggacgacggcggcaccggacagcaaagtgcagttaagaaagccgacaccaccgccacaaaagagcaagccaaggacccagagcccgcacggggacacacccggagggagcgccacgacgaggacggacgcgaccagcaagaggaaggcgcccagcaccaggcgcggggcaccgccggcggaagaccccgcccggcgccgcggaccgaccccgccggaacctgagggggccgac

SEQ ID NO: 52110 - DNA, 468 bp, Zea mays
  Clone ID: MRT4577_147523C.1
gttacaaacaaacctgggctataaagattaccaagagcaggtgtgaacagacgagttgtccgaagtaacactgcaatgtctatgcctctaaagtacggggagaacgggcaatgattatgcttggttcacaggggaaagtgcagttgcatgctcaaaatgaatgactaggtaagcactcactcggtttaacattgggaatgaaagcctgctgcattatataatacttacagtattatttatagcgaggacatggaataatcttatcctgttctagagtacttcaaggagcgtaaggaagcgcccacctctcgggcactggcccgacttctatatgacttctgtgggcgtacaccatacaagtatatgagttccggaatacctatgcgtgatcctggtgattaactggtcgctgcaaaacagtggtatctgctgacagccccagacccttactagaattgcggcataagt

SEQ ID NO: 52111 - DNA, 1157 bp, Zea mays
  Clone ID: MRT4577_147524C.1
cctgataattcggcccacgtctcctgatctcctcctctggtccgcatagaggagcagcttgccagccaaggacaccggagcacgggcacgggcgcacggccagcgcgaacctcctcccctcccctcttcttccgtttccaacagcgaggcatagtggagaaggcgaggagcatggcgcgcaaactagagatcccccagtggaagcacgacggccttccgtcgccgacgagcccgctggaccgcgcgtcgccccgtgggtggcgccaccgcgacgccgtcggaggcgtcgggctcgggatcctggcggcgctggaggccgagggcccgctgcccggcgccggcgccgccgccgcgccgcgggtgtccatcccgcggcgcgcggcgcggctggaggtatcggagctcgcgtgcagcgggcggtgcgccaccagtctgtgcggcggcccggtgtccggccgggccggcggcggcggtggagcggcgttccgcgtggcggagttcctctcgtgctgcgacatgtgccgccgggcgctggacgggaaggacgtcttcatgtaccgcggggagcgcgccttctgcagcatggagtgccggtaccacgccatcgtgagcgacgagttccgggaggcggaggaggagaaggagcggaagcgccgcgcggcggccgccgacgtgcccaggaagtcggccgctgagatggtggccggctcgccgtgcagcggcggcgggcagatcttcttcaccaccggcatcgtcgtcgcatgatgggcgcgcggtgcggatccgtcgttccgtctagtctagtgacgaaacaaaaaaaaaatccagctggaggaaccggcggacgctgtaagataaacatgacaaaactaaaaaaaaaggaagcacgagaaataagggtgggtgtgtttgtgtagagaaatgggtgggtgggggaaactttgttcctcctctcctcctctttggtagaggaggcatcatgaggatggtgggcgggatgagatgttttgtagcatagtagcaggagggaaggagagggatgatggcaagttttccaaggattgttgcttcccttttgttttctcatctgtctgctctggcaaaaaggaataacattcttgttcaaatccaaaaaaaaaaaaaaaaaacccgcggcc

SEQ ID NO: 52112 - DNA, 282 bp, Zea mays
  Clone ID: MRT4577_147525C.1
ccacacgcgtccgccaaggaagccggaaggctgttggtaatggacttaattgccgcttggggggggcaatgccgggcaatggcccaattgttggtcgaccaccccaagaagttaattaaggtcgggttcttgaagggggacgtggccaaagggaaggaagtaaccgcggcttacaaggtcgggggaatgccgaccttcaatttggtaaaaaacggaaggacggtcgggaccttcgggggtgccagaaaggacaagttctgggcccaaatcgagaagtatgct

SEQ ID NO: 52113 - DNA, 637 bp, Zea mays
  Clone ID: MRT4577_147526C.1
agttttgaagtgtttttctggagctcctgactggaagaaagcctgtggatcatacattaccaagaggacagcaaagtcttgtgacatgggcaactccacggctttgtgaagataaagttaggcaatgtgttgattcaagacttggagtagaatatcctcctaaatccgttgcaaagtttgcagctgttgctgcactgtgtgtgcaatatgaagctgactttcgacccaacatgagcatcgtggtgaaggcgcttcagcccctgctgaatgcacgtgcatccaacaaccctggatgaatgaatgaatgactgccgttgcttttccctgacgagagtatctgaatcagacaacatgtagcattgaattcagataaatatagtgtttggcttaatacacttggccctagatgttcatcaggagataacctcttgcagtttctggatgttacctagtctttgtatccctaaactgtaacctattgttcggttgcgttccatctggtgttgtttacatccaccatccatgaagtcaagcagcatcctatttgaggaccccgtaaaattcctcattgtagcctccggttcaaaatgatttgttacagtttaagctaatacatggtctggatttctattatggc

SEQ ID NO: 52114 - DNA, 1823 bp, Zea mays
  Clone ID: MRT4577_147527C.1
cattgggtacctcgaggccggccgggagacgcgaagcaaacatgccctcaagcttatgcccacgcgagtgagaagtgagaatctcctaggaaagagaaacaacgaagactcgaaacgagtacaccaacctttctttctctcctctcgcttctgcggcgaattttcttgtcccgtgccggccgccgtgtctaccctgcgccaccgccccttccaacgcctgccgtgaagacaaaaggtcttggttaagtttgaagatgtcgtgcttggcatgctgtggcggcgaagatactcaaagaacacctgataatggaggtccataccctggtggctacccaccaagggatgatgcttatcgcacagctgatccaactccgaggggtgctcaacctttgaaaatgcagccaatcactgtccccactattcctgtagaagaaattagggaggtcacagtggcttttggtgatgaagctttgattggtgaggggtcttttggcagagtatattttggtgtactaaaaaatggtaggagtgcagcgataaaaaagttagattcaagcaagcagccagagcaagagtttttggcacaggtatccatggtgtcaaggcttaagcatggcaatgtcgtagagttgcttggttactgtgttgatggaaacacccgcatccttgcatatgaatttgctactatgggttctcttcacgatatgcttcatggacgcaaaggtgtgaaaggagctcagcctggtccagtcctgtcctggacacaacgagtgaagattgctgttggagcagcaaaaggccttgagtatcttcatgagaaagcgcagcctcatattatacacagggacatcaagtccagtaatgttcttctatttgatgacgacgtatctaaaatagctgattttgatttgtcaaaccaagctccggatatggcagctcgacttcattcgaccagagttcttggaacatttggctatcatgcacctgagtatgcaatgactggacaacttagctctaagagtgacgtttacagttttggagttgttcttctggagctcctgactggaagaaagcctgtggatcatacattaccaagaggacagcaaagtcttgtgacatgggcaactccacggctttgtgaagataaagttaggcaatgcgttgattcaagacttggagtagaatatcctcctaaatccgttgcaaagtttgcagctgttgctgcactgtgtgtgcaatatgaagctgactttcgacccaacatgagcatcgtggtgaaggcgcttcagcccctgctgaatgcacgtgcatccaacaaccctggatgaatgaatgaatgactgccgttgcttttccctgacgagagtatctgaatcagacaacatgtagcattgaattcagataaatatagtgtttggcttaatacacttggccctagatgttcatcaggagataacctcttgcagtttctggatgttacctagtctttgtatccctaatggcatagactaaagggcctgctcgtttctgtcggaattcactaggaatcgttccagctgatcgaacctagtataaattagacaaataattcggctagtaatctctagtaatcgttctgggtgtctattccctaggaaccgaacaggccctaaactgtaacctattgttcggttgcgttccatctggtgttgtttacatccaccatccatgaagtcaagcagcatcctatttgaggaccccgtaaaattcctcattgaagcctccggttcaaaatgatttgttacagtttaagctaatacatggtctggatttctatcatggcc

SEQ ID NO: 52115 - DNA, 497 bp, Zea mays
  Clone ID: MRT4577_147528C.1
aaaaaagggaaagggttttttaaaaactttggggggaaaaggggggggggccaacaaaaattggaaaaaaaacctggggccccttttggaacttttttaagcattcacccaattgggggggcaaaaacacaagaaaaaaggtggggaaaaaataccggtttaaaccccaaactaaaaggcccccaggaaaaaccccaacaaaaaaaagggactttttggtcacttttttttttgccaaccatgctaaaaaaagggggaggcctggaccccccccaaaatgttttttgggaaggcccaaaaaaagaaaaccccaaaattttggcctgggccgggcccaggggggggccccccctctgccccggggggtgaccccagggccttgggcccaaacgggttataaattggggggccaaattgaataaccccctgggtaaaaaaaaaaaggaatccttaaaactttgggggggagccaccaaaattggccttttgggccccgg

SEQ ID NO: 52116 - DNA, 327 bp, Zea mays
  Clone ID: MRT4577_147529C.1
cgatactcggtggacttgcctgctcattatttgatggggcggatgggttagagccctcgatcgggcatgatggctcgagagctagtcctgcgagatcctactaggataagcagcatatgcagatggccaagccagctccgccactctttaccacctcctcagacctcgcgagtcccatggctgtacagactgctgaaagagaggcaagccctgtagattgcatcgatagtagtgaagcttcttctgctgccgagcatgcatgcttgaggctgcatgccattccctgacacacgatcagggcccatgcccgagctgtggctctagggg

SEQ ID NO: 52117 - DNA, 441 bp, Zea mays
  unsure (1)..(441): unsure at all n locations
  Clone ID: MRT4577_14752C.1
ccaggcgnncngcagcncnagnggancagaaggggangnngaggcaanacgngnnanncagagaccaagnncaagccnagggaagggnancgcanagggggggaggcaaaacgagggaagcngcnaanncngnngcacgaaanacgggaangaagaaaagagaccgcgngnngaggcncacccangcaaaaccggnggacgcagcaccaaagaaaacagaagncaagaaaaggagccgcgngccaaaccacaaggaggnnncgacaccaggcagcaaaacaaaagaaggcagngacaaagccaaacgnaaagcancagngcngncgnancaaggcccgagggcgagcaaancnggngnnngngaagaaggggaaagngacccagcaacccagcaaccaagggaagcagaggaaaaactgagaaactggagcaactgctcgc

SEQ ID NO: 52118 - DNA, 343 bp, Zea mays
  Clone ID: MRT4577_147530C.1
cattgggtacctcgaggccggccgagagatcttacgtcttcacactcctcgccatcacataataccagtgctagtacgaagcagcgcaatggtgagcagcaccatggccctctcctcccagccttcccggaaggcagtgaacttgccgtcgtctctcttctgcgaggcccgcgtgactgatgcccaagacggtggcgaatgttaagacggaggccagctccggcagcccgtggtacggtcccgaccgcgtgctctacctgggaccgctgttcggcgtgctcccgagctacctgacggtatatgtcgcgggctactacggttgggacaccgccttgctgccgaa

SEQ ID NO: 52119 - DNA, 371 bp, Zea mays
  unsure (1)..(371): unsure at all n locations
  Clone ID: MRT4577_147531C.1
cttctgtcagaatagaagtcactggagatgatttttgagaagcttcaaaggtgtgtgtttcacatatttatctcaaacacggtcatcgcgcgcacatgcagtatctactttgccttcctcctgctccttgacccacggtcaagggaaatttcttgcagaggtcggatttttatgggatctggccgctcgcgtgtcctgcaatttcttgccatgtaagagtgactggctcattttcctcctcgaatgcatcanggaagcgtgcgggtaatgcttctgtatttcaatctgatccatgcaaaccattgtgatcgatgatgcccttaattccgatttttcagctttatgaaataatcatatatatatatgctcat

SEQ ID NO: 52120 - DNA, 228 bp, Zea mays
  unsure (1)..(228): unsure at all n locations
  Clone ID: MRT4577_147532C.1
cggccggnnaaaaaatacaaaaaaaaaaaaaaaaaaaaaaaaaaacccggcttttcccctttctctacgggtccggggaatcgagaggctcacggcaagaggccatagaggcagacgcatccttttgttgctcgcttggtttctggggtcctggtcaacaatggctccttgctaacttgaatgcttccctcccgaaatggggaaaaaaccttttggggggtttttttt

SEQ ID NO: 52121 - DNA, 315 bp, Zea mays
  Clone ID: MRT4577_147533C.1
gggaggaatggcgggacgaacgccgccgccgaccaatcgaccgcgcacgcgtgcgccgatacatacaaactgtcaactcgcgcgcgcgggatatcataattactcgcgcgtcttgcacaattttcattcgcagtacatgagttaactatggcgcatttattggcacacaagtatttacctaaattactttgactgctatgcatagctatattggctgtctactatcaaccacagcaggccctttcgttcaaccaaccaattgcattgaacgcctgtctttatctacttgcactacttctaccattaaaccaggca

SEQ ID NO: 52122 - DNA, 710 bp, Zea mays
  unsure (1)..(710): unsure at all n locations
  Clone ID: MRT4577_147534C.1
ctcgaggccggccgggccgggattcctattcccacccgtccatccatcctccgaagctcctcggcagacaagcagcagcgagagaaagcaagcaaggcagaggcagttgtgttgctggtcggtccgtccatggcgcccaagagaccagtgtcggcggcggcggcggcggagcagccgaggctgcgcggcgtgcggaagcggccgtggggccggtacgcggcggagatccgcgacccggtgcggaaggcgcgcgtgtggctgggcaccttcgacacgccggagcaggcggcgcgggcgtacgacgccgccgcgcgcaagctccgcgggcccggcgccgccaccaactaccccgccccggagccgacggcggaggcgttggcggaggctccagcggcgagcgggagcgggagcgccgtggtgtacgagtcgtcgtcggcgtcggcgtcggcgtcgtcgtgctccctgccgctggcggccccgtcgctggacctcagcctggcgctgccggctgcggcggcggccgcagagccgtaccagctgttcgcggacccggcggcggcggccgccgtgacgccggcgctgctgcacttcttgccgcccaanagcgaggagcagcagagctactctgggtcatcgtcnctgtcctcgtcgtcggcgtctgtantgttcgacgcggcgccgcccgtgggcctgcggctggacctcaacct

SEQ ID NO: 52123 - DNA, 106 bp, Zea mays
  Clone ID: MRT4577_147535C.1
gcaggcacgcctgcatgagctgggcctgaatatattgccggataggcgcgctttcttttcggcggccgcccgtggtgcaaccttgtccacttgtggtgagaacact

SEQ ID NO: 52124 - DNA, 299 bp, Zea mays
  Clone ID: MRT4577_147536C.1
acagagaacatgtgatatttatgctgatcattataccaaaaccacaaagttattttatggtgaggggctaaaaaatggtacagagggaaacacagactttaaagccggccagggttgtacattggcgaccaaagttaaagttacaaccgccgggatctcagtcggcgcccggtgctgtgattcatgctgcagttggagaacttaaaaatatacagggaagatgccaatggcagcggaactgtcccgcgttcattttgttcaaaaacaaataaccgcctttcttaaaccataaccttatt

SEQ ID NO: 52125 - DNA, 546 bp, Zea mays
  Clone ID: MRT4577_147537C.1
ctagccctagcacgcgagcggagccctttagtttttcttttactgtgaaacggacacagtattcataataacatacactcatactatcgtcctagctaacaatgaagactggctccagctgaaagaatatactctgaagacaagctatgcacactaattctacgttactaagggctgtaattcgccaacattttctgttgcacaggacccataatgacatgtgtatgtggtgatcaacggcacatgtgagggtgtacacctttgctccccactgcgctcatatgcacttctgccctggctgagcagcctatcctactttgaggtgaagataatggcaaaagatgatgacatttggagaaacgggcatggcaataggcccatccctctgcccatggagccgggggttatctagaacccaatgaggatacccatgagagtgaccactaggcaagctacagccgacgtttattaacaccatacgcacttgataccaatgtgctaccgacacgcctgataatgcaggacagaagctgctgactcataccg

SEQ ID NO: 52126 - DNA, 351 bp, Zea mays
  Clone ID: MRT4577_147538C.1
taataattttttttttttttttttttttttttttttatttttttttttgtttttcatatgtttgtttggtcggggcacctgaaacggtacatcggaaaaactccagaaaaaaacaccgaggggatgaaagatgtaaaaaaaaaccaagaacctaaacccccgaatgtacaaaggggacaccaaacaaaaaaagctatgcaggtaaccgcacttttgacacaaacatcttaaacaaaaaaaagaagtggacaaaaaaacaagacataaaaaaaccacaaacaacaggctccatgaccggacggttgaaggcttggagaaaaacaagagaaggatccaagacggacctgacgg

SEQ ID NO: 52127 - DNA, 1643 bp, Zea mays
  unsure (1)..(1643): unsure at all n locations
  Clone ID: MRT4577_147539C.1
gaatggggggggttttcatcangtctaaaancatctctcaggaaaccactgaccctgatttttcttttcacagtctgctggcttctggaggggatataccttttcttagagctttcttttttggattttgcgtcttctgtttcggccttggtaagcaccactcaatggcctctgctatagcttttagacgattgtacgtatacttatcgtgcttaattataagagtttgtgagggatccccaacttttttcatttggagtattggtccagtttagtgtttatagccagctggccatcttgcatggaataacactaccacaacagaattactcatgtaaggtcggattgaggcttcctcttgaaggcacagtgctgccccacccacatcctggcacaagtctttttctgggtactcacctctaagatgagggtctactagctcattgtatctcttcctgtctctcagcatgggcttgacccagttaaccaggatctgttcacttgctggcctggaggtatccactgctcttcttcctgtgataatttcatttagaaaatcccaaaaatgtgggacgtcggtcttgacagttagctggcctgttcttatgtattccggagcgcagtacccatacgttcccatcacccgagtggagatgtgtgtctttccctcaactgggccaagctttgcgagcccaaaatctgagagcttagggttgtacttctcatcgagaaggatgttgggggacttgagatcccggtaaatgacaggtgggttcgccttctcatggaggtattcaagcccttttgcagttccagaagctatcttcatcctgagataccaactcagtggcacttgatcaggagtgctatcaagcaggtgatctgcaagtgagccaagtgccatgtactcataaaccagaagcctttgatctccatctgcacaatagcccaccaaattgactaggtttggatggtgcaataggctgagcatcaggacctcaactaggaactctctgttgccttgatacccattcaggtctagttgcttgacagcaacaagctgtccgttttcaagcctgcccttgtataccctgccgaatcccccttctccgagaaggcagtcagagcggaagtttttcgtggccgtggctagctcacggaacgtgaatgcttttgcggttttggcaacagaacaacttcctttaggaggttcgatgcttgctgctgtttcagatgatggcctgtgcttgtgcttcgaagcaactggtggtggcctgatggacccagattccctgggaggcgcttcgttctggctgggggccttgttgacgaccgtgacctccctggattccgtcctcctgggtggcaccttcttgtcgggcttgaagcatccgaagcagctcatcttctcccagctgcctgcacgacacgtgagggagagaggctggacaaagggccttttcaggctgtgatgcggctgcgaatactggctggtcattggccatgcgtccaatccccatgtacagcacaagcgcgagatctaacggacttaatataaatctcatctgagtcgggaggaaaaaggctttccacgtcctctcctgtgtgggcgttacctggattctaaacttccttcaagtgta

SEQ ID NO: 52128 - DNA, 873 bp, Zea mays
  Clone ID: MRT4577_14753C.1
cgccgcctctcgctccgtcccactgcagctgcagcggcgctaagaagcagagctgctctctgcgtcaggggcggcagcagaggaggcgcctccgcgtcgcccgcgccgtcgaggtggacgcgccttccgccggcgcaccggagccggaggaggcggaggagccgtccgtcgacttcgcgttcgtcagctcgcggctgctgccggacgggacaccggacgtgcactaccggacggcgcgcggcgggcagaagctcagggacatcatgctcgacggctacatcgacctatacgggccctacgataaggtggcggcttgggtcgacgatggcggctctgggactgcacggggaatgacggttgagcgtgggtagacaaaaccagaaggagaaatgggaattaggggcgagtcccgactcccgagcggctggcaccgaggcgaagctcaatgtgacaaggtcgacgacaggagatcaacagcgatggcgacggtggcggccctactgcgtgctgggtggggaaacggacaaggagagtgcaaatgaggagtggggtgcgctggagttccgggtcatcactctgaatcccatgagggcttgttcaattctaccccaatccatatggattgaggggattgagggggttttaatccctggtaagtcaaaatcccctttaattcatatcaatcccctccaatccatatggattgaaaataaccgaacaagcctgtaaggtgcgtggacggggttgtaggatgcaggcgatggttatctatgcacaacacgcgacgtgggcgtggccttggtggagctaatggttgcggggaaaaggatgaggctgacgagtgtggaaaaggatggcgagatactttcttat

SEQ ID NO: 52129 - DNA, 541 bp, Zea mays
  unsure (1)..(541): unsure at all n locations
  Clone ID: MRT4577_147540C.1
tcggctgcggcctggtgaagcagctggtgctcatctccgccgacctcatgcacgacttcaagacggcgcacctcaccctgacgtcgccgcgctccatgctcgccgcgcaggccgtcggcgccgccatgggctgcgtcgtcacgccgctcacgtttctcctcttctacagggcgttcgacgtcggcaaccccgacgggtactggaaagcgccgttcgcgctcatctaccgcaacatggctctcctgggagcccagggcttctcggcgctgcccacgcactgcctgccgctgtccgcggggttcttcgcgctcgccgtgctcgccaacgtgatgaatgacgtcctgccgccgcgctacgcgaggtacgtgcccctgccgacggcgatggccgtgccgtttctcgtcggcgccagcttcgccatcgacatggtggtggggaccgttgtggtcttcgcctggcactggattgacggncacgagaccacgttgctcgtgccggcggtggcgtcaggcctcatctgcggtgatggcgtatggacttt

SEQ ID NO: 52130 - DNA, 432 bp, Zea mays
  Clone ID: MRT4577_147541C.1
acccacgcgtccgcttaccaagcaggtgatctgcaagtgagccaagtgccatgtactcataaaccaggagccgttgatctccatctgcacaatagcccaccaaattgactaagtttggatggtgcaataagctgagcatcaggacctcaactaggaactctctgttgccttgatacccattcaggtctagttgcttgacagcaacaagctgttcacgcaaaccggaaacaagtcagccactaatgactgtagatgaattagcaagcttgtgtatacgtagaacgtttgaatgttttttttctgtgtggtgtgtacctgtccgttttcaagcctgcccttgtataccctgccgaatcccccttctccgagaaggcagtcagagcggaagtttttcgtggccgtggctagctcacggaacgtgaatgcttttgc

SEQ ID NO: 52131 - DNA, 251 bp, Zea mays
  Clone ID: MRT4577_147542C.1
cctcatagaggcttcaaatacttgtactcggttttcaaagactcggtattcaaagatgatgtaaattatcggatatgtttggtgcaccattggacaggttatcaaacatgttatttagagaggtttgtaattatactacttatcgatgtatttggtatgcacattggatactacgtacagtaatggccagaacttgtcgttgggaaggcaaaaaaaaatgagagtatagtggagaaaaaaagggggggggg

SEQ ID NO: 52132 - DNA, 320 bp, Zea mays
  Clone ID: MRT4577_147543C.1
caattgcgaacagagtccattgaatacagacggccactttatttttgaacaaaaaaacctggctcccaggggatattcagctgcaaccttttttttaacacaaccctccgggcaagacttctcgtgcataaagtgaccctgcaaaatctggacctcagatgcccctatgccaggccactgggacacgcattcttacaaggtacgatgcaatggggtacccaatttaaaattctgggagaaccaatcgaccatgtacgaaaagggttgctaaccattgtccactgtggcgggcaactcgagcttgtatctcaccctccatc

SEQ ID NO: 52133 - DNA, 915 bp, Zea mays
  Clone ID: MRT4577_147544C.1
ttcttacgcgtccgcccacgcgtccgccgtctcaaaataagtttatttctagaatcacttaaagtcaaattatcttaagtttgaccaattttataggaaaggtaccgtcgtctatgtttctatgacaccaaatgagtacattatgaaaattattttatggtgcattagtgacactaattcagtgccgtgctctttttatgaatttggtcaaacttaaaaatagtttgatttaagataactctgagaaattgatttattttgggacagagaatgtttctgggttgtcttgtaaatacagttcttgtcattagagtatatgatgactaggaccggtttaatccgaattatataaactctctatatatcagcgaaccccttttttatagttaaaaaaaaaaaaaaaaaaaaaaaaaaaaaaaaaaaaaaaaaaaaaaaaaaaaaaaaaaaaaaaaaaaaaaaaaaaaaaaaaaaaaaaaaaaaaaaaaaaaaaaaaaaaaaaaaaaaaaaaaaaaaaagggggggcccttttaaaggaaccaaatttaactcccgggggatggaaagaaaaaattttttttaaggggccccaaaaataaattaacggggcggggtttaaaaaaggggggaggggaaaaacccgggggttaccaaaataaaagcctttggaaaaaaacccctttttcccagggggggaaaaaaaaaaaaggcccccaccaaacccccttccaaaaaattggccaacctaaaggggaaaggggaccccccctttaacgggcaataaaacggggggggggggggggttacccccaagggaacccttaaatttggcagggccctaagcccccgtcctttgggttttttcccttcttttttgcccaagttggccggttttccccggaaaatttaaaaaggggg

SEQ ID NO: 52134 - DNA, 782 bp, Zea mays
  Clone ID: MRT4577_147545C.1
ggccggccgggagacaaaatatacaatctggttgctcatctcatctcacgactcataaaaaaatagcgtcttttatcatatccgttgctcgcaaaacgcccccacacgccgccggcgaatcggcgactccccttgcgacgggaggaagcagccacgccgccgtctcggcgactccctgacgactgcctctccggtctcgaacgcgatctggcccatggtggctctggcgccgttggttcgtgagatctagggttgtcgagcgccgcggagtgggagcggatggggcgccggaagatgtccgcagcggcgccgccgtcccggagctggtccaacgttggcgggagcgtaatccccggtgagatctgcgggttggttcaatgcgtgtggtagcgttaaggcgtcgtggatcgaagcttgctagcttgtttttttattgaaatcggggtgtgattggtggggcaggggagtaggtacgttgagatcagggttaactttggaagcggtttcataggtgtgtgcgctgtggtgcttgtgtttgggatggcaatgattgcttgtattcagacgcagatcactgcattgtgcgtactttatatagcaccccgtttcaatttgaagtttatgttggttaaggtgctgtgcggataatcagttatatattatagaaaattgagttacaggagagaaatcacttatgcagcagagagaattgagttacatgagagaaatataggaagtgtttattatgcagaaaaaaaaaaaaaaaaaaggcccctagggcc

SEQ ID NO: 52135 - DNA, 311 bp, Zea mays
  Clone ID: MRT4577_147546C.1
tacaagcttttttttttttttttttttgaacaaactttttttttttttttataacaaacttttttttatttttttaactttaattttttatttttttattatatatttttttctttttttttatttattttattcaaaattttttataaccccacataaatgatgggccaactaaaatccttaaaaaggtaaaaattaattctatagatattcattacaaagtccaccgccccagcattcaaaccgagggccctttaaaacccatagtttttccaaataaaattcacttggcggaaatccacattttcaac

SEQ ID NO: 52136 - DNA, 514 bp, Zea mays
  Clone ID: MRT4577_147547C.1
gacttaagataaataatatacgggcaggccaatcacgaagataaaggccactacttgaaaacaggaactagtacaatctggaggcaggcatgggaggcgttgggccgtttgcgccctatagtataacatggctcagacagaaacgctgttttttttttggtgctgagaattattacagcgagcgccttggtgagcgagctaacgacgggagcagcatacacaacacgactccatgataagctctttgtcgctccgtcgaaacatcacccggatccaacatgagacaggggcacgggcgtgccgcctgcgttaagcacctaatgttcccacctgaagtgccgatatcccgcgccacctttaccatcaccacatccggatccacgaatgccttatgcgagaaactatacacctgctcctgcaacctgaccacctaagaatgcgctaagatcccaccattgtcgatgtaaaagtggacatacgaggcggccaatctaaagcccgatggcctcggaac

SEQ ID NO: 52137 - DNA, 1539 bp, Zea mays
  Clone ID: MRT4577_147548C.1
gacccccgaggctggccggggaccgccttttttccattcagttgtgaaaacatggccaccacgctccgccagcgcaccgcacccgcgacccaatcgaagaaggagcgacgagacagcgatgtcctttcgacttcctccgacgaggacacgtcgccggtttcgcacctcgaaaacaccttccctcctttcgaagtgcccaacttcaccactaaggaagtccttggagctattccggccgaatgctttgagcgatcagccgccatcagcttcgcatatgtcgcccgcgatttcgccttcgtcgccgctctcggttacgccgcttcatttatcgagcccgcgctcggctcgaacggtcacgtcctaaacggatgggccggattcgctgccaaatgggccgcgtgggccgcttactggaccgttcaaggttgggtcatgaccggtatctggatccttggtcacgaatgtggtcaccaagcgttctcgacctcgaagactctcaacaacaccgtcggactcttcctccactccttcgtcctcgtcccttaccactcgtggcgtatctcgcacgccaagcaccacgccgcgaccgggcacttgacccgcgatgaggtcttcgttccccgcaccctttcggaacgcaagttcaaggagaaccccaagaaggtcgaagtcgcacccggaatcgttctcgacgagctcctcgaagacgcgcccatctaccgtctcgggtggctcatcgtccagcaactcttcggctggcccgcataccttttcacgaacgcttctggtcaactttcgtaccccgcgtggaccaaccacttcgaccccaagtccctcatctttgatgctcgtcaccgcgccgatgtgctcatcacggacgctttcctcatcggcatgttgaccctcctcacccttttcggtcaaaaggttggaggcttcggagaggtcgtcaagtactacggtatcccttacctcgcagttaatcactggttggtttgcattacttacctccaacacacggacccgtcgctccctcactacgacgctaccgagtggaatttcgtccgcggagcactttgcaccatggaccgaaacctcctcggacccgtcggtccctacctcatgcacggtatctgcgagacccacgtcgcccaccacctttgcagtcgtatcccccaccacaacgcctacgccgcgactgaggccttgaaaaagttcttgggtccccattacgcctccaccgacgaaagcatgtttgtttccttgtggaagtcctacaagcaatgccgctacgtcgatgacgagggttcggtccgcatgtaccgtgacgcttacggtcgagctcgtcgaacggtcgcccccgtcgaggttccctcggactcgggtgtcgacttcgagtagattcccccgtcttttctatggctattcagttcgttacccgtagactcttcctagactttatcccatcagtggcctgtccgtcacgccttccttcaccactctcattatttactctgcaaaacccagtcgttctttccc

SEQ ID NO: 52138 - DNA, 693 bp, Zea mays
  Clone ID: MRT4577_147549C.1
gccggccgggctgggatcacacactgtttcttcgaccattaactttatctactccatatcgcagaacaacccgatcgtagaacatgagggagttgctcgttgccctcgctcgcctggctctcggtgtgagcgtcacatccacgcatataaagggaggtatgtgctgttcaacaccgccgccgagtcatctaccgccatcgtcggatcagccacctccggaatctattgccatctacgacgtatctgccaccagccggccaactgacagacggggtgcacctgtgaccgtcgagtccatagtgactgcgctaaaatcactcgtgccgccgccaccatgccactagcctactcaaacgccgagggctcaggatcttccccggccacagccatgaccgaggcaacagtctgatcctaatccgagacagctgcgctgaacctggaaaatggagagaacccggactgtgttacagtgctgacagcttgtgacgcattagaggagacggaccctcactacctactggttcactgaatgccatgcgctgattacagcagagttgccctacatctcgtgcaggagaagccgcatatatcgtgactcaaagatcttccagttgatcctacatggcatgctgaaagatgagacgcaaattcatcagctaataatgatgctggcatggcatgatatgacatgac

SEQ ID NO: 52139 - DNA, 424 bp, Zea mays
  Clone ID: MRT4577_14754C.1
gatacttggtcaatcattgcatatttgatgtttcatcaaaccaataaaaatgccactttggcatcttatgttcagtatttccttccctgtttcatgaagcatgccttttgcattgatttgatgctgcagtgattttgttgctgccaaatgcaatgttgcttatatttgtcagattgaacagaatcacactgtagctaatacagtatgcaaagctctcatgtcatagattaagaaaactcaaaaccagtgattaacaaaatggtagacctgggagagtgcccccatattctttatccacttctacctagttattctagagcctaaggctattcggactcataccactcttaatttggactctaaaagaaatattctattcttggcaacaaaattctttaccctatactacaattcttcgcagtca

SEQ ID NO: 52140 - DNA, 345 bp, Zea mays
  Clone ID: MRT4577_147550C.1
cgctgtactgccctgctcattcagggagaatagggttgctgaccgtgcagtgcctatcgggtcctggtgtctttaagagtcggaggtgaatttgttgcaaggtcactatcacgagcgcactatttacatggggggagggggcctggggtaaatcactcaaaagttttcactcctaaaaagataagaacgttaggtagctaccgctgttatgatcctgcatcatgcatcctttacgttcgatggactcctgggaagacctggggtgtctggtacttcaggctttaattttgcttgatgtatggccgtgtgcggcacaatccctacttgtagtgagatcgctaccat

SEQ ID NO: 52141 - DNA, 571 bp, Zea mays
  Clone ID: MRT4577_147551C.1
ctccaggaaggaacctggtaggactagtcagcccggaagctggctgcttttcagaagcgataaagacaggggccattccgtgtgcttgtcttctccctgctgtccgcagcggacacatacgcgctggacatcgctgatgacgccttgttcgccacatgcgtaagatattcaggacctgatcaacagctcggggctccacctggcgctgtaccacccgcagagccaatgttccctggagccgatgcgcgatgggctgctcttatacgcgggggtagccactactggcctgctcatacgaagagtaggaatgcgcggacgactaacacccccgattacccataccttaggtcacaagaagcgcgcggcatcgcgacgacgacctcctgcggaccagcacaccttcctggcttgaggccatcgacgccaagcttacgtcgctgtatctcaagtaccagagacctaccgccgtcaagctctacctccacgtgggcggaggctcgccttccgcgcgctgggtgcccgccgagcgccgtgcgacctacgcattcgttgacaagacgagcgacgacgc

SEQ ID NO: 52142 - DNA, 414 bp, Zea mays
  Clone ID: MRT4577_147552C.1
ccggcctggccgggagactcatcatcaccgtctgttggagaggcaagcgagcaagcaactgacaggtagctgcagcaatcagcaatgggctacgaagcggctgcggctgttgctgcgagaggccagctgcgtggagaagagaagcgcggcgcgagaagccatggccagcgagagaaggagaaggagaagaagaaggcagcgacgaggtgcagcgttgtgtggatgcttaggagagtcctgccgcttcgtagaggaggtgctatgattgttgcaccgtgatctctctcgcctctcggtgatcatcatgtgaatattgtgataccatcgatcggagagtgttttatttttcttgtttgcaaaaaaaaaaaaaaaaaaggcccctagggcctcaaaaaaaaaaaaaaaaaagtccac

SEQ ID NO: 52143 - DNA, 400 bp, Zea mays
  Clone ID: MRT4577_147553C.1
ggaggggggggcgctgcaaaaacatgcccttaatccttttttgcagacgataataagtacatccatggggtagtgatcgagcaacacacacctgaccacccttgctcttatttacttacacccacccccctgtacggggcttggggccgtatatatatcgagttctgcatgcatatttcgatcgaagggatgatcaagcgtttcaatcgcactattaggagtagccgtgcccgtgcccctgcccgtgcggaaccctgggctcctgctggctgttttcgtaatgggcctccttttgcttccggtgcttttggtacccttaaacgccggggcccaacgccgccgccgttgccaccccggcccccaacttgggcctattctcgttccccggcttgagcccaat

SEQ ID NO: 52144 - DNA, 189 bp, Zea mays
  Clone ID: MRT4577_147554C.1
tctcagctttttttgcccaacgtaaaccccaatttgtctctttaaattcttatgcggctaacaacatcctcaaattgattcacaactaatggcacaagctcctacaaaatatccacaactatcacaaactattcttttttataacaccactaaactacataaaatcctactactccactcaccaacaaa

SEQ ID NO: 52145 - DNA, 337 bp, Zea mays
  unsure (1)..(337): unsure at all n locations
  Clone ID: MRT4577_147555C.1
ggatcatacacaccgaagtttactctgttcagccgagcaccaacgggagccacggggngcgtgggccgaggaggcgccgcgcctgaagaggcggccgtatccggaccggcacacagactgcgcacaacaatacttgctgtggggggacagacgaccgataagaagtaccgagcgtaaacagttctacatgaggcacgaggcgctccaagcacgcaaataacggtaccaatcataaagccttcaacgaccatatgctttatggccccagtcacccttagagcatccgtgtctgcaaaggaattgtggcacaacaactgcaacaacagatgctaccaac

SEQ ID NO: 52146 - DNA, 147 bp, Zea mays
  Clone ID: MRT4577_147556C.1
atggcggcgggactgaggcgggctggcgctcggtttcttcttgcccgggacatcgggagcagcatcagccgggatcgagaggggcgcaagaagcttcgaccatgcgactgtactatgcgccggttctctgcatctcgcgccgcctag

SEQ ID NO: 52147 - DNA, 467 bp, Zea mays
  Clone ID: MRT4577_147557C.1
aggacgcgtgggagtgacgcaatgaacggacgcgtgggcggacgcgtgggatcctatcgacgcgtccaataaaaaggggggaagagcataagcccttttttttgctgccttccaccctagcttttccctaatgtgatgcttaaaccctcgccgggaggaggactccacgcgcgagcccgtccgcgccacctaccgtcgcgccaggatccccgccatggccgccgcgccgctaccgggcccaggtccccgatgatagcacggctccgttgcagacggtgcctgtacttgagaataaccgaatgcaagagggcaaacgccaaggaccagattctttctggtacagagaatgggactacaggcaaagcacgtggcgctagctgcttgagatcgtcaaacggcctaccagagaaggctagctttgtcgaaaagctggagagcaaccttatctctaccgtaaaatgtgtatg

SEQ ID NO: 52148 - DNA, 422 bp, Zea mays
  Clone ID: MRT4577_147558C.1
tttgggtgggtttttttttttttgggggttttttttttttttttttttttttttttttttttttttttttttttaaaaaaactgggggcaaaaataaaaattggtatcgaaaagggggggggtttcacccaaaaaggggggggaaaacccaaacccttaaaggggggacccccccttggggtctaaaaaaaaaaaacccgggggggccaaggaattaggacccagaaaaagccccgtggttaaaggggaaaaccccccaaaacacctttggccgggaattggtttaaaaaacaaaggggggccctaaaggttgggggcagttttggcccttacggggggggggggggcaaatacaggccccttttaaaaaaggagggtgttttgtctcccagtattaaggggaaaaggggccccacgacggg

SEQ ID NO: 52149 - DNA, 394 bp, Zea mays
  Clone ID: MRT4577_147559C.1
cctccttttttttttttttttttttttttttttagcacgaatatgagaatatttataaactgcatctgcaccaaactgtattgtgaaaagagagagagagagagagagagagagagagaggatatccatttcatagtatgtgtcccaaaaaaataaaacttgcttatctaggggcagctggaatgtactaaccgcaatggaacatttgggacggggatccttgaccataatttgctgcaaaaccgattgtgtttttgaaattttgaaaccagttgcctattcttgggacatacagataggtgcaagataagggatgatggattgtgttgcctttttaaccggatttgtccgttttttcctttgggtcctggccgtacatcctgttgaaactttg

SEQ ID NO: 52150 - DNA, 747 bp, Zea mays
  unsure (1)..(747): unsure at all n locations
  Clone ID: MRT4577_14755C.1
gtcttcttccgtgggatttctttcgcagcacaaccaacaaacaaatttgtaactcgcaaaaggaaggggaggaaaaataaaccctagccgcgcaaatcgaagccagcgagacggctatgcggccggcgatcgcaggacaccaggatcgccgcctctagtcgcgcccaccccgcccgctcgcttccgccgccatgagggccgccgcggcgcagatcgatccgtccccgtccccgtcccccgccgcgctggccaagtcgcggctcaagcgcctgttcgagcgccaggtcctgcgggtctcgccggcggagcggctcccgcccgtctccgccggcggggagaaggacaaggagaaggatgacttggagcccagctcggtgtgcctggacggcatggtccgcagcttcctggaggacggcggcggcaccgtcggcgagcgggccccgaccgcgcgctgctgcaactgcttcaacggcggcgacgcctcggacgacgaggacgggcccgccgcggccgaagcgtctgccatctccgacgccgcggagaccatcaagggcctcgtccactgtgccagtctccgggagcgcaccttcctcgcggacgtgtnccacgctcgtggagcgcancnccnnnccgccgngggcgcgcaaagcgcgacctcctccgnnctcctcggggggtccctccgcgccatgggncacgacgccgcgctctggctctcccgctggggacaagtcgtcctcccacccc

SEQ ID NO: 52151 - DNA, 354 bp, Zea mays
  unsure (1)..(354): unsure at all n locations
  Clone ID: MRT4577_147560C.1
ccgccccgggatacccaaggcgacccacgcgtccgtctatataaaaaaagaaagaaaaaaaatcgtacaaacttntttcntcgagagcctgagatntttgagaagggtgagcggcgccaatctccatggagctcacaggcgccgcgctccggcgatacgcgctgccgtcggcgtccccggtggccgttatggtttttaggaggaggctaccagccagggtggcctgcgtcaggggcggagggttcgcggaggaagggcacctcatatactacgaagcggccccgcgagagaaagcggtggaagccgtggctaaggacctaggaaaactccgggccattgggctcgtcccggggg

SEQ ID NO: 52152 - DNA, 187 bp, Zea mays
  Clone ID: MRT4577_147561C.1
gcctgaaaataacggcgggctgcagctgttttaattgcttcaacgcgttacgccatgaccagcttaaccggacacaggcttcataaactccaattattagggcacgccaacaaaagacgtaagcgcggtgcaaatcacgaacggaccacaacatgtggaagccatataaaggcatgattaagctcac

SEQ ID NO: 52153 - DNA, 280 bp, Zea mays
  Clone ID: MRT4577_147562C.1
agtattggagaaacatccgggcctggcaggatctgggaagacaggaaacgttcatggtgcggaacaaaaagggggtgtggatattatagatggaaagccgggcccccctgcgggtgtgggaggagtaaaggaaaagtagcagcgggcctaaccttctttaaggcgggaaacacgggaaaaggggcagcgtgaacagcacgaacagggcgatttatgaaacggggaacaagcggggctgcttttttgttgtggcaactaatccaagggtgagggggggggg

SEQ ID NO: 52154 - DNA, 783 bp, Zea mays
  Clone ID: MRT4577_147563C.1
aatcatgacacttgctctagccaggagcagccgtcacaaacttatgtgtacaaagaggcatcagaagcaaacgattctgagattcagatggaagatgttggaaagttgtccgttgatcagacatctagtttggtgcttcttgactatgaagacgagggttccagacaatatttggtggaaaaaggacagactgagtatagagatatgaacagtaacgaagagcacacccccactggcattcagcctaacgagtactctgatgttgagcatcaccagcaaaaggggcagacagagaccaccagccaagagattgaaatggaggactatcctattcagcaggagaaccctttattcctgcaactccgtgcgagcctcttccccagcaactggagcagcactttcagggggcgacattccctgttccgtccgcgacgccgagccccggtgaaggcgagccctctgcatgtagccatggcggcaataatgaagcggtaggtatttctgggagcctggtttttctgtgaagtgaagctccaggtaggtagcggcgctgactttggcaaaagctgtacccctcaagacatggaagcaggttggaatgctgaggctgattagtagtttatacatacatgtgggtgcgagattagtttgaggcgtgctcccatctctgtaggcggcatatggattcagaattctgtttgatttttattttattttattttatgtggggggtaaaaaaaaaaaaaaaaaaaaaaaagaaaaaaaaaaaaaaaaaaagcggcc

SEQ ID NO: 52155 - DNA, 686 bp, Zea mays
  Clone ID: MRT4577_147565C.1
attctcccattcactcctcgcgcctcgagatcccatccaaatcccgatcagtcgccgcccaagcctagcagatccgccggcgagcgcgcgggggcaatgggtgtcgtctcggcagcggcggacgcgattgtcgcggttttctccctcaccatcgtcgtcgcggcgccgctactcgacgcgcagtccgtcctcccgcataccctctacccggcgccgctcctggaactcaagcgctggtacgccgccgagtttggcgactacctcgtggcccagtcccccggcttcttccgtggccttgtttgcctcgagctcgccttccaatggccgctcgccgtcgccacactctacggcatcctcacccgccgccgctgggctgccaccacctccctcatggccggcgttggcaccctcacctccatgcagtgacacttggagaattttcggtttgagacagtggcgccagagcactaatgctggtcagaagacgattatctggatcaggtttctatccctggtatttagcacggatgttgaaaaatccagatagtgttagtggctgtttctctaggatttggtgttcgttttccctgaaatgtgatattcatcttgcctttatttccattttaccctttgattatatgtcttgctaactaagacattgttttgtttactggatgagctgattc

SEQ ID NO: 52156 - DNA, 279 bp, Zea mays
  Clone ID: MRT4577_147566C.1
caggctgcccgcagcgccgccagctacatgctcttcgaccccaaggacagcgtcatgcagcagaacctggtgtattaccggttccaccgggctcgctggggcctggaagaggaggacttccagccccgggaggaggccatgctctacacaaccagaccgccgagctgcgggagctgctggagttcacccacatgtacctgcagtcagatgatgagatggagctggaggagacagaaccgcccctggagcctgaggatgccctatctgacgccgagtttg

SEQ ID NO: 52157 - DNA, 1017 bp, Zea mays
  Clone ID: MRT4577_147567C.1
cattgcctacctcgaggccggccgggactcccattcactcctcgcgcctcgagatcccatccaaatcccgatcagtcgccgcccaagcctagcagatccgccggcgagcgcgcgggggcaatgggtgtcgtctcggcagcggcggacgcgattgtcgcggttttctccctcaccatcgtcgtcgcggcgccgctactcgacgcgcagtccgtcctcccgcataccctctacccggcgccgctcctggaactcaagcgctggtacgccgccgagtttggcgactacctcgtggcccagtcccccggcttcttccgtggccttgtttgcctcgagctcgccttccaatggccgctcgccgtcgccacactctacggcatcctcacccgccgccgctgggctgccaccacctccctcatggccggcgttggcaccctcacctccatgtctgcaattcttggtgagatgttaggttcaggcaaatcaacaccaaagttgcttcagatgtatgttccttatgctgtttttgctgtcattgctattctacgtggactttgctcatgctctggacgcactactgctggttcatcacttgggccttctgcccggaagaagagggtctagatcagcagtgacacttggagaattttcggtttgagacagtggcgccagagcactaatgctggtcagaagacgattatctggatcaggtttctatccctggtatttagcacggatgttgaaaaatccagatagtgttagtggctgtttctctaggatttggtgttcgttttccctgaaatgtgatattcatcttgcctttatttccattttaccctttgattatatgtcttgctaactaagacattgttttgtttactggatgagctgattcaactctggcattgttctggcgaataagtttcataaatccttgtcttgatagacccattgcagaaaatctaggttttttggagtggcatatatttttttagataacggatctttattttgagatga

SEQ ID NO: 52158 - DNA, 878 bp, Zea mays
  Clone ID: MRT4577_147569C.1
gcgatgaagcctttcttttaccaaaaccagtatgataagctcctacatttttctaaacagaaaaacaattctcataattatcatttttcagtctggcattgcaggcacatgatatactaattaaagttactaaatgaatattatatttgtatggtggatgcaaatgttaagccttagtgaatttgactcggtggtggttaaattgcagatatttacaaatgtatttcctgtcgtttatagcccttcaaatggctttggctttgaagttttaggtgaaaatatcttgcctgtctaggtacatgtacgcaaccatttccatgctcctcgaacattacatgtatcttagattgaaatttgtaggatgacatgctgatgtttgactataatgttgaagaatgagttaatgatttttgttgctgcagccatagaacaggtaaactttcaatattgttgccacagactgtagttcactagagcaattaactatgcttcgttcaaagtaagaaaattggatttaattaacttgtgatgatcaggcaaactttacgcgtacaaaccacataatttggaccatgggagataattttagttacaatatatagaatcttggttccggaatatggacaaacttatctatcgcgtgaacaaggtattgctgattttaaactgaagctctcaagttttgatacacagttttcttgtttagctgtcattttaatttacctttctgcaatgatactactacatacaaaatcttttttctatgagatgctgcctaagcacattagtcatgtgcaatatgccacggttaattgatgttgtggaaccgatgaattaaaaaataatgtccgattgctacaggatggccgagtgcatgc

SEQ ID NO: 52159 - DNA, 264 bp, Zea mays
  Clone ID: MRT4577_14756C.1
aaattcgcggcgagacccacgcgtgggtgagatacacgatcgagcacacaatcacgaagactcgtttaggagattccacaaaccaccaagccatgcaagcggggtggagtactgacaggaggggcagttcggccacgttgccactggccatgttgaccagtacggcaactcagtcagctgcgtttagcacggcacctgtggcttgaggcactgcacgggaaccaccgccggcatttgccatctgagtgagcacggtggatctga

SEQ ID NO: 52160 - DNA, 287 bp, Zea mays
  Clone ID: MRT4577_147570C.1
ccacacggacgcagcgaacggcagggtacgtttcgggagctttctatgacgctgccacgctggaccattgggggtgttcggcggccgacaggatgacagggcctatgctcaccggtgcttgctcaagaccacgaatgcggaccgggaggacgaccccgagctggcgtacgtgcttggaaacggataccttgagcgcgtgaactgacgatacaccagaaccaacgtgtgcttgaagcatcaggcgctgctgaaacacccggctagcaggcacgttctcgagccacggc

SEQ ID NO: 52161 - DNA, 487 bp, Zea mays
  Clone ID: MRT4577_147571C.1
tcctctagagcggccgcccttttttttttttttttttttttttttttttttgattgagatcattatccatgccatgatgtgccatcatatgcaacattcatccaaacagcctaaagctaagttttcatgtcaagcaggctagtctatcactgataactgataatgtaagtgtgctccaaaaaaacttgagcaagaccaatgtgattgtcgaaaaatagttcttaaaagcctgttctgtagggctagtgatctaggccttcttcaacccctctctgatgggcgttctattcagcggctctctctttatgcggatgatgtagtcctctttctcaagccatctgatggtgatctacaattgtcgagagctattctcagtaaatttggggaagcctcaggcttgcacactaaccagtatgccaggcatggatgtctcgatgatctcataattatcacttcatttctgctgaatcaaaattaggaggaaaat

SEQ ID NO: 52162 - DNA, 404 bp, Zea mays
  Clone ID: MRT4577_147572C.1
ccatctttacactttttttttttttttaatcacaatgtgtatagagataaatttcacaaatatcattattacatagcaaaagtcttaccaaaaataaattaaaacaataaaccaaactaaacattaaccttttcttcctaaaactaactaaaagaccccacctaaataaactcgtacttttccttataaaactcctccttaaccaccttttcttctcctttgaggatttatatatctccaatgttaactcacaaaaaatcatagctcaacaatttgtagggaataatatacattaactcaccaaagttgggaactcatttgaaatttaaagctaaagcttatcaacaaataaaggttaaaattgaacatttcttttaataagttgctcaaattttattaacaac

SEQ ID NO: 52163 - DNA, 391 bp, Zea mays
  Clone ID: MRT4577_147573C.1
acccactcgtacgcagacaaagtgaagcgcactagcagcttcccaacaccaacggctaccaagatattaagcctcgttgcacttattgccgttttagagagctcatcaaatgcgttcattattccacagtgctcacttgctcctagtgccattattacacagttccttttatcagttacttcaatgggcttctaacattcagccgtgtaagccttctgactacatctagcgctttcagagagcgccttacaacaaccaattgcccaattgcaacaacaatccttggcacatctaaccctacaaaccattgcaacgcaacaacatcaacatcaacagtttctgccattactgagccatctacccgtggtgaaccatgtcacctacttgcaac

SEQ ID NO: 52164 - DNA, 490 bp, Zea mays
  Clone ID: MRT4577_147574C.1
ggggggacgcataaaaaataatttgtgggacgtgcggccccgcaacacctggggacacttattaaatcaaaaccaacgcgaaccgtagatccttctccaaccaccatatggagagggccccaaaggacccagactcacagggggctaaaacggggggggagatactgacctcttggtgacagagcaaaaggtggaagaagcccgcctttgggaggcttaactcaactagccccctggccattcgccatccttgggcccgagacaaccacacgctggaagctccggcgggacgccaaacttggccgggatcgtcaccttcccactgaccagggtgccagaaccaaaacccaccccggctgagccttttaaagtgacaatctccacaaagactggggaaccacccctgccgagcaaaaaaaggggaaacctgctttacctcgggaccaaggaaaacggaagagtgcgctcaatctccacttgatggcaccgc

SEQ ID NO: 52165 - DNA, 179 bp, Zea mays
  Clone ID: MRT4577_147575C.1
gcacacttatctatgaccttgcaggctgatgaaatgcatgtgtggtcctccacgacgaccatctcgtgctatgactgaaattggaattggctggggcatagctcgaatgacgactagtcaggcattacgtacagctagcataactataggtccagtccaggacatggatcggctagtgc

SEQ ID NO: 52166 - DNA, 277 bp, Zea mays
  Clone ID: MRT4577_147576C.1
tttttcttagggggggattgagcgcgaagtccccgttccggaacacatttgaattaatgacaggcgggacctcttccatatattggttgacgcgaaatggaatctcattggtccaggcaaaaggtaaaaggggcctgaaaatgtgctcgacatggctcagggcctgcacacgagggtgattatatgccattggtggtgtgatatgaagaacaactttaagggtagcttactttgggttccgcacaacaccaaatcgtttcccaagataaacggccca

SEQ ID NO: 52167 - DNA, 455 bp, Zea mays
  Clone ID: MRT4577_147577C.1
aattcggcacgagggttattttttttttttgtttctgttgtgggaaaacccatatatgggctattaacagccttgaccaatttagggctccacaacagggttataagtaccaaaacgctaagcattgagcaagttcacagctttttcatgacacggaccccagatcatgaaccgcgtgcatatccgaaccgcgcgttgtactaccataatgaactataacctgcgcttgcaactggcgcatcttatgtatcacttcgaagttatggaggtgcaccgcgtcattcctatgttaatcctgcttactcgaaaaacctgctgatgaaacgggaactggagatgttgactatcttataccattgcccaaacatgatcttagacaaagactgaattccatcccatcttgtaccatagtggaactgcacaccaaccagcttgattccaatgggttgcgggag

SEQ ID NO: 52168 - DNA, 442 bp, Zea mays
  Clone ID: MRT4577_147578C.1
aaggcctattccccgccaaaaacctttatcccccttttttggatttttggagtttccttccccccaacccacacgggggcttgggggggaattcaaaacaccctcccccccccccaaagggggccccgcccccccaggtagagggaccaaacccaagttgttttgccccccccctccttacccaaaggggaccggcattccaaaatgccgggtctccccccccttcctggagacgaaagccaaaaacacttttagttttggggtccacggaaaaaacagggcccgggggctttctttccctggggaactttttttggggtggggggcctttttctacccccgcctgggattttaaaaccggggctttttggggggggaaaaccgcggttttttttccccctttggtttattgaaccggagtggaaggcccccctaaaaccag

SEQ ID NO: 52169 - DNA, 644 bp, Zea mays
  Clone ID: MRT4577_147579C.1
ccggccgggggcctgctattgaaaatacacgacttccaccgcaatcgcacgcaaaaaacccggtcgagcttcaccgtgtccctccgcttccccgtgcgggggtgccgggtcgcgccgtgccatggggcccgccttctcggtatcatgcgcgcccggatcctaaggcccgctggccgtcagccccgggcccagcgtacgaggtgacgtctgctcccaacttccaccgtccccgcggagcatacaacgcatgagagcaccaggactcgagctcgccgctgccccggatgtccaaggacgagatggaggtggcaggtggagagcaggcatttagtgcttccgatttctgccgccgttcttcacagggaacaaaggggagaaggacgctcccaaggcgatgaggattaaggaggagctcctggactccattgcaccggtggaccgtgactccgaggtcactcccgaggacaaggagcgcgtgcagcagattgttcatgatctggaggctgtgaaccaggtgaaggagccgatcaaggtcgatctcctaaacggtaaatgggagcttgtctataccatactccagcagtgtactgcaggcacagaggccaaagtatcttgagccgtttgggaagatttaccaattaatc

SEQ ID NO: 52170 - DNA, 2096 bp, Zea mays
  Clone ID: MRT4577_14757C.1
ctctcgcgtcgtccgctcgtcggctggtccggccccagcgattcggtttggtgcgcctcgtggtccacgtgcgcgggctttgtgctctctcttccctctgtgtgtgtgtgtgtcagttcatcgggtaggttggtggcggcgtgagagatgaagagctgcggcgggggaggagcggacgggcagcagtgcccgtgcgactactgcggggaggcggcggcggctctgcactgccgcgcggacgccgcgcgcctctgcgtcgcgtgcgaccgccacgtgcacgccgccaacgcgctttcgcggaagcacgtgcgggcgccgctctgcgcagggtgcgccgcgcgcccggccgccgcgcgcgtctcccccaccccgtccccgggcggcgccgacccggcgttcctctgcgcggactgctgcgagggctgcgccgccgcttccgcggcgcgcgtgtcggttgagggcttctcggggtgcccctcggcggccgagctcgccgcgtcatgggggctcgacctccgccgcgcggccgtggccgtgggcgacgacggcgacggcggcgacgacgacgaccccttcctctcggtgctcgactactccgtgctgggggtgggggtggccgacacggacctgcgcgacctctacgtgccgtgcgacccaccgcgggtgcccgtccccgacgccggcgcgcgcccgctcaggggcgaggcgctgtgcgaccagctcgcggagatggcgcggcgcgacgaggcggacacgtcccacgcgcacccgcactcggatctgagcccgcgcacgcctcgccgcacctccgcggcttccagcggacgcctgccgtcgggcaagatggcgccccccgcggcgctgccggtgccggctcatcctcctcccgccgcgccgcaggaggtgcctctgccgtacacgtccctgctcatgatggcgtccgccaactgcagcgacctcattggcggcggcgaccgggtgggtgataccgacgaacaactgctctgggactgcgctgcgccctcggtgccgcccacccagatatgggacttcaatttaggacggtcaaggcatcacgatgagaaatctgctcttgaagttggatacggttctaaccatggcggctttatgattaagagttacagtgacatgcttaaggacatttcttcggggacaacgaaagatctggaagatatttatgactcaagatactgctcaaccgccgaagatatcatgtcctctaatatctgtcagttgtcatcgaaaaatgtgagcaccgggagcaacaaacggaaggtgaggtcatgtgctgcgtcgacgatggatggaccaacgacctccgggaaccacaaccacgtacccgcttcagcttcaggtccaggagcagcgctcaccagggagatctccttcggggatcagacggtgtccgcccccgcggccgagaccgagaggcctgccgccgtgaggatcgacagcgagacgcttgcgcagaacagggacagcgccatgcagcggtacagggagaagaagaagaaccgcaggtacgagaagcacatccggtacgagtcgaggaagctgcgggcggacacgaggaagcgggtgaaagggcggttcgtcaagtccaccgaagcactcaacgccgccaggtacaacggatgaggcagccatatatatatatgcatggcctgtgaagcccgcgagtttgctgcgcgcctgcgttattacgtgcggtagcaacggatgaacggggagctaggtactgctacctggaggtgctacgtatgtatggcgcggccggaatcgctacgcacgcggcccaagtttaattttgcgttgaagctatagcgatcgtggccattgttgggcagtcaactccagagattgcacggtactgcttgtttgtaacagacgaccctccctttccccttttttctctgttgttgccgtcatccccaccagaacagaaagtatgtagcttacctacagcaccgatttaccatgcatgcatgcatctggtcttaacgagctaaaaaaaactacggtcgtccgagcgcctaatgcgttagttcccagtgaagttgttctgttttgatttt

SEQ ID NO: 52171 - DNA, 677 bp, Zea mays
  unsure (1)..(677): unsure at all n locations
  Clone ID: MRT4577_147580C.1
ctcccgaccgcccccactaagtcaatactgagcacaatacgccacccaccacctctccatcaaagaaaagggcggcacgccgggggaggggaaggggctgagcatcagagcatgacgtcggggtccgcagcggcggcggcggtgggaggcctcgggcggacgccgacatggaaggagcgggagaacaacaagcgccgggagcgccggcggagggccatcgccgccaagatcttcacgggcctccgcgcgctcggcaactacaagctgcccaagcactgcgacaacaacgaggtgctcaaggcgctgtgccgcgaggcggggtgggtcgtcgaggacgacggcaccacctaccgaaagggatgcaagccgccgccagggatgatgagcccgtgctcgtcctcgcagctgctgagcgcgccgtcctcgagcttcccgagcccggtgccgtcctaccacgccagcccggcgtcgtcgagcttcccgagcccgacgcgcctcgaccacggcagcggcagcaacagctacacctgcagttgatcctaactggtacatggacagtggggcaactgaccacattacaagtgatttagagaggcttaccaccagggagcgctacactggaggagacangttcaagtggcaaatggagcaggatcaagccacgaagcatcttcttc

SEQ ID NO: 52172 - DNA, 237 bp, Zea mays
  Clone ID: MRT4577_147581C.1
tccgtgtcgtatgctaccccgaacatgaacctccgaagcctctgaccaaatcgctgaggcaaagccgtgtcgtcgtggtatgtcgccggctttggtcgcctcgtctatgcatgtccgctctgtgccccaccggacatgtcgcaggcagcgttcggttgtcgctagtacctgtggcgccggtcctctggcgaatcttttgaccttcctcgggaattgcggctccggcaatactaccgc

SEQ ID NO: 52173 - DNA, 278 bp, Zea mays
  Clone ID: MRT4577_147582C.1
aaaaaaaggggggccggccaagccctttatataacttttagcttttacagggcccaggcccaccaaaaaagcccaggggggttgacaaaacatttggcaaaccagggggtaccacaaaaagggggctcccacatggggccccaaaataaaaagggggggggggcataatttgataaaaaaaccccccccagcaaatctgccccccctttttgggaaaaagaagggggcattacttgggactagggcacggtggggaacttgggaaccctaaaaaccct

SEQ ID NO: 52174 - DNA, 385 bp, Zea mays
  unsure (1)..(385): unsure at all n locations
  Clone ID: MRT4577_147583C.1
atttttatatttttttataataatatattaaatgacaggaacatgctgcaaccacaagatcatatatttactattttaaactgaatacagcnnnaagaaattaagaatctaggcaaacggaaaacgggttccgaatcaaccattaataaagacccaagaacagataaattaattacaaacaagacactagacaatctgatggtgaaccctgaattgcacgagacaatacaggcagaaatttgtgttcagttctaggaaatggaccattaaagcatcattataccccaattcggagagcttgaggtgggccttattagagtcataaaaaaatgccttttaatctgcagaaaatttttacaaaagagggcagaagacagggtcgctt

SEQ ID NO: 52175 - DNA, 721 bp, Zea mays
  unsure (1)..(721): unsure at all n locations
  Clone ID: MRT4577_147584C.1
gcagcccctgttcgaggccttctgcaccggcgcgcgggcctcgctagccgcgctcctggcggagctggccgcgtcgcaccgccgcgtcgtcgtcctctacgaccgcatggcggccttcgcggcggccgaggccgcgcgcttacccaacgccgaggccctcggcgtgcactgcctcgccgcctcctacaacgtcgggtgggcggacccggggcacgccctcctgcgccgccacggcctcgtgttccacccgcccgacgcttgcgccacgccggagttcgtcgcgctcgccaggcggatgggccaggagcgccggcgcgcgcccggagccggcatggtcgtcaacacctgccgcgcgctcgagggcgacttcctcgacgcactccgggggatcccgtcctccgacggcccaaggctgttcgccgtcgggcctctcagcccggtgctccccctccccggcgcgagcgggactcggcacgagtgcctgggctggctcgacgcgcagccgccctcgtcggtgctctacgtgtcgttcggtacgacgtcgtcgctccgcccggagcaggtgcgcgagctggccgccgcgctgcgggacagcggggcgcgcttcgtgtgggcgctgcgggacgccgaccgcgcgggcatgcgcggcggagagggggatactacgaccgaggccctccacgccgncgcggcgtccgagctcggccccgacggcgctggc

SEQ ID NO: 52176 - DNA, 600 bp, Zea mays
  Clone ID: MRT4577_147585C.1
ttcaggtctacttcatcaggtaattgttagtaaatattatgtgactcgaaatgatgctggccgaggaacactaaacactaggggcttcccatggtgagccccatcaccactgcctatgacgagggcttgctcccctccctttgcgtggccaacttcaaaaactaccagcagtgtgtttcacatattgaagcagcttgggatcttgcatattccattggcagctatgtgttcagtagtggttctgaccccaagtcacagcttttcgatgggcacaacgaatcaggagctaccatatacgcaagggagaatctgttgaacaatgtcttgcatgccattcgtacatgtgttctgcatggaggagtggcttgtcgtactcccacgtgcgcttgttgcagcgttcatcaaaaccgataaagatttctaggttgtggattccaagcaaatatggttgcataccaaaacttgattacaaagtcaatgcatgataagtacctttgcttatctcttcgctcgcaaaaagcgccacaaggaattgtaaggggtctagattctccatcatcctgtggtgtttggattcattattctgcatttcagcatcta

SEQ ID NO: 52177 - DNA, 257 bp, Zea mays
  Clone ID: MRT4577_147586C.1
aaatattattaaagagtgcggaattattatgagataaagagcgcttttaattaggctgcaagcctttcttttaattattgttccaacttttagtctcttttattcatatgctcaatatcaacccttaatattagtgctcatttactttagagagatatactttatacagaaaggaatccattaaaagaccatttaactcaaacttctctgagaatatccccataaatcctaaaataggattctaggaatttctaatt

SEQ ID NO: 52178 - DNA, 652 bp, Zea mays
  Clone ID: MRT4577_147587C.1
ggaaaaaaaaaaacaaaaaaaaattttgataaacggcacttcaccaacaccttctgtaactgttgccaaccactaacttctatatttgttcaacactcttatcaccagtggcaaggagtctgtcttcactgaatttgttgacaccctaaggcatcagcattactgaatgcactgaaacattactattttcacatgtggcgtcctctgcaaagttatgacaaccatggtagtagtaggtgtatttttgttgcttccaaagtattgaatccgcatttgattggtacgtggccaaggcgcgatcccttccatggatcgaatgacgaccctgggttggctattcaaagcatacgacgagaagcaggttttggtaaatgaaaaaatgaattggttctcttcttgtaggtaaattaaagggaaaggccgaaggaaggcattgggtacttgacagtgagttcactcaatcggtacaagtgtcaagaatgattatgagagtattacatttggtcataatggcatgcaaggacaagataaagggtcttgaaaggacaagctaaaaatgattatgagagtattccatgagttatatgttgaaagtatgagtatactctgaaacttttaaaaaaaagaaacaaatcagacatggttttttgcc

SEQ ID NO: 52179 - DNA, 401 bp, Zea mays
  Clone ID: MRT4577_147588C.1
aggggaagggagggttttttgccgttgtctttatatttttttttttcaaggaagaaaaaatgcccttcgttttttttacagttttatatacctatggcacaacacggtgcttttctacaggaaaaaaaaacaacgagggcccccaacatatattatcgaacagttgcaacaaaaaacaaaagaacgggaggattgcccacttgtggaatccatccggggcccgaacgggcaaaaagatcaagaatacccctaccgaggggggggcctcaggcaattcaaatccccgggtgtccaactttaaaaaaaagtgcgggcatcccaactattttcacaacaccccaaggggaacgaggcccgagctgaaacatcctatacaccaggaatctccagaagaaaaaaca

SEQ ID NO: 52180 - DNA, 188 bp, Zea mays
  Clone ID: MRT4577_147589C.1
cgacggcccgcgctgcctgtcgctgcggtgcccggacccgcgctgctcggcgcccgtcgtccggtaggtggtgggcgaggtgctggcgggggacaacatattacaaacggtacgcgcggttttgtttccggacgaacatggaggagaacacttacaagggatgcatgtgaatcagtatatctttagat

SEQ ID NO: 52181 - DNA, 501 bp, Zea mays
  Clone ID: MRT4577_14758C.1
acctggttttgtgttttcgtctgtcccccctggcctctctttttccttctgcatgttttttagtctcataaagttcctttcatttatagatttgatataaactgccttagctctcactggaatttgttagacacatatatatagcctgaaattctccacgccatgagtttgactaccaggttacaagaaactccttcacatgctcgcatataacggtcctcatttaggaatctagcgttcctatagcacaagtatgcctcttaccaacttttattgctatatactccctcccctccgtttgttttatctgacgtctgctagtacaaagttgaactacatggcgacaaataaaaaaacggaggtagtatatgtgagtgtgaccaccctacagattggttgcgaaatgcccgcagacatatttttgaaatggaaagctcaacccccgccagcatgtcttattgtgtgttgctgctcctcggataatttccttgctagaattta

SEQ ID NO: 52182 - DNA, 439 bp, Zea mays
  Clone ID: MRT4577_147590C.1
cccacgcgtccgactaaatttaccccattttatcaacaatcactcccaattataatcggctggcttctacatcataagcatagccatgttacattacctccttatcatctctcttatttataaacactatcccaaactctcaatcacttcaagctcttcaagatcatacattccaagatcatcaattatctactaacatttctctccttcacactactgaatataataccttcacctcctataacactacatatacttactacaatactatgtctaataccaacccttacattcttttcaccacaacatagctttcttattatctcatttatcttattcgcaactatcagtatcattcaaccattgatgactacactattttgactatttcaacaaccatgtacctctatccaactcctttttttgactataccatatc

SEQ ID NO: 52183 - DNA, 455 bp, Zea mays
  Clone ID: MRT4577_147591C.1
cccaaccacgctcgccccctcgccgcgtcatcctccttccaccatgtcgcgtctcgctcctgtcgtcatcgacaatggtacaggcttcacaaagatgggctttgccggaaacaatgacccttcgtttatccagcccactgtcatcgccaccagagaaggtgggtccggagcatcgggaggaccctctgttccctcaaagccctcgttcctgaactcgtccgcaagctcgaatatcgcctccaagcgcggcatcgaggatctcgacttttatatcggagacgaggctgtggccaactcgaagacctatgcgctcaactaccccattcgccacggccagatcgacaactgggaccacatggagcgttactgggagcagagcatcttcaagtaccttcgctgcgaaaccgaagatcactccttcctgctgacggagcctcactcaacctcccgagaac

SEQ ID NO: 52184 - DNA, 263 bp, Zea mays
  Clone ID: MRT4577_147592C.1
cacaagaaggaatttattttcaggtgggataaaaccgccaacacacttaaataaaacaaggttcatacgttgcaaccaattttcggtcgagcttagctactccgggcgatttgcgtgaggttttgacataaaaacacacaaaccgttttatttttaattgcccacattcaactggatgcaaacttttgactttgaaaaaaccaaaaagtactttaggcggcgttcccaaaggtaacatccaatttttttttaatacccttttt

SEQ ID NO: 52185 - DNA, 140 bp, Zea mays
  Clone ID: MRT4577_147593C.1
gagaggctttaaaagataacgtttacatcgggtatgtacagaatttttttcgccacctatacctaagcactgcttttttcacaaaatacttaagtctaacctgtcatcatcatcccctaaatctaacttgtgattctttc

SEQ ID NO: 52186 - DNA, 282 bp, Zea mays
  unsure (1)..(282): unsure at all n locations
  Clone ID: MRT4577_147594C.1
ggggaatccagnagcaacattagatcaacaatggagaccaagatattttccctccttatgctccttgctctttctacatgtgttgctaacgcgacaattttccctcaatgctcacaagctcctatggctcccttttttccccaatcccttcaataaataatggcttaagattgggaaacccaagttttcaacccatttaggttcaaccaggcattggaagaaggcaccatcctttaatggccttggtggggcaaccaatcgccggccttattttgggggcag

SEQ ID NO: 52187 - DNA, 262 bp, Zea mays
  Clone ID: MRT4577_147595C.1
ccggccgggccgggaatgccgaacataaccgacaagcgtatacgccacgaacagaacatcatgtctgcgctcgaacacacgctatgctgacactacagaacagaatcagctcggactgactgacatggcctacgacaatcatgaaacagaagcaacagacaccgctgaggtaactccgactgactgacgacgagcctcatcgcgctgacagactgatagacgaaaaaggacgtcacgccattgcccgactgaaatggagcga

SEQ ID NO: 52188 - DNA, 380 bp, Zea mays
  Clone ID: MRT4577_147596C.1
ccacccacgccccacgcgaccggcgtattttgcgttgtgcagatgggctcaaccatcgaccagctgggcgggggcggcagctgtgccgtacttctgctatcactcccacccaactggactctccagtgcgaccgtcaacatctacgcctccctacgaagcctagccaccgagggccagctctcccagaccacgtgcaacgactcaatcgagcggataaagcgcatctatcgacgtgcaggacctgaaggacacggatctggcgatcgaggacctcgtgaagaaggaacacgggagcaagaacctattcgagaagctcgataacgcgaccaatccctggggcatgctggcctgcaacaacatctgcaaaggcgctacccgc

SEQ ID NO: 52189 - DNA, 392 bp, Zea mays
  Clone ID: MRT4577_147597C.1
cccgggtcgcccagcgttcgttggctgttgcttctgcatgcttgggggggtccgttggctccgctcaccgcctcttgcgcggggttgcgttgactgcttgtgttacgggtgctcctctgacttacttccccccgctatcccacgaccgattcattggtaatgttctccgccttctccagcttctcctcacttcggggtggggcctgcactatgcatctctgtgtctcttctggggtcttcttctggtgcgctggcttctgttatgcgctgtttggcttatcgttcctcattgttcaggggacatgctgtctcatcgcgccctttcttgacctcccgcgtcggtgtgtcagagctctggccttgtccttcttcctgtgtgaacacgcctttgt

SEQ ID NO: 52190 - DNA, 598 bp, Zea mays
  Clone ID: MRT4577_147598C.1
aaaaaaagctgattgcttcaacagctatcacagttcactatttggatttgtccttaaacccaagtggagaagtgaccaagcagattggcgatgccttgcctgtgtcatgcacaatatctgctagcaggaacgcaactgtggtatggatgaaagacaacatcaggcttcgatctagcccatcattttccagtctccagtatcaggatgctggaaactatgtctgtgaaactgctctgcaagaggtcgaaggcctaaagaaaagagagtcattgacactcatagtagaaggaaaacctcaaatcaaaatgacaaagaaaactgatcccagtggactgtctaaaacaataatctgccatgtggaaggttttccgaagccggctatacagtggacaattaccggcagtggaagcgtcataaaccaaacagaggaatctccttatataaatggcaggtattatagtaaaattatcatttcccctgaagagaatgttacattaacttgcacagcagaaaaccagctggagagaacagtaaactccttgaatgtctctgctaatgaaaacagagaaaaggtgaatgaccaggcaaaactgatcgt

SEQ ID NO: 52191 - DNA, 359 bp, Zea mays
  Clone ID: MRT4577_147599C.1
ggtgaaaccaggttgagaatctgactcaaatataacaacgtttacatgcatatgcaagacaacaatatcattgttatctgaacacacatgggctccattggccaaattgaaatcgaaccacgccacaaaaatacataatgctttagggaaatgcacgaggattgattattgatctgtggatgtgctaaccgataaatactattgtttataactactgagggaccacaactgcgaggtattactggaggccattctgaaggtggttgaagtttcgattttgcttgatcaaatggatgtggcgttgtttgcatgacagcttgccatcatgcgcaatgtatgtagaaggggaaatggctcac

SEQ ID NO: 52192 - DNA, 220 bp, Zea mays
  Clone ID: MRT4577_14759C.1
tccttcattcctccatacacctatatcatcaatctcctccaagactaggaacaagcactaacttgcaaccaatgctcgcctccaacatcctctcttaccaccaccccatcatcatcccctgcagtcatcgcaacaacactgagctccacgacttccttctcccacatcctcacgacacacagttttcacatgtacttcaatgcccatgaccactaccttc

SEQ ID NO: 52193 - DNA, 2296 bp, Zea mays
  Clone ID: MRT4577_1475C.1
ctcgaggccggccgggagttcctcgcctaacgtgtggaggtgcatatacactgacctgtccatctgagttttgatgatgatgctggctttgatccagtatagctgacattatgtggtgggcagctaccgtgttcgtcattgttgctgtcccacaggtctctccgtctctgtctgtggcctctgacgagtgatcatcgtaggccgttccagcgctttaaattctccctgcctctcctcgtctcgcttcacttcagtaatcagtgctcgctagcccaccacgccctgaacctagcccggacacccgccaggacaggccagcccaacgcgatgcgaccgccgcctcagggtccgcgcaccaccatgtccatgggctccccggtgcagctcaggcggctgaagcctctgtaccagctggtggtgaacaacatcctggccatcgtggccgtgccgctcgccgccgcggtcctgctcaaggcgtcgtcgctcgggcccgaggagatcctggcccgggcccgcgcgctccggccggcgcacatgttcctggccgcgttcctgcctgccgcggccacggtgctgtacctgatgctccggccgcgcgcggtgtacctggtggactacgcgtgcttccgcaccagccccaactgccgcgtcccgttcgcgacgttcctggagcactcccgcgtgtggccgggcttcgacgagcgcagcgtgcggttcatgacgcgcctgctggagcggtcggggctcggggaggagacgtgcctgccgtacgcgcagcactacatcccgccgtcgcgcgacctggagtcctcccgcgccgaggccgagctcgtcatcttctcggccatcgacgacctgctcgccaagaccggggtctccccgcgggacatcgacatcctggtggtgaactgcagcctgttcgcgccgacgccgtccttcgcggacatggtcgcgcaccggtacaggctccgcggcgacgtgcgcaacgtgcacctcgccgggatggggtgcagcgcggggctcgtctccgtggagctggcccggaacctgctgcaggtggcgccgcggggcgcgcgcgcgctggtggtgtccacggagaccatcacccccaactactacatgggcgaggagcgcgcgatgctgctgcccaactgcctgttccgcatgggcggcgcggcggcgctgctgtccaccgacggcgccggcgcgcggttccgcctggcgcgcgtggtgcgcacgctgcgcggcgcgtcggacggcgcgtaccgctgcgtgtaccaggaggaggacgagcgcggcaacgtgggcatcaacctgtccaaggacctgatgagcatcgcgggcgacgcgctgaaggcgaacatcacggcgatggggcccctggtgctgccggcgtcggagcagctgctgttcgcgctgtccttcatcgcgcgcaaggtgctgaacaaccggatcaggccctacatcccggacttccgcacggcgttcgagcacttctgcatccacgcgggcgggcgcgccgtgatcgacgagctccagcgcagcctgacgctgtcggacgagcaggtggaggcgtcgcggatgacgctgcaccggttcggcaacacctccagcagctccctctggtacgagctcgcctacgtcgaggccaagggccgcatgcgcaggggcgaccgcgtctggatgatcggcttcggctccggcttcaagtgcaacagcgccgcctgggagtgcatccgccccgccgccaacgccgacgacgggccgtgggccaactgcatccaccggtaccccgtgcacattcccgacgtgctcaagcactgagcccggcgccagctccagtttcgtgccgtgccttgcctttcccttttcctcctcgcccggttgccattgcacctgctgctacatttggtttgtggacatcaaaacgaaccgctggaacagcgattggccgtggtcgtgaactaggttggtggaatatgtgatggagagtgacagagtacttgtcgtgtcgtatcaacgggggctcaaggcggcggggtggtcgtcataaaggaggcgaggtcgggccaggctgccgtacatgggcgcccggggaacggacgtgtgttgtgcttgtccggggcgttgttgtattatctaccattttcctatttcttattacaattcattcctgcagtataccatgaaaagagatatgacatgagctagagctactagtagacgacaagacgagcaaaagctttgatgtatgtgtgcacctactctttatacaatcaagtgttctcatttaagt

SEQ ID NO: 52194 - DNA, 850 bp, Zea mays
  Clone ID: MRT4577_147600C.1
attcggctcgagtttccctcccctgtttctaacaaaggccgctgttctaactctggttcttgttcaggacacgatcaaggcaccgccaccgtcggagtccaaggtgatgcagaaggcgacgcgcctcagcgtggcgacgaccaccatcttctacatgctgtgcgggtgcatggggtacgcggcgttcggcgacaaggcgccggacaacctcctcaccggcttcggcttcttcgagccgttctggctcatcgacatcgccaacgtcgccatcgtcgtgcacctggtcggcgcgtaccaggtgttctgccagcccatcttcgccttcgtcgagcgccgcgccgccgcggcctggcccgacagcgccttcgtctcccaggagctccgcgtgggccccttcgcggtcagcgtgttccgcctgacatggcggtcgtccttcgtgtgcgtcaccaccgtcgttgccatgctgctgccgttcttcggcaacgtggtggggttcctcggcgccgtctccttctggccgctcaccgtctacttccccgtcgagatgtacatcaagcagcgccgcgtgccccgcggcagcaccaagtggatctgtctccagacgctcagcgtcagctgcctcctcgtctccgtggccgctgcagcaggatccattgccgatgtcatcgccgccctcaaggtctacaagccgttcagcggttagcttcgcaggcagaaggtgggagggatatatgcaaaaacgattgcggatactgtactgctccattagttggcaggatctagcaattaggtcttatacttttttgagatgagatgatgaattaggtataatctgctatacttttttgcc

SEQ ID NO: 52195 - DNA, 372 bp, Zea mays
  Clone ID: MRT4577_147601C.1
tcccgccgctcgtctcgatccattatcctcctcgtcgatttaatccgatccgtgtgaagaaacgaatagaaccgcttggttgatctggtcctgacagggtacttttcatcaccaggttactaccaggggccgtaccagggcccgccggtgatggcgccgccgcagtacgccgcgccgccgcccagaagggagccgagcttcctggaaggctggtacgtattcccggccggccaactctctgatcctctctctctattcctctgccgcacgtttactgtgcaggggtctctgctcgtctctgtactgtgtggttaattccaagcaggctctcgcttcatctgttacgttcttgcgccatcataatctaatcgg

SEQ ID NO: 52196 - DNA, 1701 bp, Zea mays
  Clone ID: MRT4577_147602C.1
gccggccgggtcggggaacacccagaaaacaaccaccccgtacgtccaccgcgggcactcggcacgaagtccatagccagcgaaactcccgaaaccgtaccaaccagacaattcaccatggcggcgccggcgcaggcgcaggcgcaggtcctgcctctcctccggtggagccggagcgcctccttcctctgcgcctcgtcgcgccgcctcttctccgccctccaacgcccctctgccgctgctcgctgcgaggccggctccaaggccatgctcaaggggatggactactcggaactcgagaattgggtgcaggcgcaggggtttcggccaggccaggccatgatgctgtggaaatgcctgtacgggaacaacgtttgggctcattgctacgacgagttggctggtttaaataaggatttcaggaagatgataaccgagcatgctgatctcaaggcattaactatgaaggacatccatattgcatcagatggaacccgtaagatattgttctctcttgaagatggttcagtgattgaaacagttatcattccttgcgctaggggcaggacaactatctgtgtttcaagccaagttggttgtgccatgaactgccagttttgtttcactggaaggatgggtttgagaaaacatctctcgacagctgaaattgtcgagcaggctgtgtttgctcgtaggttattctcagatgaattgggatcaattaacaatgttgtatttatgggcatgggtgaaccatttcacaatattgacaatgtaataaaagcctcagcaataatggttgatgagcaaggtcttcattttagccctcgcaaggttactgtctccacaagtggtcttgtccctcagttaaaacgcttcctccaggaatccaattgctccctggctgtcagtcttaatgcgacaacagatgaggttaggaactggataatgcccataaacagaaagtacaatcttaacttgcttcttggcactttaagggaggaacttaacctcagacaaaaacaaatagtgctatttgaatatgtcatgctttctggagtgaacgacagtatggatgatgccaagaggcttatagagctagtccaagggatcccatgcaagataaacctcatctctttcaatccccacggcggttcccaattcaagcccacaccagacgataagataattgagttccgcaacgttttaattcaaggtggcctcactgtttttgttcggctcagcagaggggatgatcagatggctgcctgcgggcagctaggagagcctggaggctatcagctacctctgctccgtgtgcccgagaaatttcaggtcgccttgtgatgctaaacagtgcatacagtaaaaatggtcctgagcagcttgacgaacacacggagtaattggcttggaacgacgattcgatcgtgcaaatcttgcaagttctaccgccttcggaagcttgtgtggacttctgcaataacgtgcaaatctgaacctgggtacttgtgcgacaacacatttagacatggtgttgcttctgctagtacgtggtgtacccaaaccaaattcgataagattattattattataaattggtattttctggcaaaaaaaaaaaaaaaaaagcggccacagtgtaacatgctttcacttggtacttcgaaaaatatggaatgaacttatacggtaatcagc

SEQ ID NO: 52197 - DNA, 277 bp, Zea mays
  Clone ID: MRT4577_147603C.1
tcgcgctgtcgaaccgtaagttcgtaattgtataatgcagccgcgttggcgacgcgttcggtgagggtatcgtgcacggtttcggcctgtacggcctgaaacgtgccggcgtcgtcctccttctgagaggcccggctgacgatgcgcaagacggtatgccaacgtcaagtcgtcagccgcgtcagggagcctacggtacggatgctaccgagtgctgtacctgggcccactgtgcggctagacgtctagctacctgacaggcgagtttcctttcgac

SEQ ID NO: 52198 - DNA, 255 bp, Zea mays
  Clone ID: MRT4577_147604C.1
aacaagtatgctattgctacttatacatatggtcaagcttaatacctggagcctactgtgaaccttgctcgctgacaaatgttaatgctgcacactcatagccaccaaaaacactataaattagtttagagtgttggcttggcgcacaagtcataattacgaattatattatgtcaagctgagtagtgcttgatgcctccagtgacatatacagcagaatgcgactacatagggaaatattacacctgctagaat

SEQ ID NO: 52199 - DNA, 515 bp, Zea mays
  Clone ID: MRT4577_147605C.1
ccggccgggtcgcgcacacacccccaaaatcgccataccaagggagaaggtaccgccgtcgtcgacgttcttcgcttcggtcgtcgtccggagtcctcggttgggattctgggggcttcgctgtgtgccggggcatgttcgttgcggcgctgggtgtgattgctggtgggatggtggggaatttctcgccgccgtacatgtgcagccaccgagatccgccgtgacaccactgtggcgtggtcggagtcaccatcatccagtaacgaggagaagtataggtggttcaagtggagccacatcgaggagttcaattcgatctaggtggcatctcccaattgactttctagcgccaaggatggattttagatcatgttatatttatattttatttttgtaagtcttccgctatgtaataagtactctgattttattgtgacatttatctctatacactttgttattatatatgttgtcttctttggcgcatgtgtaaaaaaaaaaaaaaaaaagcggcc

SEQ ID NO: 52200 - DNA, 484 bp, Zea mays
  Clone ID: MRT4577_147606C.1
tatctcccaatacccgagcaccctactcgctatctatgtctattgcggcaccccggatctccagtagggactcagttcgttcagctaactacactcgtacgcaatggcccccacggcgtaccgaggcgtcgccgttgctagcagcagtaggccaacggctccggccagcacaagacgcggcactcctaggtcggccacaagagtctgctcaagagccacgacctctaccagtacatcctggacactagtgtgtacccgcgggagccggacagcatgaaggagctccgcgagatcaccgccaagcacccatgcaacctgacgacgacctccgccgacaaggtgcagtgcctgaacatgctcatcaagctcatcggctccgagaacaccatgctgatcgctgtctaccaccggctactccctcctcgctacggcgttcgtcctcccgtaggacgcccctaacttgctcatgaacatcaaccgtcag

SEQ ID NO: 52201 - DNA, 599 bp, Zea mays
  Clone ID: MRT4577_147607C.1
ggtaccggcccctcccctgcggattttttttttttttttttttttttttttttttttttttttttttttttttttttttttttttttttttttggacaattccaatggggcttttccttataccctttacaaaatttacaggggcccccttttattgtttgcaaagcaacctgccttgaaaggccccaaagagggcttggacccatttaaagaatttaaagggtccaaatttacctggtttgttaaaacaaaattcggcccgatgtcctggggaaaaaatatgggggagtttcaacccccctaaatggcaaaacaaaaagccctcaaatggcccatttttttacagacatccgtaaaatccggggggccctgagaccctttttaatttattccccccgccccaaaaagctagctggtttttaaacttatttaatcggggccgccaggttggggaccatgtagggaaggatccccccatggttgaagtatgggccctcaagctgggtgcccaaccaaaaagggcaagtgaaggatctcccctcggggtttggaacggccacctcctggcctgaactgaactcgggggtcctggtagggag

SEQ ID NO: 52202 - DNA, 558 bp, Zea mays
  Clone ID: MRT4577_147608C.1
taataattttttttttttttttttttttttttggttttttttaatttttttttggtttttttccttcttttgggcaaataaaaaaaacaacatatcatctaaaccaaaaaaaacaaaaaaaaaaaaaaaaaaaaaaaaaaaaaaaaaaaaaaaacacaaaaaaaaacaaaaaaaaaaaaaaaaaaaaaaaaaacactaaaaaaaaaaaaaaaaaaacccacaaaaacacaccaaaaaacaaacaaatccccaaaaattccacctcaactcacaatctcgcaaaaaaaaacctacaaacaaaccaactaaacccgaagcaaaaaccatcaaaaacaaaacccgccctctaaacaaaagctaactctccaacaaaaaaagagccccccaccccaaaaccctataaacaccaaaaataggccccacgtacctaaaacaaatcagtaccccaaaaaataccggaaataaagtgacccgaaaccccaaaaaatcataaatcaggccaagcccctttgaaaaacccaaaaaaaaaagaaccaaacttaaaaccccctctcttat

SEQ ID NO: 52203 - DNA, 384 bp, Zea mays
  Clone ID: MRT4577_147609C.1
cccaattcaacatccccatcgtatccaggtgccgatacgagatatctaatatgtgatccactgtttgctaatgcaagaccaccattaacccaaagctcatgagaatagaattcctcagctaattcctatgccacattagcttgttctgacgcaccttaaatcccaatatatgatctggattcctttgccgcaccatcacgcttttccacaatcccaactgctagagatcctatattttggcctgactcgcaattttacattaacaatgacgctcggagctacaactttaatatattaacttccctaattgggtacattattacacttatggcgaatcctactgagatgacaacgcattgcacagttaactccggcctcatgttc

SEQ ID NO: 52204 - DNA, 758 bp, Zea mays
  Clone ID: MRT4577_14760C.1
gggaccctcgaggccggccgggaaagaaatcggtgagctagaaacttccaaatcgaacggcaggccgaaggcacaacccggaaagggaccagcagcgcaaaggtgagcgagctttccttcggaactctctcgtgctcacctcatccgtccgacagatccacacgaatcctctgattcagagcagggtgttggcattgatcagacgcctgccatggcggatcagttcgaggattcggcgaacaatgtgatcattgaggaggtgaacaagggcctgaacccaggaatggtggttctgcttgtggttgcaagcttcctgctgatcttctttgtggggaactatgcgctgtatgtgtatgcgcagaagacgctcccgccaaagaagaagaagccggtgtcgaagaagaagctgaagaaggaaaagctgaagcagggggtctctgcgccgggagagtaaacggccatgctgccgatcctcccgtccagagctcctattcacatgattattagagaaaaaaattatatatatataccagatggagccgtagtgttggagtaactttgttctgtagatgctctgtctttaatggtacatctgtattggagactttgagaccttgtttcagcaactgatgaatcttagcctgagccgagctagtatgcttcctgtttcaaaaaaaaaaaaaaaagcggccagatggcgcatggttctagaaaaaaactcaaggggagctgagccagcgaaacaaaaaaaaaaataa

SEQ ID NO: 52205 - DNA, 154 bp, Zea mays
  Clone ID: MRT4577_147610C.1
tcccccggactgctttaatgaggcacgaggatttgggcgatgcgcggctactcaacagctgagagtggagtctaggggcgagagagggagccactataaactcaaagactgagatgtgctctatatctggccagagagccgcggctgtgatcta

SEQ ID NO: 52206 - DNA, 272 bp, Zea mays
  Clone ID: MRT4577_147611C.1
attcggctcgaggcgtattgttcagcacactttttttaggccgccctttatttctaatatcatggggggttttttaaccggttccggcggtactccccgcatcttccttctaaatgacctaaagcgcgcactcataacccgtgaaggtgacactcgtgacaacattccaaatacgcgtccaattgccatacacatcaggggaaatatcgccgtagcgtatggataggagcctgaagctatccacctaactataataaaaagcactgcaacag

SEQ ID NO: 52207 - DNA, 382 bp, Zea mays
  Clone ID: MRT4577_147612C.1
attcggctcgagggaatgcactccgttgttaactatttgatgaactgggaagagttgctggcaatttacctgtggaccggttgatccgccttgggaggctgccttacatgggtccttcagatggaaaatggggcggacacaagtaggattacctcctgtgcatgggtcgcgacctgaagctcacccgggattctgaataggtgggcgacttcgagtacgataaccgcgatcaggtgatggagctgctcatgaaagctggatgctggagaagatggcgttacgatgttctctacgatcatgctggtggaggacaacttccatatgggttggcgggatcatctcgagcacgggactctgcaggtggcagcggacatgaaaacca

SEQ ID NO: 52208 - DNA, 428 bp, Zea mays
  Clone ID: MRT4577_147613C.1
attcggctcgagggcgtcctgctaggacgtttttttggcagagctcccgcgctggatacgggagccaatatttgagagccaccgcggtacaatacccgcggaatccgctcatgtgctcaaccgcttttaacaggacagcctattccttagagcaccgtggggaatggagggctgaacatacacaactgatcctacacgtctgacccatgacaaacccaccgaggtactaaacaaaagggacagggtgtgctgagacaacatgctgtagtacctgattcactaacaactgagagaggacatccacggctacctgtacatgttgagtacatgtatacacgaaatgctagcgcctatcgactcattgacgagagagcactggccactactgatatcaggatttcattgaatccctatcctcactagtgttg

SEQ ID NO: 52209 - DNA, 431 bp, Zea mays
  Clone ID: MRT4577_147614C.1
ggggggaaaaaacacacaataactcgggttattaaaattttttttggaccctctatgcccatacatatacccatttcattagatctatataagggagggggctaaacttggtcaaatttttttccccccagacttgcccaggaaacatacattactccacgattgccacccgatccaagggcgggtttgctttgtactggcgacgaacaaaaatttgggggccggccgggccattttttctggttgggaaatcgaaacccccccctcacttattaagccccaaccggttttgggagggggaacaaacggggtgatgaggcgtactccaactcaaggccccaggttggacatttcacgctgttttttgagccaccccttggccctgacagtttgggacccaaaaaaggaagggttttattcccccagtttgg

SEQ ID NO: 52210 - DNA, 299 bp, Zea mays
  Clone ID: MRT4577_147615C.1
ttgttttttttttattatatttatatttattattaccttaccttagtagtcgatagatagtagcataaaaaggcgaaccaaggcagcaagccatgattataggaatagggccacacagcagcgtcatacatctacaatatcgactaaaaaccccaaaaaacttaatattcccaaagaaagaaaggaccaataaaactttttaaaaccccaacttagggcaaaagatagtacccgggccctcaatatcgggcaccggactcgataaaaaggccgtcggcccccagcaccggagccggaga

SEQ ID NO: 52211 - DNA, 348 bp, Zea mays
  Clone ID: MRT4577_147616C.1
aaaaacagaaaccccgggattcaggaagcagccccaaaaaactagctgaagcagcctacccaaaaaaaaacccaccacacccctttttcgctgggaaagaggagctaaccaaacaacggggggaaggaaaagccggccacccgagcattatggcggcacaggccaaaagggcttcatccccccggaatcggcgatctggggggccagggaaaatctaagggaccccatctcagggatcttggaccccacccccactggaagcccggaccacaggctgaaagggacttgcccaaacagggaaaaccccttggaaaaggagttcatgcccccgcccgggcgggaaagggg

SEQ ID NO: 52212 - DNA, 187 bp, Zea mays
  Clone ID: MRT4577_147617C.1
aattcggcacgaggctcagactggctttgttcctcgcggtcgaccgaggctcgcacgaggctctaacttgttctacctgcgccctggcttgacaaatgaagataggctgccttgctttgtttctgctcttctcctgcgatgtttaaccaatttctgttagccaaggatcagccgacagaggtgcact

SEQ ID NO: 52213 - DNA, 278 bp, Zea mays
  unsure (1)..(278): unsure at all n locations
  Clone ID: MRT4577_147618C.1
taggggccttttttttttttttttttggntttttttttttttttttttttttttttttttttttttttttttgaacaaaaaatttgccaaaaggccactttttattggggcccacggggatatggataatttatgaacaggacatatttcctgctggcaagcaatatgttggaaaaattaggggaaaggggtggtcctttcggggaaaggtgacacctaaagtcaccgggggaaattcatgggacatggaggatttggtccaaatttcccctcaaaga

SEQ ID NO: 52214 - DNA, 595 bp, Zea mays
  Clone ID: MRT4577_147619C.1
gtacccgggttcccccctcgagttttttttttttttttttttttttttttttttttttttttttttttttttttttttttttttttttttttttttttttttttttggaaaacaggaaagggttttacggggtcccaaaaaagggaaccgggaaccccccccaaacaatggggtttttgaaaaaagaatccccaaattccttttggggtcccttttttgggaaaaaaaaagcctttcaaaaattccttttttttggggccccattccaggaaaaaaaggggtttaaggatttaaagtttaaaaaaaaaaaagcaaggggttttgggaaaatttaccccccctttttgggaaaagggtttaaaaaggcctttttggggagctttacttttaacccttttaaaattttggggggggaaaaaatccccccccccccagggggaacccccttgttccattgggaatcccgggccaaaaaaaaggctggttaaaagacccgaaaccacaacggccttggtgggtggaatttgggggaaatggaccttgacctttgacccatccttttcgcccctaaaaattgggctttgaaactgggggc

SEQ ID NO: 52215 - DNA, 522 bp, Zea mays
  Clone ID: MRT4577_14761C.1
cccacgcgtccgctagttctagatcctacgttcacgcccaaaaaaaaaaaaaaaaaaaaaaaaaaaaaaaaaaaaaaaaaaaaaaaaaaaaaaaaaaaaaaaaaaaaaaaaaaaaaaaaaaaaaaaaaaaaaaaaaaaaaaaaaaaaaaaaaaaaaaaaaaaaaaggggggggccgttttaagggatcaaattttttttccgggggtttggaaagaaatattttttttttgggggccccaaaattaaattaatgggccgggtttttaaaacggggggatgggaaaaacctgggggttcccaaattaaaaggctttggaaaaaaacccctttttccaagtgggggtaaaaaaaaaagggcccgaaccgaaggctttttcaaaaatttgcccaccctaaatgggaaaggggaccccccttgttggggccctttaagcggggggggtgggggggttccccccagggtgaccgtttattttgaagggccttaaggcccgtttttttggtttttttccttttctttt

SEQ ID NO: 52216 - DNA, 2537 bp, Zea mays
  Clone ID: MRT4577_147620C.1
aagtaacccggtttgattttgtttgtccaaattagtttcaatttaataccttctcgagttttgcttcctgtttttatcctttgggtttactaaattgcttagactatttgtggatctgtacatattaacttaacacctgcaagcacactgttgctaaatgttgatatatggtggtcgaatgctacttaggccccgtttcaatctcatgggataaagtttagcttcctgctaaactttagttatatgaattgaagtgctaaagtttagcttcaattaccaccattagctctcctgtttagattacaaatggctaaaagtagctaaaaaatagctgctaaagtttatctcgcgagattgaaacagggccttagtacgcattgtagtctaaattcactctataactggtatcagctattacatgttgcaaagtgttgatatatggtggttgaatgctacttagaatgttttgtagtctaaattcactatgcaactggtatcaactatattacataaaaataacgttatatgcttacattttgtttcctgcctacatattatataatcatattatatttaaatttgttttacatggctgggtacttacaccaaactcttaagacatatgtgctcacgcgcgctgggcgcgcgctaaacactagtatagagtagtagagattgaatggctgttcagggcagtgtgttgctacagttcctcgtttataccattactggtcttcctatctctgtcattgctggcactaatagcagatcatatctgcatgtacttttatagactgtatcaattaggctagattagaggacattaggaggatagctttgattctttcctttgcatgtacagtccttcgcataaatccagcctttgcatgtataagtacagcctacacaatagagaattcgttccacctaatcgcctatcttctttcactgaggtcctatcacttgacggaatgcaatcgtgttgggcaggtctggatgagatttcatcgaaacatttgtcaaattatgccatgggagcatcttaggctgttgcattgatttggctgatggctgtagttctgtattcaaatgttcccaatgagccacctttttaaatgtgttcagtgcctcttagaatatgcacagatgagtaacatactaccgtgctgtagtgctggactcgaactactataaatttgcctttctggttatctggtataagttaagattaaatgagccacaccagcagctcccaatctttatgaaatgaatgcaaagccaatggcaagcgaacctgcatggatccatgttttgtattgtggagtaaatcatatttgtttgtgcaatacatgttgtctgagagaggtcgcggaacaagggctgttcgggtgtgagtatccaaaaaaataaatgaatttgttaggtttcaattacttcttttccctgcattttacttagttatactggtagcagcggtggcctgtatgttgtcctggacccgtagaataccagatctaagaataaaaaacgtctgcagcggtatccagtacctcgtcctgtattatccaggggggcggctccatcccgtagatatgggggacaagagagcgtccggcaagtcctccagctcccggctcctcctctcattcgcgtgattgggcatggacccgtaggacatagaggatatgccttataggataccgttgcggataaaatttatttacgggaagaaatcttttggaggaatctttaaattagtatttaggggatgcaatatacaggctaccgttgctaccagtcttagggctagtttgagaacccttttttcccaaaagattttcatttttcaaagaaaaattagttcatttttccttgagaaaataggaatcccttaaaaaaatagtgttttcaaactagcccttaatgttttttttcatgaacagaagctgcggccgtcagaaaagcttgacaggtttcttgagggtagaaacttatatgaagggatcttccgtaaccacatccagattgtttcattgaggcttatacggtaaaaattcttctgctagtgagatcaagattaagggtacaggagttgcatggacccactagaaattggtggccaaagtaccaaacgagttctttgaaacagcttcagtttttcttgttatgtaccaaatcggtctgccactagtgcaatgaccacagaaacaaaaccagggcaggttcccacttcccaccgtgtaaatagagatgcagtcgtcatttttctagctgtcatttttctagctgggttctagtctttggacgacaaatacaagagtagggttgagattgaccatccgtacgtgcttttcttttttttcatggctcccaatctatctttggttgtatttgaatcttgtgctggggtccaatgcgtaatcttctcgttttgtgagggattctaaagctttgatctctgaagtgacttttctgcacaaatgtatgattagctttacatctggactgatcactgatgaagctgccgattgatttct

SEQ ID NO: 52217 - DNA, 318 bp, Zea mays
  Clone ID: MRT4577_147621C.1
ccgccatccttacttattttgtgtttaaaacgacagacttcgattgcaaatgcaaacactatagcagtttagcaagtgatgatggcaggaaacacccaaacattacccagagggccaggacacaaacaaaggtttttaaacaccacaacctggttcgacaggcaaacagatgcatgcaagcagatcagtatttctactgcttgtaaccgtcatcactgccgccctgtgaggagacctcctggaattccttcttcagggcggacaggttcttgagtgcctacgggaactgcccattctgcatgccctgcgcgacgtacc

SEQ ID NO: 52218 - DNA, 277 bp, Zea mays
  Clone ID: MRT4577_147622C.1
ttgatggccatgatcactcgactgcagatcagatcaagcgtccgaagcgctacacgctacacctcaatccatcggaatcgaggagctcccaagttttggccgcttctacttccaacctgcaccttcaaccacacgcacctttcacgtcccaaggaacatgctggctctggcatctccagaaatagatcgctggctgctcgctggttttgaggacgagaagacgtacattgcgaaacgtttgcgggagttgaggaagccttcgtgaattctcaaacaa

SEQ ID NO: 52219 - DNA, 3691 bp, Zea mays
  Clone ID: MRT4577_147623C.1
gatgccagtagaaatcaatcggcagcttcatcagtgatcagtccagatgtaaagctaatcatacatttgtgcagaaaagtcacttcagagatcaaagctttagaatccctcacaaaacgagaagattacgcattggaccccagcacaagattcaaatacaaccaaagatagattgggagccatgaaaaaaaaagaaaagcacgtacggatggtcaatctcaaccctactcttgtatttgtcgtccaaagactagaacccagctagaaaaatgacagctagaaaaatgacgactgcatctctatttacacggtgggaagtgggaacctgccctggttttgtttctgtggtcattgcactagtggcagaccgatttggtacataacaagaaaaactgaagctgtttcaaagaactcgtttggtactttggccaccaatttctagtgggtccatgcaactcctgtacccttaatcttgatctcactagcagaagaatttttaccgtataagcctcaatgaaacaatctggatgtggttacggaagatccctgtacttgagaacatcagtcttgtccaaatcatactcctggcatatactcgaaatggtatgacagtccaaaccttcatataagtttctaccctcaagaaacctgtcaagcttttctgacggccgcagcttctgttcatgaaaaaaaacattaagggctagtttgaaaacactatttttttaagggattcctattttctcaaggaaaaatgaactaatttttctttgaaaaatgaaaatcttttgggaaaaaagggttctcaaactagccctaagactggtagcaacggtagcctgtatattgcatcccctaaatactaatttaaagattcctccaaaagatttcttcccgtaaataaattttatccgcaacggtatcctataaggcatatcctctatgtcctacgggtccatgcccaatcacgcgaatgagaggaggagccgggagctggaggacttgccggacgctctcttgtcccccatatctacgggatggagccgcccccctggataatacaggacgaggtactggataccgctgcagacgttttttattcttagatctggtattctacgggtccaggacaacatacaggccaccgctgctaccagtataactaagtaaaatgcagggaaaagaagtaattgaaacctaacaaattcatttatttttttggatactcacacccgaacagcccttgttccgcgacctctctcagacaacatgtattgcacaaacaaatatgatttactccacaatacaaaacatggatccatgcaggttcgcttgccattggctttgcattcatttcataaagattgggagctgctggtgtggctcatttaatcttaacttataccagataaccagaaaggcaaatttatagtagttcgagtccagcactacagcacggtagtatgttactcatctgtgcatattctaagaggcactgaacacatttaaaaaggtggctcattgggaacatttgaatacagaactacagccatcagccaaatcaatgcaacagcctaagatgctcccatggcataatttgacaaatgtttcgatgaaatctcatccagacctgcccaacacgattgcattccgtcaagtgataggacctcagtgaaagaagataggcgattaggtggaacgaattctctattgtgtaggctgtacttatacatgcaaaggctggatttatgcgaaggactgtacatgcaaaggaaagaatcaaagctatcctcctaatgtcctctaatctagcctaattgatacagtctataaaagtacatgcagatatgatctgctattagtgccagcaatgacagagataggaagaccagtaatggtataaacgaggaactgtagcaacacactgccctgaacagccattcaatctctactactctatactagtgtttagcgcgcgcccagcgcgcgtgagcacatatgtcttaagagtttggtgtaagtacccagccatgtaaaacaaatttaaatataatatgattatataatatgtaggcaggaaacaaaatgtaagcatataacgttatttttatgtaatatagttgataccagttgcatagtgaatttagactacaaaacattctaagtagcattcaaccaccatatatcaacactttgcaacatgtaatagctgataccagttatagagtgaatttagactacaatgcgtactaaggccctgtttcaatctcgcgagataaactttagcagctttttttagctacttttagccatttataatctaaacaagagagctaatggtggtaattgaaactaaactttagcacttcaattcatatagctaaagtttagcaggaagctaaagtttatcccgtgagattgaaacggggcctaagtagcattcgaccaccatatatcaacatttagcaacagtgtgcttgcaggtgttaagttaatatgtacagatccacaaatagtctaagcaatttagtaaacccaaaggataaaaacaggaagcaaaactcgagaaggtattaaattgaaactaatttggacaaacaaaatcaaaccgggttacttttctttctccaaaaagcaactgtgcaagatgctatctttatttaagaaaacgatgcaattaatttccttgtttttagagctttccagaacaaaaaaatgatgcggcagatttacacaccatagtctggagcagaacaatcagagagtagatggaagagtcgggacagagaggaacaactttttttttccttcaaaatatcagttaaaaccctaaacccaaaattaggccgtaaaaagggatttcctcactactaaaccagagaagaaaaatagtggcgtgttggaatcttggtgcgttcataaacaaaagaaagcgaaatctcaacttcgagtagattattttacccaaaggaaattagttgttaacgaaattgaaatagttgacaaaggaagaatggaaacacagttggaagaatggaaacacagccaaaaaataagatgacagcaaaaccgttaaaaaactaaaaagaatgcaatatgcacttgatgcgaacaactttaccaaaagaaaatagtataatgaagttcaataaagtacaaacagaacataacctgcccttattgaagttcaatgaaataaaaaacatttacttgcagatctaaatgtaccaaagcaagaggatacgacaaaaaacaatagattggaattggaaccagatgtccacatgcgaaagactttaccaaaaagaaataattgccttttcagtctcaatctccaaaatagagttcaatgaggtagaacacttccttatatgtctgcacatgccaaagctatcaaagaaaaatacttgccttttcggtcccaattttcatctcggtaaaaagcaagaggatctcgactagagaagcctggatctaatccacaaaggaatatggaaaaagatatccaccgaatggaaacgcacgacgaaggataaaggggaaaacacatctcaccaaacaaacggagccactgagcaagctgacaatagacgaaatattcgtgtggaagcggagttcctgacgcctgacgccgacggtagcaaagaaaggcagagaggaggaaaagcgagaaagcagagaggaggaaaag

SEQ ID NO: 52220 - DNA, 819 bp, Zea mays
  unsure (1)..(819): unsure at all n locations
  Clone ID: MRT4577_147624C.1
ccgggttttgataatggctttggctatcactgtaacatgcttcattttcttttaatatatattttttcactgtggaggcttcccctacatttttctcgggaaaaaaatatggttgtctgatagccccttggaaccataatcatagggtttcctttaatcccaaagatggctacgtgccctataaacactctaggtagaaggccttttgtgaatagatctgctgatatcttatggttctgatattatggttctgatatgctcaactttaatagtttgatcatgaatcttctccttaacaacataatgtcaatgtacttggcaatcccacttgacttcttgttgtacgagtaaaatactgatgtctgattgtcgcattatatctttagtggtctttctatactatccaccacacttaactcgggtacatatttttttagccacatcgtctgtccagttgtctcatacatcgtgacaaactcaacatgtattgttgacaatgcaatgattgtttgtttgtagcttgtacatcgtgacaaatttctttagccacatcgtctgtccagttgaggcagtaggaggttgagtttggttggttaaaaggaccgaaggcatttaatacctcctaaataacataaatgagattgccatctcatgttctttccacagctgcagaaccgtgttgcttttaatatgtgccatctttggtcatagttactattactaacttgatattgntgctcaagaatattcatgtctatattgacatgattttatgtatgcatgcatgattgattttgtgcctacacatgacacttggca

SEQ ID NO: 52221 - DNA, 282 bp, Zea mays
  Clone ID: MRT4577_147625C.1
gggggggggggaattaaaactttttttttggcccaaaattttcccggaaaattaccccccaattggggggaaacgggatttttggccccctaaaaaatttttttgttggtcccaaaaaatagcttttggggaattgccggtttttaaaaaaatgttttcttaaacttaaacacaaaagggggggggtttttccaaaagggggttgtaatcccaaattgcccgttttcttttgcccaaggctagggaaaacttttaaaaaccctaaaattgaatttgttgggg

SEQ ID NO: 52222 - DNA, 555 bp, Zea mays
  Clone ID: MRT4577_147626C.1
cccacgcgtccgggccgcccttttttttttttttttgtacatagcgtttacacttgaattgaaccaaacaatatatcggatcgcagcgtttacacttgaattgaaccaaacaatatacgcagggtcgcaggcagcggctgaccagctcgctagcggtggcggctggctgttggagaacgcagccacacagggtcgcagcctcgctcctcgcagggacgccggacctagaccgctggacgacagccggacctggacggcagtcggcaggaacgcaccacgggtccacggcagccggacctggaccacggcagcctcgcagggacgtagccacgcaggaacgccgaacgcaccacgggccacggcaggaatgcaccacggcagccggacctggtttggcctttctggccgccggcggctggcggatggggtggcgcggctgcttgtggctggagcgctgggcgtgcaggcggctggcggatgagaggattgagagcgagagtgcgagacagagagtcagagagagacacggcgtgagagtctggttctagatcgcga

SEQ ID NO: 52223 - DNA, 338 bp, Zea mays
  Clone ID: MRT4577_147627C.1
gccgatcattctctcacttatccactctttcatgatcaacactcccaagcgtcccattgggagccaccacccttacatggacattctaatcgctatgtcgatgatgccgtcgatagatgcctgcgctgcattctgactaccctgcacaacagtcaacgtagacttacacttgcttctcatgctcatcaaagagctccatgaactgaatgacgcccttgtctgaaaagcctttgtgcttaagggctacaacgaacagacagatgcacctattatcaacgatcaccgattctcacgaaaatctctgaccacaagtacccatcattttttatgatctatct

SEQ ID NO: 52224 - DNA, 467 bp, Zea mays
  Clone ID: MRT4577_147628C.1
acaaaacaagtcttttaacagtttttattcattgtgtaaactttattgtggaaggccccagagccgccgaaaacaaaaaggggccaaattggttttttttcgggaattttctcggagcaaggtattcaaaaaaaactttttcaggtgggccaaaaaacaaggttttttaattgccattttgaagaatacaccaaggccccctacggtgttttaaccaataacaaattggggttaaaagggaaaaggcggcccttggaatgattccaatccccagaaaggcaagggcgggggaggaacacctggggggtgggggaccacaccaggagaagttttttttgggctcaccgggtgctctggaggggtttttctaggacctggagttttacctgaacccccaccgggggtaccccctcttttggggggcccagttgaagggttttttgaacccaaatcatttaaagggggag

SEQ ID NO: 52225 - DNA, 657 bp, Zea mays
  Clone ID: MRT4577_147629C.1
tttttttttttttttttcgtctagatcgagtggcctgaccagctgatccatggaagctgccatggaaagaatcgtgtacgacgtagtagaaggagactacggtgaattcataaggtgctccgcagggtgctcgccgagtacgaacccgccggcgaccggcagagcgtgctggactaccagcacgcgccccaccccgtgctgccacggcaacgcagccctcgccgcccggcgcggtggatcctcatcaccctgcgggtccgcgacgagggccacgagaccacgctggcggtccgcgacgacaacgtctacctcatcggcttcagtaaccggcgggggaagtggttcgaattcggcttcggcggcggcgacggcggctgcaggagcgcgcaggtgctcccggcggattggagctccaccttcctggagtgcgacgtcggctacgggggcatgatggtcggcggcgccatgaggctggtgggtctggggctcggcatgtgcttcgccagagacgccgtgcgccggctctcgtcctacgagcaggaaccaggcgtccaagtggacgaccggaccaagcggcacctggcgcggctcatcgtcatggtctgcgaggctgccaggatgattcagcactgcgagaccgtgctcgacgactgggac

SEQ ID NO: 52226 - DNA, 266 bp, Zea mays
  Clone ID: MRT4577_14762C.1
gaggaaccactcagtgctccgccaggagatgtatgcagctactacggtctcatcgtcatcgacgatgaggtcgtcatcaccaccgacgagatcggcaccatcgtgcaaggcaggaaacatcatggacgagtgctactggtgggcgctcttcttcaacctcctgcagaagaagagcggcgacgaggtcatcctctactgtggatctggtggtgcagatgctgcagtagctcgctgccgagcctgctggtggtgctgcggagcatcca

SEQ ID NO: 52227 - DNA, 132 bp, Zea mays
  Clone ID: MRT4577_147630C.1
aaggctccttcacgtccaattgtactgctgcatgcctggagcaacagacctggtgttcagaagactgttcagcgtagcaaagtccagccacatggacatgcaagtgaacagaatgggacttacagtacatag

SEQ ID NO: 52228 - DNA, 164 bp, Zea mays
  Clone ID: MRT4577_147631C.1
tgttggcaccagtcagcagatatttttctacatcacacagttttcaccatattccaataacaacacttccaaatgggataagagtagtcactgaatcaaaaccaagacaaacagcagccattggagtttttgtcaacacaggaagtgcccacgaaacagaacat

SEQ ID NO: 52229 - DNA, 319 bp, Zea mays
  Clone ID: MRT4577_147632C.1
cggacgcgtgggcggactcgtggggccacaactccggccagaagctagctagccaagttattagctagtacatactagtggccggccggacacgatcgatgggcaggccgccgtgctgcgacaaggcgggggtcaagaaggggccatggacgccggaggaggacatcgtcctggtgtcctacgtccaagagcacggccccggcaactggcgcgccgtgcctgtcagcacgggcctcatgcgctgcagcaagagctgccggcttcgctggaccaactaccttcagcccggcattcggcgcggcaacttcacaccccacga

SEQ ID NO: 52230 - DNA, 626 bp, Zea mays
  Clone ID: MRT4577_147633C.1
gactcccgcgccaaggccgaccagttgggcgagtccatcctattctggttctgccacactaagggtccatattattttgaagacttggtcgatatgatgtatgacaaaatttctgaatcttttaatgcctactttgaagataatagtattgaggaggttgctgaacagtttttgatcatacatgaagaatgcctgcaaaacaactattcgtctgtagagaagctaaggaattctcatgttccggggaatgctgtttctcaaagtagacagatagtgggcgatgacgacgatgacagtgatagctcagatgacggtgatgacacatcgatggctgatgaagaggctgggccagaagagatggcagtggacaggccaaggccccccaagcctactccagacgccgatgggtggactgttgtgcctcctaggcgtggtggtcgcagcaagaaatagctacctgccggcattctcgcggaatggtttcatattcacttgtatcgctcgatatttgacccgacatggatatgttgagtgtgtagtatgatgcttggtttgccaccgcccaccaatttggtgtaaacaaggtaattattatatatgcatcctttgatcaggttttgagtgtt

SEQ ID NO: 52231 - DNA, 311 bp, Zea mays
  Clone ID: MRT4577_147634C.1
cggaaataatctgcgcggggacgacgagcatctttaggcggggggcgcccttttttttttttggttgggcttaatgtgcttgcttcttattatgctcagacggaacacctagcgcttgctacgagcatttaagcaggttatccacagttgtgagccacatagctaatcagccttgacacagtatattgaaagaacaccgaactgactagtgtcagacagagaacttagacatgctacagaccctatgacggagaggagccacattgcttcgagtacaaaggcgactaggacattcagaatttcactaaggt

SEQ ID NO: 52232 - DNA, 349 bp, Zea mays
  Clone ID: MRT4577_147635C.1
ctacctctcccaaatttattttccactacttttaccactaggacgtgcatattgctcctcctgctatctataacgactacaatctacctaatcttctctgctatacactactaatccccattccattttaacacaaacatctactcctttgattcctaataccatcttctaatatcaatatacttctcaatcacatatactatatcctcacattttcataattttcaataacttattctatcaagcatccaatccattctatattaattaaaatctgtcctctgtaaacatgtcaacttcctatctttccacattctcaatcaatctaaatcattacctattcatctct

SEQ ID NO: 52233 - DNA, 1006 bp, Zea mays
  Clone ID: MRT4577_147636C.1
gcacgaggtctgcgtgtctgcggctggttctctctgccaccgcacgagtcgcagcagagagggaaaaaccctagcagcctccctccgtcccaactcccaaccccgcgaccccatggccgcatctaacggcggcggcggccccggcccgatctccgcagaggcggaggcggcgcttggagaggctatcaggctggtgttcgggcggtggacggcgctgcagatggcggtggagaaccagtggggcggccgcgactcccgcgccaaggccgaccagttgggcgagtccatcctattctggttctgccgcactaagggtccatattatttcgaagacttggtcgatatgatgtatgacaaaatttctgaatcttttaatgcctactttgaggataatagtattgaggaggttgctgaacagtttttgatcatacatgaagaatgcctgcaaaacaactattcgtctgtagagaagctaaggaattctcatgttccggggaatgctgtttctcaaagtagacagatagtgggcgatgacgacgatgacagtgatagctcagatgacggtgatgacacatcgatggtggctgatgaagaggctgggccagaagagatggcagtggacaggccaaggccccccaagcctactccagacgccgatgggtggactgttgtgcctcctaggcgtggtggtcgcagcaagaaatagagtacaatggtatctgctggcttttctcgcggaatgtttgttgagtgctgcggttccatattcacttgtatcgctcgatatttgacattttgacccgacatggatgttgtgagtgtgtagtatgtttggtttgccaccgcccaccaatttggtgtaaacaaggtaattattatagatgcatcctgtgatcaggttttgagtgttgccaaaaaaaaaaaaaaaaaaaaaaaaaaaaacccaaaaaaaaaaaaaaaaaaaaaaaaaaaaaaaagggcgaccgctcgcgatctagaactagtc

SEQ ID NO: 52234 - DNA, 420 bp, Zea mays
  unsure (1)..(420): unsure at all n locations
  Clone ID: MRT4577_147637C.1
ccgggttggcccaagccgtccggttcccccttccttgcctccttccccggcgccccgctcttcctccttccgctccgcggcggccggcacgccttcctctcccctccgccgccgagcctctgcggcgcctaccacaagacacaactcccagctcaaatgctccatcaagccctcgcagttcgagctgcggcaccgcgccgcgggtctcgctccggcgcgagctctgctccctgaccgcgtcacgccgttttccttcgacgcggacggcgacgaccatccccgagaggagtgcggcgtgttcggagtcattggcgacccagacgcgtcgtcgctctgctacctcggcctgcagaagctgcagcaccgcggngaggagggcgcgggcatcgttgcgtcggacgccgacggcaagctcaatgc

SEQ ID NO: 52235 - DNA, 462 bp, Zea mays
  Clone ID: MRT4577_147638C.1
gggccccaaaatctggaattattgggagggctcgggcacaaaaaaaaacaacagggggaagttgggagggcagggaaacaaaacgaccggtcaaaactttgggaaagggggggtttctgattgcaacactcgattttttccccctcacaaaaaggtgcaacccggactctgggaaaaagagagcggtccgggcttattctggggcccttctggggcggctttagggggcccccgcatgcgagatttttttgccgaaaagcccaacggttggtttccctggatccccccggttgggggggggttccccgacgagaacccctttgaccccagcgttttgaacgaaccattttttattaggggggaacagcgcaaattttcctacaaaaattacattcttttgagctaaaacccggcctcggtcaccttccaaaaacctttttggggttggaaaatcaacttcaa

SEQ ID NO: 52236 - DNA, 306 bp, Zea mays
  unsure (1)..(306): unsure at all n locations
  Clone ID: MRT4577_147639C.1
ntttttaaaaaaatccccttttccccaactgcnaaaataccttttatgnccaaacnaatncccctttcaaacatattnccaaccccaatgccaaatgtactctccctttatcggcccattacaccccaccttttatttggttacccccaatttaaccgttaccctttccaacnccctaaacccccccctttnacctttattcccttcttttttnanaacattccctttttttccccccaaagccctaaaccngggcctcccctttaacttttcaaattaatgctttaagggacctcgaccccaaaa

SEQ ID NO: 52237 - DNA, 766 bp, Zea mays
  unsure (1)..(766): unsure at all n locations
  Clone ID: MRT4577_14763C.1
ccggccggggtccgcccctcgctattctgattcctccagctccgcaccccgcgtgcgtgacatgaaaatcgagaccaaccccctacgagacagattcgcgtcggtgtctccacgcagatggcgccctacacagagactagataggcagcagactcggcatcgcatctccacccgttcatcagcacagcactatctgcaccctacgattttctcacgaactcactctcgtgcctacacnctcgactgataactcacagcactagcatcgacactgcaagtgacatccaagtaccctctctcgttacgacagacatacatgggagcaaccgatcaattgaccatgacgtacgccggatggtaatctcctttgcactgtgatgaatgagcacatgcactgatagtacagtggagttgcaccagcccgaacgatcatctagactcatgcaccaaagtgtgtgtgaccatactcagctgtcttgcgcaaagaatgaccaatatctactgccctctggttgacatgcttccatgatcgtcgacgaggacaatgctgacaagaacatctcgacatgtgacattgttacccatgatatgtgaaccactgactgcatagctccacttgctaatgtgttcatgtacactctgaattgatgatgatccgatgacaactgctcatgctgtcgctgactgcagaaaagtgaacacgaatgctcatacgaggactgatgatgaggcaaagctgccagcttaaacattgttgctagaatat

SEQ ID NO: 52238 - DNA, 1046 bp, Zea mays
  unsure (1)..(1046): unsure at all n locations
  Clone ID: MRT4577_147640C.1
ttttttttttttttttacactgaatcttttcgttctgtttttataatgaaaatttacagtaaaacaaaagaaaaaccttaccttaaacggccgtgaaacaggattaatttacagtacacccacgaaagaaacatacaaaaccaagtatagccaaaccaaagtccttgttattactggaccaagttttcagctcatagctagtcccagttcttgtaaacataaatttgaaatctgggaaactgcaggatagtgaacataaaaaccgatcaaatagcagtacagaggtaaggaacgagcgatgcatgccaatatgccatgcgaacctactgcaggtacacatcgacctccacgacgcctcccttggccaggtcgtagtcgtagctcctgctgagcgcgtagccccgcgcgaggcggaaccggccggtgccgccgacgaccaccgactcgcgcacggccaggtcggtgtcgaccctgccgctgaccaccagcgagctgcccgcgtgctccccggcctccagcaccaggtgcatgctcagcgcgttgacggagccgcgctccgccacgcgcaccgtgaacccctgcgcggtgccgacgcgcgcgctgccgcgcccgggcccctccgtgagcgcgttgttcatcacggcgatgtcgccgaaccggcgcgggtgctcgtcgtcatcgccgctgccggtggcggtggcggtggcggtggcgttggagagcggcggccttccgggcacgatgagcgcggccgtcgggttcgcgccggtgtactggtcgtgcatgaagaaatggaggtgcgttccggcggtgccgccgccgccgctgagcgtgccgtggcggaagtaggtcgctgcggcgacgaggatggcggttgagacgaggaggactgctgtagaggtcgtgctagccatggctgcttagaagaggaagactgctgtatagtgctatgcactatgaactatgaagtgaagtatcccggccggcccgtcaaggaacccatctttaaaagcggaaacgaaatgggcgcgttaagtnctgggtac

SEQ ID NO: 52239 - DNA, 542 bp, Zea mays
  Clone ID: MRT4577_147641C.1
cgttgctgtcgaggatctgcgttgcaattatgtcgattctggtactgatcacgacggtccagaagatcaaaaaacagagacttcacatcttctgcatgaaataagatgcttcctactcctttcaggactgacagaaccatgaactttccgtaaggagggagcctcaaagcagagcgcaagatgaaagtaagaatagtatcctttgtatgcggatcaaatctttcatggagattctcgggaaccagaatatctttacatgggctcagcatagatgaaatatatgcagggaagaaattttgcgtccgagcagatcatggtcttttggttaaccaacaattcaaggaaactaccaaaagttggagatgacaaacattgaggtaatttggtggtgtttccatttcttggtacagaagtgctcaagcgctgccacaccaaagataacccgtcaatacacttaattgcagatgcccttatatccttgttgacatgagcaagtggtagaataatggaaggaaaacctagtagaagctgcacacagatgc

SEQ ID NO: 52240 - DNA, 349 bp, Zea mays
  unsure (1)..(349): unsure at all n locations
  Clone ID: MRT4577_147642C.1
ctttctgtggtggtggtggaatttgagttcgagcttcgtttttttgggtcaggccggctcttgttcttgtttcttagctctcccggtataattcgtagttgtcggtgtaggcggatacggactcgttaagttctgttgctgcgtcgtgtgttgtgtctagctatgccttcgaagagtgtaaagtcgtagaggagagctctaattagccttagcctatattatagtacccggcgagaccgccatagactaccgctgacggaagccgcgacacggtcgcaagataggccgtaagtacctaccctaagaaccccaccgtgaanaatccgctatctaacgacttaaacgagct

SEQ ID NO: 52241 - DNA, 451 bp, Zea mays
  Clone ID: MRT4577_147643C.1
aaagcacattaccacaaatgtaaggggttttatcaatgattactttataagcacctttataggtacatgtccataagtgccaatgcctgggcgaataactaacggtaaaaaccacataacatggctgaagcctggccaacactgctgctactgcatctctcctgcagcaacaatacccccattgactggctattcccatggcagggatgaaggccaagttacaccttaaatgagtcatcctactgagtacctagaatttaacactgacgtattattttctggcagaggcactctcttggcaagcattcactgggtatctaaatccttccttgggtcagccaccaactgcaactgtgtgataacaccacattagtcgcgctaacatcattggttatgcctacaagttcccacttaggctctgtcctctgcaagacgtacctcatgggcgagc

SEQ ID NO: 52242 - DNA, 265 bp, Zea mays
  Clone ID: MRT4577_147644C.1
ctcgatctgacattgcacagttgtgcaagtgactactgtctgttctgataggacttaatttggctctatgtgtctatgatagctttgcatactctaaattatgttcagactcgagagatatgctactaaaatgcagattaaatcaaattatttccttattgaaaatctaattacgtgttttaaaaaaactacatagaataaatccagtctgtgtacatggcacacaatgtcctacctgatgtggatgctgaatattgctccgata

SEQ ID NO: 52243 - DNA, 451 bp, Zea mays
  Clone ID: MRT4577_147645C.1
tgggacgccggaagcaaccacgcgtgcgctcgtacgctctaaaaaccaacataaaatgtgtaatacttttcaccaatatagtaacaacggcgaccagcagtattttcaatccttatgcgtgcctgctctttcttcatctattgctaactcgacaattatccctcaatgctcacaagcacctatagcttggcttcttcacccataccttccatcaatgatagcttcagtatgtgaaaacccagctcttctaccctatacgctccaacaagcaatcgcatcaggcaacatacctttatcacccttgtttcaacaatctccaaacctatctttcgtgcaatcattggtactaaccatcacagcacagcatctacagcttctcgtgctatctatgatcaaccaagtaactctttcaaacctttctgcctactctcatcaacaacaatttcttcca

SEQ ID NO: 52244 - DNA, 374 bp, Zea mays
  Clone ID: MRT4577_147646C.1
agataagttgcatggatttagttttagggtgaacgacttatcttcattatagaaattacaacaccataaatgacacacaggcaaattggtacaattattaattacaattacttatctggtgagggctcgttggtaccaataaccttggcagattcatttagagctggaggcaagggaggataggaagggaaacaagaaactgacaggcaagctaattctatactcaggatgtgtggaggcttttgacggattaatggaccttttaagcaaccgtacagcttcaagtatgatagaggtgttcactgctttgcccttaagggaatactaaacgtttttaggtgtaaatgaatgagcaggtccatgagcaccaaacc

SEQ ID NO: 52245 - DNA, 571 bp, Zea mays
  Clone ID: MRT4577_147647C.1
aattcggcacgaggctccattaaagacaaggccaagcccatccatcctcttcctccctcccacctccatccccatccccatcttccaccctcccttgctcactcatccacacaccccacgcttgcaatttgcaattcccttgtttggggtaacaagccaagcaagcaaacctcctgctggctgctgtccaacagcaacatgcaacaacccaagcaaatcaaagcttcaccatcaccatcaccgccgaggtcaggtcacctcagctttgctcagctccctagccagcagtaactgcccagtggaagtgcagagtggcctgtgagtactggcagtacaaatcacctcacctccagttctgcccggctcgcctgccatgcagtccggctacggcggcgtgtccgagttccagcagttcatcatggacggcggctttgccatgtccgcgccgccgccgcctcagcagcagcagccgcagaccgccaccgtccaggagctgggcggacccttcaggtaccaggcggtgtaccaccacgcgctggcggcggaggtccaccaccacgcgccggacatg

SEQ ID NO: 52246 - DNA, 1257 bp, Zea mays
  Clone ID: MRT4577_147648C.1
cttttttttttgatggaaattagatatatatgttactgagttatacacggtgttaaatgtcacgacgcgcgtgtatacatatccacacgagtacacgacacgcgagggtttttttttttttttgaacataatggtaggagctctgcctctcaattaagaaggaattgacccagttttaagggaaaccgggcccaacagacaacaacaaccccacacagccacacacacaatgtccatcgtgagtcatcgttgcggagatcaacacaagtgacgagcagctccgactccccaagacaggcaacacaaggccgaaggaaacacgacgatgactacgaacaccgcagaagagaaggaagactgtggcacgccgtcgttgccaagccacgagatactccactcgagacaactccgattcttcaccagcgagacttccaaaaccttaatccaccaccccggtttgcacgaagatccgctggcacgcgcaccaccgcaaacgccggcggggccactgctgcccacatgcctacgccacacaccaccattgaggagccagatcctccgctcctcaccgtcgcacagctgacgcccgcccacagtagtagacaaggccgtgagggaggggaggggtggcaaagaagagagcgccgcgccacaatgcatgcacgagccccaaactgccatcgacgcaaccgccaccggccgccagcgccagctgctgagggcagatccggcctacacgccacaaacccaacaccaggaggagcacgcccgccagccagttccaggcccaccacgccatgtgtccgccgccgaaacggcgcagccccgccaccaccagtagatgccgccaatccatcacctggatgcacctgcaggaccagatgttgaaccaccgagcacagccccccgacgacgccggggacaaggaagacgacggcgtgggggacgacgcccgccccagcaaccccgcggctggaacttgaaccgcccggcacagaacccgctcagatctgagcatcggaagaccaaacgaaggagaaatgccggagaaacgccccgtagccgccatctttggaggtcgcgccggccttcggcagtctcctctggcgacggcgaggggggaaatagaggaggagagagtggcggcgctagggctggggggcctcccgtgtcgcccgagcggaggacgacgcgggggctgttccctggctgaggaccccggtttgattatccccggcccggccggcagggtacccc

SEQ ID NO: 52247 - DNA, 416 bp, Zea mays
  Clone ID: MRT4577_147649C.1
tcatttcaggttcatttatgacattggaccttggctgccagagctcgaaacgggcggtttcatagaggtcctacacggttacagtctactcaagcactaatttggtttggcgaatcgaacgctccttgataccaaaggcaaacgacaggttaggcctggacttgatcttgcccagcagcttaatctggttttgcctctgctgctcttcctccatttttttgcgagtcatggcctcctctctttctttctgaagcctcttcaactactggtaccgctctagctctttctgctgctgttccaacgcttgtttcatcaacgcctattcagctttctttcgttgttcttcaagttttttgtctagctgctcccgctattttctttcttgttccactttcagcttggcttcatttaaagct

SEQ ID NO: 52248 - DNA, 1130 bp, Zea mays
  Clone ID: MRT4577_14764C.1
gccggccgggtccaaaaagggggaagcggcactgccgtgtcgtctctctgggcgactccgccgccgccgaaaaaccaccaattgccccctcaccccgccgccgccgttgcctatccgcaccaccttttctccttcctctatccttctctttctccatcttgcgattgaacctctggcagcatcggcgccatccggtcggcggctgcgtggatccggggcctccagcccgggaagggaccagcagcgcaaaggtgagcgagctttccttcggaactcagaactctcgtgctcacctcatccgttcgacaaatccacacgaatcctctgattcagagcagggtgttggcattgatcagacgcctgccatggcggatcagttcgtggattcggcgaacaatgtgatcattgaggaggtgaacaagggcctgaacccaggaatggtggttctgcttgtggttgcaagcttcctgctgctcttctttgtggggaactatgcgatgtatgtgtatgcgcagaagacgctcccgccaaagaagaagaagccggtgtcgaagaagaagctgaagagggaaaagctgaagcagggggtctctgcgccgggagagtaaacggccatgctgccgatcctcccgtccagagctcctattcacatgattattaaagaaaaaaatttatatatatataccagctggagccgtagtgttggagtaactttgttctgtagatgctctgtctttaatggtacatctgtattggagactttaatggcctgagccgagctagtatgcttcctgtttcgtacaagttcttgaaatgctggtgatggcgcatggctctagagaaaaactcaagggagctgagccagcgaaacatgatctacctctacctctagagttaccaactatatgcagttttaagagctgcagtagtattatttttggagtaactcttatgttactttgaaatccttaaaaaacaaacaatttagacatggagtttaaaagtatctagctttcgtctaaaaaaataaaaaaaaaaggggcaagagagagagacacacatttgctcggtgtaatacgcacatgacacatggaggcgaatcttctatcaggtgcttggaaacttggatt

SEQ ID NO: 52249 - DNA, 412 bp, Zea mays
  Clone ID: MRT4577_147650C.1
attacacatgacaagctagactgttgtcacattgtttttatttggctcgactagcggcccaccaaagacataatcccacaagaggactaaacagagctctatcaacttcgacagtacataatcacacgttcttcttggtagcaaagtagtgctatatggctacaccaggtgtacaaaatagtacgctgatgttacgataatggcatatttgtataatcgtttggtctcctgatctgggaggcgcgcacgcagcggcggatcctcggaggcgtgtgcctaggagtggcgctcgctggcatcccaccttcggcaatgacgtcagtcttctctaggcgcgagcgactatgatggacttacctaagcgtgagtggtggtggatcgactaccctttttttatgcaacctagtataca

SEQ ID NO: 52250 - DNA, 372 bp, Zea mays
  Clone ID: MRT4577_147651C.1
tggatgtggcagctttggctttacgcatcttggaggaacaggagatataaacacacgcatttcgtttttttttttgttgagttgctgtgctccgtcttcgctgcagaatccagatcaaatgtggtggtggtggtgctgctgctgctggctacacgaatgtggatagcagcatttgtcgtccttgaatgcctgccgagaaaggttggtggtggtagagagagagagagaggagttcttctctcctctcgtctcgtctacctctgtgttctcttctctctcgcctcctcagatgggatggcattacatgtttccttcctggagaagaggctaccgaggccttttcttggtgacgtcgatgcgccaccagcccca

SEQ ID NO: 52251 - DNA, 1493 bp, Zea mays
  Clone ID: MRT4577_147652C.1
gccggccgggccggggcaccaccaccgtcactcaacacagcacaggcagttcgagagagagagagagagagagagagataaagatgtcgtggttcgggcaccaccaccacaaccagccggctcccccggcgtcgggccccaaccaggtgttcaagatcttctgccgcgccaacgagaactactgcctggccgtccgcgacggcgccgtcgtgctggccccggtcaaccccaaggacgaccaccagcactggtacaaggacatgcgcttcagcacccgggtcaaggacgaggaaggcatgccggcgttcgcgctcgtcaacaaggccacggggctcgccatcaagcactccctcggccagtcccacccggtcaagctcgcgcctttcagcccggaccaggaggacgcgtcggtgctgtggacggagagcaaggacgtgggcaagggcttccgctgcatccgcatggtcaacaacacccgcctcaacttcgacgccttccacggcgacaaggaccacggcggcgtgcacgacggcaccggcgtcgtgctctgggagtggtgcaagggcgagaaccagagctggaagatcctgccgtggggtcccgaggccaactccgccgcggcccacgcgggaggcccgcacgccgtgcgcgtcttctgcaaggccggcggcgaggactacagcctcacggcgcgcaacggcacggcgtgcctggcgcccaccaacccgcgggacgagtaccagcactgggtcaaggacatgcgccacagcacccgggtgcgggacgaggagggctacccggccttcgcgctcgtcaacaaggtcaccggcgaggcgctcaagcactccacggggcagggccaccccgtcaagctcgtgccctacaacccggactaccaggacgagtccgtgctctggaccgagagccgcgacgtcggcaacggcttccgctgcgtccgcatggtcaacaacatctacctcaacttcgacgccttccacggcgacaaggctcacggcggcgtccatgacggtaccgagatcgtgctctggaagtggtgcgagggcgacaaccagcgctggaagatcctcccttggtgaacgaacgaaagaaactactagctggtaccctaataataattctgctggctgcggcgatccccaaataaaagaggcagggtgcgatgcatcgcggtcttctcgactctcgagtggtgtttgcgttagacagccagccactgtgtggctagtgttccaacatttgtcagcctgcttgcgcgaggaagtgggggtgactgactcaagagaagggcctggtcataggctgctgcattatgaatttctgatcatgtcttatgtctgtactctgaatcaactatgtatgagatctcatctcctttctcctactgaatgaatgaatcattattggcttgctttgcttcacctgcttgaaagcaatgcattgtatggactaaaaaaaaaaaaaaaaaagcggcc

SEQ ID NO: 52252 - DNA, 384 bp, Zea mays
  Clone ID: MRT4577_147653C.1
caccaatcgcccaattgatactcccaactatgcttcctcaacgcaacatgcagcgcctcggcctccgtttggccaagcaggcccgtccttctcctgctcgcaacgtccagcgccgtttcaacagcaccgagaacaagccggactggattgtcgacaacgcgttcaaccgtgagcgtgagaacgtcaaacatcacgccgcttctaccagcactctctggttgagactttccatcttgtatgtacccgatcgacaaatcgtatgacattgctacttcttggctgatatactccatcagtgctgttattccttgcctcattggcggtggcataaacgcctacaacctgtggaacgagcactgggagcactggaaccatttgccccct

SEQ ID NO: 52253 - DNA, 287 bp, Zea mays
  Clone ID: MRT4577_147654C.1
agacactcaatctaaactatatggggaagggggaacttacagaggggcatgccgcacacaacttgatatcacgaccaggacggggcccacgcataaaacttggacataaaggggcgttggatatgaggaactcctaataaggggaccccaccatcccaaaagcgcaatcggaccgggtttggtgaacattattgccacgagaacaaatcacagcaagaacatttgaagggaacatgtggtgagggacccgaacacattcacattcttggacgtagaagatacaaaaa

SEQ ID NO: 52254 - DNA, 1967 bp, Zea mays
  Clone ID: MRT4577_147655C.1
cattgggtacctcgaggccggccggggcaccacccaccgtcactcaacacagcacaggcagctcgagagagagagagagagaaagatgtcgtggttcgggcaccaccaccacaaccagccggctcccccggcgtcgggccccaaccaggtgttcaagatcttctgccgcgccaacgagaactactgcctggccgtccgcgacggcgccgtcgtgctggccccggtcaaccccaaggacgaccaccagcactggtacaaggacatgcgcttcagcacccgggtcaaggacgaggaaggcatgccggcgttcgcgctcgtcaacaaggccacggggctcgcaatcaagcactccctcggccagtcccacccggtcaagctcgcgcctttcagcccggaccaggaggacgcgtcggtgctgtggacggagagcaaggacgtgggcaagggcttccgctgcatccgcatggtcaacaacacccgcctcaacttcgacgccttccacggcgacaaggaccacggcggcgtgcacgacggcaccgccgtcgtgctctgggagtggtgcaagggcgagaaccagagctggaagatcctgccgtggggtcccgaggccaactcctccgcggccccacgcgggaggcccgcacgccgtgcgcgtcttctgcaaggccggcggcgaggactacagcctcacggtgcgcaacggcacggcgtgcctggcgcccaccaacccgcgggacgagtaccagcactgggtcaaggacatgcgccacagcacccgggtgcggggacgaggagggctacccggccttcgcgctcgtcaacaaggtcaccggcgaggcgctcaagcactccacggggcagggccaccccgtcaagctcgtgccctacaacccggactaccaggacgagtccgtgctctggaccgagagccgcgacgtcggcaacggcttccgctgcgtccgcatggtcaacaacatctacctcaacttcgacgccttccacggcgacaaggcccacggcggcgtccatgacggtaccgagatcgtgctctggaagtggtgcgagggcgacaaccagcgctggaagatcctcccttggtgaacgaacgaaagaaactactagctggtaccctaataataattctgctggctgcggcgatcccaaaataaaagaggccgggtgcgatgcatctcggacttctcgagtggtgtttgcgtcagacagccagccactgtggggctagtgttccaacatttgtcagcctgcttgcgcgaggaaggggggtcactgactcaagagaagggcctggtcataggctgctgcattatgaatttctgatgatgtcttatgtctgtactctgaatcaactatgtatgagatctcatctcctttctcctactgaatgaatgaatcattattggctttgctttgcttcacctgcttgaaagcaatgcattgtatggattacaaagaaaaaaaaaaaaaaaaaggcccacggcggcgtccatgacggtaccgagatcgtgctctggaagtggcgcgagggcgacaaccagcgctggaagatcctcccttggtgaacgaacgaaagaaactactagctggtaccctaataataattctgctggctgcggcgatcccaaaataaaagaggccgggtgcgatgcatctcggacttctcgagtggtgtttgcgtcagacagccagccactgtggggctagtgttccaacatttgtcagcctgcttgcgcgaggaaggggggtcactgactcaagagaagggcctggtcataggctgctgcattatgaatttctgatgatgtcttatgtctgtactctgaatcaactatgtatgagatctcatctcctttctcctactgaatgaatgaatcattattgggctttgctatgcttcacctgcttgaaagcaatgcattgtatggattacaaaaaaaaaaaaaaataag

SEQ ID NO: 52255 - DNA, 1553 bp, Zea mays
  Clone ID: MRT4577_147656C.1
cgccggccgcgtgcacctccgtgcgtgccttgagggcgcgtatcacgtcatggaggagccgaccatgtacgccagcgacacgcgcccagccgcgcggcagctgtggcgcccgccgattggcgtgctggaagtcggcgtcctcggcgcgcaggggctaacgccgatgaagactgtcgacggccggggcatgaccgacgcgtactgcgtcgccaagtacgggcagaagtgggtgcgcacgcggaccgtggtggactcttgcagcccccggtggaacgagcagtacacgtgggaggtgtacgacccgtgcacggtgctcacgctcgccgtgttcgacaactgtcacctcggcagcgccagcgctggcaacggcgccctcagagaccagcggatcggcaaggtcaggatccgcctctcgacgctagagatggacaaggcgcgcactagcgcgcacccgctcgtcgtgctgcacccgtccggtctgcgcaagaacggcgagctctgtctggccgtgcgcctcacctgcctcacgctcggcagcgtcgtgcgcatgtacggccagcccctcctccccaaggcgcactacgtgcagccgctcaccgtcgtgcagctcgacagcctacggcggcaggcgatgagcatcgtggcagcgaggctgagccgggccgagccgccgctgcgtcgggaggtcgtggagtacatgctcgacgcggactcgctcgtctggagcatcaggcggagcaaggccaacttcttccgcgttacggcgctcctctcaggcgcggccagcaccgtgcggtggctcgccgacgtttgccgctggaagaacccggcgacgacggtcctggtgcacgtgctcttcgtcaccctcatgtgcttcccggagctcatcctgccgaccatgttcctgtacatgtccacggctggcctctggaactaccgtcgccggccgcgccggccgccgagcatggacgcgaggctctcgtgcgccgaggcgacccaccccgacgaactcgacgaggagctggacacgttcccgacgtcgaggcccaacgccgtggtgcggctgcgctacgaccggctgcggagcgtggccgggcggatccagacggtggtcggagacgtggcgacgcagggagagcggatccgatccctgctcacatggagggacccgcgggccacggcactgttcacggcgttctgcctcgtcgccgccgccgtgctctacgtcacaccggtccgggtcgtgtcgctcgtcgtcgggctatacgtgctccgccacccgaggttccggggccggatgccgtcggctgccggcaactttttcaagaggctgccgtcccaggcggacactatgctgtagcctgcagtttcagtgcgacttttgcgagagtattggtgttcagttcaacaatagtagtactggaaaaacttaaggtccaaaactgtttggaagaagactagtttttaagaattcagttttatcttcagtttttagaaactggtttatggtatttggaactgtctcagtttttataaactggttttagctagag

SEQ ID NO: 52256 - DNA, 216 bp, Zea mays
  Clone ID: MRT4577_147657C.1
aacacaaacttggcacccaattttttatttcaaaccacattttccggttcaaaacccccgtacattttaaaacagggcccggaggccaatactcaaactaattccacataatttcaggcaaacttaactcttggttaacacacagagcgctaaatttttaatctctagccatagccttctttttattctaaaacaaaactttgtttcccattgaaa

SEQ ID NO: 52257 - DNA, 234 bp, Zea mays
  Clone ID: MRT4577_147658C.1
atgaagttaaagtaaagattcctgaagagctaaaaccgtggcttgttgatgacttaccaggcaaaaacagctcttttatcttcctgccaagaagaatgtggattccattcttgaggattatgcaaattacaagaaatctcgtggaaacacagataataaggagtatgcggttaatgaagttgtggcagggataaaagattatttcaacgtaatgttgggtaccagctacccaat

SEQ ID NO: 52258 - DNA, 574 bp, Zea mays
  unsure (1)..(574): unsure at all n locations
  Clone ID: MRT4577_147659C.1
ttcatcgaanggccggccgggaaaaaaaaatttacaaaaaaaaaaaaaaaaaataaattgaaaaaaaaaaataaaaaaaaaaaaaaaaaaaaaaaaaaaaaaaaaaaattataccaaaaaaaaaaaaaaaaatgaaaaaaaaaaaaaaaataatgaaaaaactaaaaaaaaaaatagaaaaatttttttgtccccgcccctccccctgatcgcctccggggggggctataatcctttttcccccagaacaagaaaaaagtttgggggggtttgtttttttggggccccccatagggatttttgggttaaggggcccccccccgatccctactaaaattctccccatccccccccttttatcaaattgtgaaaaaacgggcaaaaatttggggccgttttttgaacggggcccctaaaaaaattttctgggttgaaggggtccccagacgtcccccaaaaagatttcccctatcccccccgagaaatttcttttggggggggagaaaaaatccgggggcgccgtgttgatccccccctccaaagaggggggtgcccttggatcccccccccgagg

SEQ ID NO: 52259 - DNA, 522 bp, Zea mays
  Clone ID: MRT4577_14765C.1
aaaaaaaaaaaaaaaaaaaaaaaaaaaaaaaaaaaaaaaaaaaaaaaaaaaaaaaaaaaaaaaaaaaaaaaaaaaaaaaacaaaaaaaaaaaaaaaaaaaaatttttttcccttggccggaccccccctaagggggatttttggaaattttcttcccattggggggcgttttacctttcttttagagggcccatttccccttttagggggggaatttacaattaattgcccgtttttttacaacgtggaaattggaaaaaccctgggtttcccaaatttaatgggtttggaacaaatccccttttccaaaattggggtattatgaaagaggcccggaccgttcccctttccaaacaattacccaccctgattggcaaatgacccccccctttaacggctcattaagcccggggggggggggggttccccccagtgtgaccgtttcatttgccagcgccttagccccctttcttttggtttttttcctttcttttttcccccgtggggcggttttccccgtta

SEQ ID NO: 52260 - DNA, 758 bp, Zea mays
  Clone ID: MRT4577_147660C.1
gccggccggtccggagcagacaaacaacctacttctgactgaccactgagccacaccgtggtcaccgcacagacacacacaacaactatggccgagttgaaaactgcaccagaccaccagattcctcaataaggccctgttctcccgtgcctgctgagtccatgacgagggacgaatcaccatgcgccactgcgacatcatagtaccccaaagaatataaaacaaacctgatcgccccaagaatcttgagccaatcgccaacaacataccgcctgacctgaccggtgagttacacgaatactaccggtgtgataccacgggactctcgtgcgagccgcaacactatatggctgacaaccgcagaactcgaaatgatccactccctacgctctaagctgagcacgatgggctgcgtgtaatcccatatcctgcacaaaaaaccaccttagaacggtaaatactcgtgggtcaacgacagcgaacaaatattctcagagaacgaaatggactacctgggcaataccaacctggtgcgactcacaaactatcctagcccactctgcgtgaggcatgtgatgctcatgttattcatacaggcctaccccatcggcggcccgccactcaattaacgcctcaacgaggtgtattacggcggctccttggacgcgctgttactacccgacgactcggacaacgccgccgatatccaggtgaatgagctcaagaacgatcgccttgtcatgatctgcatgaacagc

SEQ ID NO: 52261 - DNA, 279 bp, Zea mays
  Clone ID: MRT4577_147661C.1
cccacgggtccgcccacgcgtccggccacgcgttcgattcggaaatcggaagtcacattgggctgggtcgggcaatccgacaacccttatataaagtcccgaaccctagaggaaagcaccttccctccgcaaatcgcggtcctgccttctgcggcttcaatttcggcttctgtccctttgcaagttcaatctcacctccaacaatgggtaaagagaagtcccacatcaacattgtggtaatgggccacgttgactctggcaaagtcgacacaacaggac

SEQ ID NO: 52262 - DNA, 220 bp, Zea mays
  Clone ID: MRT4577_147662C.1
gggggggaaaaacaagcccaaaccccgtaacatggcctaatgggacaatttttaccactacatgggggttgggtctgccctattacaaaaatttgggaaaaaaaaattattccaaacatgggggtttgaaaaaggctatttttttcacgaattggaacaattgggaccccgcagccttgggaaacctttgggtacccatgaacccaaaaattgtcctacc

SEQ ID NO: 52263 - DNA, 113 bp, Zea mays
  Clone ID: MRT4577_147663C.1
cggacgcgtggggttattcacactaactaacgacctcctgctccgatcacgagcgggcggatttcaacgatggcggctgtgcttaacatcaggaagacgccgcaggtggtggc

SEQ ID NO: 52264 - DNA, 274 bp, Zea mays
  Clone ID: MRT4577_147664C.1
acaaaaccgcaggaacgcgcatcttagctcatttgatcgctttgccttgcttaggaagtgcagtttcgtgtcagctgttgcagaagatatgtagttggtcatctagacataattgctgaagatgaacttttggaccaacttctaagtcacgcagcatcattatcagattgattacacaacgacttttgtgctttcactctatttctgaggaaaaagccttcgcgaaatccgtaatgaatttctccatggtaacccctcttctgttttcacacag

SEQ ID NO: 52265 - DNA, 296 bp, Zea mays
  Clone ID: MRT4577_147665C.1
ggccgcttttttttttttttttttctttttttttttttttttttttttttttttttttttgggttaatttactcggttaatcctgtgtgttatttttatttaaataaaactaacaattaaaaacacctacaggcccacaaacactgacacctatggagacctatttcatcctacgacatcgaccatgggggggaggcgactaaagcaaacaaaaaaatacaatacctaaaaaaaccaaccatcaaaccactaatacgaacaacaaaactgataaccctgactaatttgacgcgata

SEQ ID NO: 52266 - DNA, 231 bp, Zea mays
  Clone ID: MRT4577_147666C.1
cagaaagcgcttatttcgttgttgaaaatattgtgccaacactatggaaagcttcgttcatcctttggggctgacccgtcacaagatggtatagatggcccagagatggcagtgacgaaacttttctcatcttgtaagagcagggctaatatgaaagggtatggagctgttgtccattgcatgagaaatatttcctcaaaaagccagattcaaactactgcccaggagggt

SEQ ID NO: 52267 - DNA, 359 bp, Zea mays
  Clone ID: MRT4577_147667C.1
tatggaggggagcggcggcagccagagccaggtgatccatccgggcgtgggcgaggcagccctggccgtcaccaagagagagcgcaagagaagcggcagccctccgtttcatggccatggatagcaggaacaggaacagcattttcgtcgacgaccatcccgattcacatgctgccgcgggcggtgcctcccaagacgatggtgtcagcaagcctccatcagctgctggtgttggccgcaagatgatgctcaaccttaatgcaggcccagacgacggatcgtccttgaccaagaagaggaagagaaagacgatgaagaccgttgggcagcacagctatgtcgggaatactgtggcactt

SEQ ID NO: 52268 - DNA, 506 bp, Zea mays
  Clone ID: MRT4577_147668C.1
aagtcccgtcgcccgtggccgccccagctgccgcgtgccgcccgtttccatggctatggaggggagcggcggcagccagagccagctgatccatccggccgtggacgaggcagccctggccgtcaccaagagagagcgcaagagaagcaggtacctctcccctccctataccgacacaggcgtcctccaagaaaagaaggccgccggcagccagaagcagcgagaggaggggcaaccccatgtctccggcgcggaggtgctccccactctccgagcctcagcgctcgggcgggagaaggggatggaagcggcagccctccgtttcatggccatggatagcaggaacaggaacagcattttcatcgacgaccatcccgattcccatgctgccgcgggcggtgcctcccaagacgatggtgtcagcaagcctccatcagctgctggtgttggccgcaagatgatgctcaaccttaatgcaggcccagacgccggatccgtccttggcc

SEQ ID NO: 52269 - DNA, 221 bp, Zea mays
  Clone ID: MRT4577_147669C.1
gcacgagaaaccttcagttctatggtcaaacctgctacagttcgaataatgctcactttggctcttcttaatagtggcccgcctattcatcagctagatgtcaagaacacctttcttcaccggaccctaacagagacaatttactgttgtcagcccactggttttgttgattctggcctgcttgatcatgtttgccacctcaacaagtctctctacggcct

SEQ ID NO: 52270 - DNA, 329 bp, Zea mays
  Clone ID: MRT4577_14766C.1
tttgttggaagaacccaggaaagagaaccagggcggggcaatttggacgaggatttgcatttgatccctctggggaacgcacccaggaggagtctaaaaggcgcatatccagccgcgccagcggagacgcaaccggtagaccacaaaccgaccgtcaagctgcgggtaggggcatgaagcacaggcaccatcgaacggagagaggaaaaacgaccgctctagagcccatgagccttgtacacgcccacaaacggctagtgggagggcaggtcaaatgcttcctaagcgcaaacccccggctgaacgagagaatggggataaaatgctgg

SEQ ID NO: 52271 - DNA, 418 bp, Zea mays
  Clone ID: MRT4577_147670C.1
gaaaaaaaaaaaaaaaaaaaaaaaaaaaaaaaaaaaaaatttaaaaaaaaaaaaaaaaaaaaaagaaacaaggggctccacaatctcgctctctttgtccgcgtggattggggggcgctctgggcgctccctggtaaatagcgtgtttccccgtgtgaaatttgtgtaccgcgtctcaccgccccacaacatacacaccccacaacgtaaaacgtaaagcgctggggggcgggggggggcgtgctttttttttttttctaactgttttgcgtctctggcccctttccggccttgaaacctgaaaacccccccccgctaacgagatcatcaaatcgcgcgagagaggccggtttgggggttgtgcgatttttcgctttctctctcactgacatcactgtacttcgtgcgttcgcctgtg

SEQ ID NO: 52272 - DNA, 586 bp, Zea mays
  Clone ID: MRT4577_147671C.1
tcgagcggccgcccgggcaggtataaaaaaaaaaaaaaaaaaaaaaaaaaaaaaaaaaaaaaaaaaaaaaaaaaaaaaaaaaaaaaaaaaaaaaaaaaaaaaaaggtttgaccctagagccgaaaccaccctaaggggaaatttttgcatttgtccttaaccctgggggggggttgggccgtgcttttccgggcccctgggggccctttggggatgctttttaggggcccatggccgcctttttagagcggtttaactggaaaatcccgggggtttcccaacttaagggctgggaaacccttgccctttccccctttgggggtattggggaaagggccccttccgacggccgttccaaaagggggaaggcccggacgggtgaagggcccccccttttggcggccctttatggccaaggggtgggccgtttaccggcactttaaccgctccatttgcaggggccttacccccggtgccttttgctttttcccgttcctttttgccccgtttttcgggtttttcccgttaggttttaaacggggggctcctttttgggttccgatttttggcttgggggcccctttta

SEQ ID NO: 52273 - DNA, 391 bp, Zea mays
  Clone ID: MRT4577_147673C.1
tttttttttttttttttttttttttttgggtttttttatattttttagggttttacccacatcaaataataaacttccatttaaaatatacaaaccaaaacaaattacaaccaaaacccaaaaaaaaaaaacacccacaccaaaacattacataaaaaaaaccgcaagaaaacccataccctaaaaaaaaaaatacaccaaaccaaaaataaaaactattctaaacttaacaccacatctcccataaaaagaggcgaggcccaacccaacctgttacaaacccttcaatttacatcccacttcctatccccaccaaaaaacaacacttcccaaccaaaacaaatccaacaaaacggcattacaaaaccccaattctacatgccatcccacc

SEQ ID NO: 52274 - DNA, 325 bp, Zea mays
  Clone ID: MRT4577_147674C.1
tatgtcccaattgaatcatatctgaccagtgaatatttgtaatttactgtattgaaaaattgaagagcaagcctggtgcactggtgagagctgtctcactgagtcatcaggtcacgggtttgaaacagcctctcagcatttgcggccggaggcttgccttggtttatcccttctctagaccccactcatgtgggagcttcgtcattgggtctgtactttttttactgtatcaaaaactgcaatgctgttgatttctgcagcatatgccttactggagggaaagaagtgaacaaagaaatcatgagtaatgtacaagacttggcca

SEQ ID NO: 52275 - DNA, 357 bp, Zea mays
  Clone ID: MRT4577_147675C.1
gacggaaccttcaagaacaagttcgaaactgagaatggcatcaaacaagaagaagtcggttacctgaaggccggtcctgatggtaccccgatctcagtggtccagggcgctggttcctacgtagccccagacggttcggtcatctcaaccggttacatctcggacgagaacggttacagaccagtcggtgcccatctgccaactccaccaccaatcccagccgaaatccaagagtttctcagattattggcctttctgcccagcacacccgaaccagtgtaccagtaaataacgccatcgttaacacctcctgaggaccgttccgctttcttttgtcctaaactgattttatttaaa

SEQ ID NO: 52276 - DNA, 669 bp, Zea mays
  unsure (1)..(669): unsure at all n locations
  Clone ID: MRT4577_147676C.1
ctngaagaccaggaccggatcttccagaatctctatggacgactccccgttaacctccaaagcgctaagaagatgggcgattggcacaagactaaagaaattctcttgaagggcgacgaatggattatcagcgaaatcaaggcatctggcttgcgtgggcgaggtggtgccggtttcccctctggtctcaagtggtctttcatgaatttcaaaggctgggaaaaggatacgaaaccgcggtaccttgtggtcaatgccgacgagggcgagcctggcacttgcaaggacagggaaatcatgagaaaggatccgcataaactggttgaaggctgccttgttgccggccgagcaatgaatgctaccgccgcctatatttatatccgtggcgaattctaccacgaggctgccattctccagaatgctatcaacgaggcttacgccgatggcttgattggcaagaacgcttgcggttctggctacgatttcgatgtctacattcaccgcggagctggcgcctatgtctgtggagaggagacatctctgattgaatccatagaaggcaagcccggaaagccacgactcaagcctcccttccctgccgccgttggtgttttcggatgcccctcaactgttgccaatgtggaaaccattgccgttgcgccaactatc

SEQ ID NO: 52277 - DNA, 230 bp, Zea mays
  Clone ID: MRT4577_147677C.1
cccctgttgtcttgaggcgtgcgcgcgcccaacggaaggtacctgaccgcccagtcccgcccagcagaaaagagaacaagccccacaaaactggtgcaagcacaggccaacgtacgtgtacagcaaccgcaaccagacgaggtactcttccaaggaattacccacttcattcattgtggacccctccgcaccaaacgcatcagaccatagacactcccggcactccctgc

SEQ ID NO: 52278 - DNA, 325 bp, Zea mays
  Clone ID: MRT4577_147678C.1
gacagacagcacctactttagcttttttcgttcttcccaaatgtcactcccatggccgagagagccttcttcccagtgactcgttccgtgcctgtgccattcaacgactttaacgactgcattgttccaaagcaaactcccaacgatgagttctgtgacctcgtggacgtgctgacgagcaggcagtacttcatcctgtatctgcgcctgtaccattgattattgctgcctgagcactgagtgcctttgaccattgtgttccagctccattttacgccgttcccagactacgagatccttgagagctaccccaagtgcggaacca

SEQ ID NO: 52279 - DNA, 403 bp, Zea mays
  Clone ID: MRT4577_147679C.1
atgccgagcatcattttcgttttctatttttttatgttcaaaaaaaacattttcctttgaatggtctggaccaaacccttcgagggcagctttaccaacacccggtgccaggccactggatgaacctgaccttcatggtcttgagggccaattcccaaaagggcttttggtggatgaagttgcccatgaaccaacaccccgggcaattccccttctggcaagccatggcctttaacccccggtttaacttgatcacctaactttttccccgggggttcaaccgggccccccccgggaactggaccggccgctttgggaacttccgggcttcccggccgcggggccgtccattgtaaccatgcttcaaccgggggaaagtccattttgggaaccccggccagaa

SEQ ID NO: 52280 - DNA, 509 bp, Zea mays
  Clone ID: MRT4577_14767C.1
gtacaagctttttttttttttttttttttgacaagcttttttttttttttttttttttttttttttttttttttttttttttttttttttccttcccccgggcccggcggccgggggaaagggcaaatcccaggccgccggcggccggggctcggggccccgggcccggccccgagcttggggggacaaagggcattcctgggtccagggggaaaccggtaaccgttccccactccacacaacctgggagccggaagcgtaaagcctgaggccccgggggcctaagggggcacccaactaacgttaagggcgtagggcccactgccccgtttccaaaccggaaaccccggcggccatatggattaatgaaaccccccacgcgcggggggggggggtttggggattgggcccctttccccttccctgaccactgacccccgggcctcgggctttcgggggcgggaagcggtttcacctcacccaaagggggggatcccgctatccccggg

SEQ ID NO: 52281 - DNA, 400 bp, Zea mays
  unsure (1)..(400): unsure at all n locations
  Clone ID: MRT4577_147680C.1
cccnggcacggggtacaaataaaaaacagtggcacacctttctttgcaaataacacaacattttactttcaagtaccaacaaaacatacattggtttgggccttaacaagaaagcccaaacctcaaaaatgttttgctctgttcctttaaacccccggtataacccaggggagttcccatcaggggtggcctcaaaaaaaaaaatgaccacccccctaggaaaagaatgggtgggtttttaacaaaaaccctatataatgtttttttaaaaaatctggcctgggtaaatttcccattatattacacattggccttcaaccttataaaaaacaacttaatcctttaaagtttcccccaatatgttacttggccccttcccataaaccaccttttttttttt

SEQ ID NO: 52282 - DNA, 331 bp, Zea mays
  Clone ID: MRT4577_147681C.1
atcaggaccttcaatcatcattcatcccatttttatattcccctaatcaaatctgcaacatcaggtatctagctccattaaccatgaagctggggctagtagctattgctttgatagctttagtatcaagtgtttattgtacacatacaatccactgcagctgaagccaacaacaaactcatgagcagcaacataattcacaactacatcatccacaaaaacaacaacatgaaacaccaccacaacatttccagcatcatcatacccaacttcaacaagttcatattcaaactcaaaaacattctgctcaaccataaattcaatttcaaca

SEQ ID NO: 52283 - DNA, 113 bp, Zea mays
  Clone ID: MRT4577_147682C.1
ctcattcgttcgaactactgagcactttctcctcgtcccagacaactcactcgaagccgagatacgaccatggactgcaccgtctccggagcagggggtaaggcgaagaaagg

SEQ ID NO: 52284 - DNA, 381 bp, Zea mays
  Clone ID: MRT4577_147683C.1
ggtgggggttgttcattgccaccaagtgatttggcctggcagcaggagggctcttcggaataagaatggatgtggctgtaactctgcttctagaccggtgatggttcagcttagaagcaggggatcttcatcatcagaataaaaacgtgtgctgttgtgttgctgtgtctacgccactagtatttctgttgttaacttatgttctagctttgttgtaggtaaactgcgaacccagagttgcagaacccgtactgctcgtttaagctcatggtgaactacgagctaaaaggctgttgccagagtcgatgtcagtatgtcacttgtcactggaggtccccggttcagttcagatgttgctttggcacgtgctattcttttgga

SEQ ID NO: 52285 - DNA, 242 bp, Zea mays
  unsure (1)..(242): unsure at all n locations
  Clone ID: MRT4577_147685C.1
tctnaatattctatatattattatgtaagtggccatcatcatacactgcatagtaaacanagcttaactcgtcgggacatataattaaggaagcgatagaaaaaaaaagaattcctatntcacnactagcagtactcactcatggcagtcatcactattagctcgatgaagctgagtggtcagttcgaataacactgtaatccccgtgaccgctctacgctgacggctggtcgancaaaacc

SEQ ID NO: 52286 - DNA, 152 bp, Zea mays
  Clone ID: MRT4577_147686C.1
gttttatataggatgccgtgaaaagcggaaccggaataccagacaatccagggacggaagggccaccattaataagggcgaagccgtgatttaccgccaaccagaagcaatagccgagcacctttatcgttggctttatattgactttccaa

SEQ ID NO: 52287 - DNA, 164 bp, Zea mays
  Clone ID: MRT4577_147687C.1
atcacttacgagacataactgcgcacggcttgtgtgctaaaattagttggaggaaatccctcgctccaaaaatactaaacttcaatctcctgtaacttggatatagaccacacatgatgaatgacacataagatccaggcttcgtctaatttagcacatgaaag

SEQ ID NO: 52288 - DNA, 655 bp, Zea mays
  Clone ID: MRT4577_147688C.1
aattcggcacgagggcccaatgtgctagacgttgctatcgttggtggaggcatgatgggcttggctgttgcttgtgcaatgtgtagggattgctgttcgtgtgctctgacctgttttaagccaatatgccgttaacgaaacaccttagagtcgctattatcgatagcaatccagcgctgaagtcaagaagttacctgggcaaaaacagtatacccgattctagggtcagcaccgttacccctgcaaccatttccttcttcaagggtatgattctgaatcaactatgtgcatcgtcatacttaatttcagttgtatttcaactttcaacgatatttggatttaagtttgagcttgtatgttcaggtgtcatatcgtcttcaagggtatgctgtttacacatatatttacacattttgtttgatcaactataccatgtgaccacattggatgtacatgaaaagcagctcaatcatctttagttagcgtttggttcaaagttcgagcttgccattggtgtactagcccctggagtcctgaacccagctgccactcatggttgcaaaggttcttaagcgtccatgcgagagctttggtgtgccttgacaccaaggcgataggcaccattgttccccagggcgagctggtatgcctgtat

SEQ ID NO: 52289 - DNA, 305 bp, Zea mays
  Clone ID: MRT4577_147689C.1
tattaatgattgcctccagataataagttggggtgcttcaaattcaggtctgccggcctctacaatagggtttgtccgctggtttgctaaggcaagcaacgtacatagactgcacgtcttggatccttcatgtttatatagtgcgttgctttatgatcaattgaccattcattaccttcgcctgatggcccttattaacaacagtaagagctaactaagaatgtgcgctaagatttttcttgctatctgaagtggtaaatttgttaatcctaatcctttgctgaatgggtatcggggctttgtca

SEQ ID NO: 52290 - DNA, 155 bp, Zea mays
  Clone ID: MRT4577_14768C.1
ctaagattgttttttttaaataataagttgaacacaatcatttggtaacattagagagtccacctaaaaaacagttcgagaatttttaaaagagatgagagggaatccatttgctaaaagtagttggaatgtttatcataagaagacagtttttt

SEQ ID NO: 52291 - DNA, 206 bp, Zea mays
  Clone ID: MRT4577_147690C.1
gcggtttggttcctgcaacgtcagcagcttacggagccgggtcctgggccagtgcgtcgagttcctgaagcaccagtgcagccccggggcgacgccctacggctgggcgcagtgccaggcgcttcaggagcagtgctgccaccagatcaagcacgtgcaacagctgcaccggtaccacgcgacatacagcttgggcctgcagtcct

SEQ ID NO: 52292 - DNA, 648 bp, Zea mays
  unsure (1)..(648): unsure at all n locations
  Clone ID: MRT4577_147691C.1
cggtccggcattcccgatacatntgtgtgagnacttatctcagcacacctgatgtttatgttcgcgtccgggtctcttaaaacccgggtgtgatagttttgcatcatatgttgaattggttgagttcttatcgcctcattgttttatgaaataggatggatcccattattccagatgatgaggcaagacacgttgaaccaatagaagaagttgttgcacctgatgatgatgagaggcaatatcctgagtttgttgacaagtgggatatgctagaattttaggactatgatggatatattgtcacaggggcacaatttgaagagactgatgaagaggaggaagagaacatagctatgggagtggatgagcaaggagagggtgatgatgtaccaagaattgattatgacagagataatccatccttaaaagaaggcagcgcatttgcatcgatgaccgaatttaggaatgcacttgctacctattgcatcaaaggcgagtatgattatgtaattgacaagagtgagccaactagaataaatgttcattgcgcatttgagaggtgtcagtggaggatacatgattcctgtatgcggaatagtacaattattcaggtcaaagtgaatccatctcctcacacttgtccaggtg

SEQ ID NO: 52293 - DNA, 123 bp, Zea mays
  unsure (1)..(123): unsure at all n locations
  Clone ID: MRT4577_147692C.1
gtacaatgtcatggtgattgatcggcttggtncaagtctggaggacttatttaacgagggcagcagnaagttcgcccttangacagtacgaatgcttgctgatcagatgatcagcagagtaga

SEQ ID NO: 52294 - DNA, 685 bp, Zea mays
  Clone ID: MRT4577_147693C.1
gggacgaaaaaatattaaaatggcataccacaatatttctcgggaatttatgtacaagaagatgaatcctcccatgggggattgggttcacaagagtggtcaaatacactacaaggaaccaacaacaaccgatttaatacagattattacacactagtgtcattttccaaccgaaatgcccgacgtcatggggcccatgctggtccccgaccacgggtactgcaaaacaaactggtcgaacgacgtctggctttgcatgaggctgaacaagctgatgcccgccggcgtgagctccggcagcggcgcgtcgccgtcgaggtactgcatgacctgcctcatggtaggcctctcggccgggaacgggtgggagcacatgagcccgagcgtgagcaccatcctggcctcgtcgaggttgtagtcgccgcgcaacctggagtccacggtctcctcgatggagcccctgcgccagtactccagcacccggtcgaccagcattttgcggccgtggcgcacggtgtcaacaaccggccggcggccgcaggtgacctcgagcaggaaggtgccgaaggcaaaaacgtcggtgagcggggacgccttgccggtcctggagagctccggcgccatgtaccccgtggtgccgaccacgtgcgtggtctgcaggtcggcgccgtggtcgtacagcctg

SEQ ID NO: 52295 - DNA, 1052 bp, Zea mays
  Clone ID: MRT4577_147694C.1
gcggtcccttccctcctctcccacgctcccggctgactcacgcgacgcgcgcgacgacgcggcagagaaagccaggaactccaaaggtccgagttcgggttcggaagccaacccacaccactccaccacaccctactcgagcgaagcgagccagcaatggcgcatcgcagccgcgggccgtgaccggcgtcgccggagactggaacaacaatggctgccgtggcgcgcggcgggcttgcgatgcccccagcagttgtgccggcggcggcggctgcggcggaggaggagatgcggtggcggcagctagacagcggcgcctgagcatttttgcctaattaactatagcgactacaagtaggactggtagcctcttctagttctagaccgggttttctcctgacatagcgaaattattaagtgcacaaaaaccgtatctattgtgaatctgtagaactcatctgtgtgaaaatactgctctttacggctatacatagatcttgtggaccacttgaggcattctcattgaccactttgttcatgatgcttgcagatacctgtctatcccaaaggcgtctcggttctgatgccagggcaagacatgccaacgttcatcgcgcatcccgcccctgcaccctgtcccccggagaggatccgatggccatcacaccagccccctcctttcgctggttcctcatcgaaccctagctaggccagggttgctgttgtcagccaaccaccaaaagtctgttatctgtagaggaggaggccggagcagccgtgtgccgatgatccacccactccgtctctccgagacaggctctcccctcctctctgtctgtatctgtactgtacaggtttaggtcttgttctgaagcaagttctacactgctgccctgccccccctgctgcattgtggcgggcgagcggcggctggtggatccgtggagctgatcccacttgctgcgtgtgttattagtagtagatgcctgatggagcatgaaatgtactggaaaactcgcttggcaaatgtggacctacagatgtttcatttc

SEQ ID NO: 52296 - DNA, 199 bp, Zea mays
  Clone ID: MRT4577_147696C.1
tagcgagtaatcggatcgtcaggagtccgtagtgtcatccgggatgatcttgagatcggtctgatgctctgctgttatcaatgttgttgttgagatcacaaagggaagcaacataaaatatgagctcgacaagaaaactggactgattaaggttgatcgagtcctgcactcatcagttgtatacccacacaattatggt

SEQ ID NO: 52297 - DNA, 247 bp, Zea mays
  Clone ID: MRT4577_147697C.1
ctatgcactaaggagcacacttttacaatttatagcactcgctgagcgagcggcctaacgcgagcaatcaaaggctgtccggcgggtccgccacgtcacagacctctggttcgagccttgaccggtgcactcacgcattacgcaagtgcagtacgtaaaggagtggaatactggtactcacatcagatgcgaccattcctcatgggtctataagaccttcatctcgtcatacctcgagcacggcttt

SEQ ID NO: 52298 - DNA, 531 bp, Zea mays
  Clone ID: MRT4577_147698C.1
ccggccgggagactgcacgaacgacccgcgtccacgacgtcacgaccgaaaccgacacgctctcttcacagcgaacagcgcccaggttccgctggacgccttcactcccctgagactccaccaagcgcgctccccctcccgcgtagcagccagtacagtgcatgaccaccacgcgccattgtacatgaaatgtgcaatgcgagctgagtgtggggaatgtgaggaagatcatctccgttgtgtgccgacggaaccagaattggaaccccgtgacatccgacggccggaacctactgttctgcggggagtcggcgactgctgcgctgacgcttggggcccctgctacctccctgaagcgattgagtatacacgcgccaaacgtgaaatgaatctcgccgatggtttgacgctcgacggcgtcaaaatcgcgctgccgcagcacaggctcttcaggaaccacgacgacggtgaattgcgcgagcagcggccctgttgattcagcgagattctagggcctaaccgtcatccgat

SEQ ID NO: 52299 - DNA, 419 bp, Zea mays
  Clone ID: MRT4577_147699C.1
ccggccgggaactccgcacacctcctcgttttgtccatattttctagcccttcttcttagaggcgctgatgttggcagtagtggaacatcgctcgccagcatcttaactgccaaggtgagtatatccttgcttctcttagggcatgtgttactactattcatagatcgatttccctttacgagacaagttgtctttgatgacataactgatctgctggatgatcgtttctctctcatgatacgagacttttgactgctgcctacgggcataaaagaccctgctgctttcgtgatcacatggaatagactttcattattgatcttatctgctcctgagagacaaccacctcctactgacatcgtcgtccgacaaatgtctgcaaccactacaacgtcttagtgtcggagtcacctgatat

SEQ ID NO: 52300 - DNA, 187 bp, Zea mays
  unsure (1)..(187): unsure at all n locations
  Clone ID: MRT4577_14769C.1
tcccgggcccgcgccgngttgctcctgctcgtgcgcgctcttggcgcggggggggggggcctctctcttgcttgtctggtcttctcgcggcccctctgctggggcgcttcgggggcgcgtgcgcgcgcttcctctccttcgctcgcgtctctgggcgcgcccctgtgcctcttctctgcccccttgc

SEQ ID NO: 52301 - DNA, 289 bp, Zea mays
  Clone ID: MRT4577_1476C.1
aaaggggggaaccaaggggtattttacccaaataattgaagtcgctggtattacagtagacgaattgattgattaacctgtaaattaaacccgggggacaaaaaaaaaaaatttttgagcttgccctcaaactgagagggggggccatatgttccttggaccccttcttttgcggttttcaagaccaggtgagcaacccgggagccggcctccaaaggatctgtatatttttttttcttaatatctggagggttaaccttttaaaccctgttctttgtttttttaagga

SEQ ID NO: 52302 - DNA, 164 bp, Zea mays
  Clone ID: MRT4577_147700C.1
ggggggtgggttttttgagggcggggctcactttcccttgggccaggtgagtttcaaccaacgggcaacgaccgggggtgaccgccccgggaggaccccatttgagcacagtggacgggattacacacaccccccacggcctcaggaacttgctttggtccgct

SEQ ID NO: 52303 - DNA, 309 bp, Zea mays
  Clone ID: MRT4577_147701C.1
ttcttgacgcgtgggctgacgcgtgggtccgccggctagacatcgcctccgcgccagccatactcattctcaactccgacacggtgcttagcggagaccgcgtcactcccgtcgcggctgctgacaaggctgccgcgctccctcagaagacgggattcgcgctgccggtggaggcctacgatgctgacagcacgaccacggtgatcacgtgagatcctgtcattcactgacctgagcctgaacgaggccaaggacctagtgtagaatgcgccagcggcgataagggaggcctatccagagatgacgctc

SEQ ID NO: 52304 - DNA, 593 bp, Zea mays
  Clone ID: MRT4577_147702C.1
gtaccggcccccctgcgagtttttttttttttttttttttttttttttttttttttttttttttttttttttttttttttttaaaggaaaatagatatcaaaaaatatccctttttacattggcacagaggggggggaaaaccattttcccttttccctatagggaaccttgctgtctattcaacaaatgtacggggggaaggagggcagggccggccccaaacccatccactgggacctccaggggaaccgtccgggccacctcctccccaaaaatttccaccagggctttatttaggaactccctgaaccccgggtagcccttatataggccacccttgatcgccaccaccggccgcctaaggtgccctcgggttctcccgcttgaggaaaggccgttcccatcccgacccagtttttttagtatcccaacaatgccagggggggttaggggggcagctttccgggggacaatgtcccaaactttgacgactaccctccgagttttaaaaggaggggccggtattttcaaaggggcttgaaatatccttctgacttcgctcaaatcgggggaatcgcccttgcaaattgca

SEQ ID NO: 52305 - DNA, 1436 bp, Zea mays
  Clone ID: MRT4577_147703C.1
acgcctaattctccttgcttataattacgtctttcaaagttctgtagagccagcagacatacatatacaatatatgatatatgcatgtatatacgtaatgttatttagtacctaaagggaggctccattaatctgggggcctggttgagggcactgctcgacccctgccagggccggcgctgctgatagggctcgggtgagtgcaaatgtcagcttttcttccacggtttctgcccactgatcaactctccaaaataatcgatggagcatgacagtgttggaaccaaggaaacatcgggttcaacaaacttctcaacaaccagagcaatccacctatttcctgaaaacaagtgaaattagccaacatttctccaacagtccaagtcacacgattagagaaaacaagattgaactttcacatgaactttaaatatcccattttataggaaggtacagtatgactcatcaaacaattcaaaatcacaaatattaattgctcatatatgaacaacaaaaactccatctcaaatcaaaaaggctaaaataggttacattttcctctgtacggatcgcacgattgacaatcagttcatgtatgatatggccatatccctcaaacaactctgcagttttattctaatcctatatattaatgttttaaggatgtaaacatgcatccataaaatacgtgttaatctctagttctccactggatgcagcatggtagctagccttgatagcttgactttatacaatccctatatgtaaggtcgttatgctcggtctctaggttggataactcagaacaaacgtctttaccaaatcttatcttcttatagccagatgcaccgtaggtgacaaaagaaacgaactcactgacaaaaaacatgattacttgtatagcacgaggttgccacttgtcgaagccagcttgatcaactcatttcattccataaaccaaacaaaaataaagagtgagatgataatggacaatttcattccataaactaaataccactaagcctacagatgcgagcaatatcttgcacgaagcagctcaaagcaggaattattaaggctataagttgcttacatcagcttgggggacttcaacctgacactattggaccacctgatcgtggaccctggcctccgcatggttggctgtaacaacaagctcaacgccgggtacgccgcaaataggtacacacacgtggggtgtgggcgcctacgtggttggtcactttcactaaaatggatccaattgttgaaaggatttgagacacaagtgcctgtaagcatccaagagccttgatagcctaaaaactctaacacttcgacaacatcaatgctgatgaacgggtgtgcccaaacatccagtataattggagaaataacatactcaattaaagttcattgttctccacctacatttt

SEQ ID NO: 52306 - DNA, 162 bp, Zea mays
  Clone ID: MRT4577_147704C.1
tcggctctaaacttgcttcacatttataacaaggtggggagacagggctgacacttctgcacgctggaactgatttggacaaatacattggggtctttataccgacacactcagctgccttgctagcgtattgtcgatttactcttttttggcgacattttg

SEQ ID NO: 52307 - DNA, 166 bp, Zea mays
  Clone ID: MRT4577_147705C.1
accacgcgtacgaccacgcgtaacgaccacgcgtgcgcgatataaaacatccagggttagggacgcgtatatgcgaggtgatagatcttatatagtgtaaactaaattgaattcactggccgctaggttatcaagagcgtgaatgataaaaccctttggtgaacgc

SEQ ID NO: 52308 - DNA, 555 bp, Zea mays
  Clone ID: MRT4577_147706C.1
ggctacgcctaattctccttgcttataattacgtctttcaaagttctgtagagccagcagacatacatatacaatatatgatatatgcatgtatatacgtaatgttatttagtacctaaagggaggctccattaatctgggggcctggttgagggcactgctcgacccctgccagggccggcgctgctgatagggctcgggtgagtgcaaatgtcagcttttcttccacggtttctgcccactgatcaactctccaaaataatcgatggagcatgacagtgttggaaccaaggaaacatcgggttcaacaaacttctcaacaaccagagcaatccacctatttccaaatcttatcttcttatagccagatgcaccgtaggtgacaaaagaaacgaactcactgacaaaaaacatgattacttgtatagcacgaggttgccacttgtcgaagccagcttgatcaactcatttcattccataatcagcttgggggacttcaacctgacactattggaccacctgatcgtggaccctggcctccgcatggttggctga

SEQ ID NO: 52309 - DNA, 599 bp, Zea mays
  Clone ID: MRT4577_147707C.1
agaaatcaagattgacgggctacgcctaattctccttgcttataattacgtctttcaaagttctgtagagccagcagacatacatatacaatatatgatatatgcatgtatatacgtaatgttatttagtacctaaagggaggctccattaatctgggggcctggttgagggcactgctcgacccctgccagggccggcgctgctgatagggctcgggtgagtgcaaatgtcagcttttcttccacggtttctgcccactgatcaactctccaaaataatcgatggagcatgacagtgttggaaccaaggaaacatcgggttcaacaaacttctcaacaaccagagcaatccacctatttcatcagcttgggggacttcaacctgacactattggaccacctgatcgtggaccctggcctccgcatggttggctgtaacaacaagctcaacgccgggtacgccgcaaataggtacacacacgtggggtgtgggcgcctacgtggttggtcaccttcaccatggcagtgacatcataaatttttcactaaaatggatccaattgttgaaaagatttgagacacaagtgcctgtaagcatc

SEQ ID NO: 52310 - DNA, 2105 bp, Zea mays
  Clone ID: MRT4577_147708C.1
caagattgacgggctacgcctaattctccttgcttataattacgtctttcaaagttctgtagagccagcagacatacatatacaatatatgatatatgcatgtatatacgtaatgttatttagtacctaaagggaggctccattaatctgggggcctggttgagggcactgctcgacccctgccagggccggcgctgctgatagggctcgggtgagtgcaaatgtcagcttttcttccacggtttctgcccactgatcaactctccaaaataatcgatggagcatgacagtgttggaaccaaggaaacatcgggttcaacaaacttctcaacaaccagagcaatccacctatttcctgaaaacaagtgaaattagccaacatttctccaacagtccaagtcacacgattagagaaaacaagattgaactttcacatgaactttaaatatcccattttataggaaggtacagtatgactcatcaaacaattcaaaatcacaaatattaattgctcatatatgaacaacaaaaactccatctcaaatcaaaaaggctaaaataggttacatttttttctgtacggatcgcacgattgacaatcagttcatgtatgatatggccatatccctcaaacaactctgcagttttattctaatcctatatattaatgttttaaggatgtaaacatgcatccataaaatacgtgttaatctccagttctccactggatgcagcatggtagctagccttgatagcttgactttatacaatccctatatgtaaggtcgttatgctcggtctctaggttggataactcagaacaaacgtctttaccaaatcttatcttcttatagccagatgcaccgtaggtgacaaaagaaacgaactcactgacaaaaaacatgattacttgtatagcacgaggttgccacttgtcgaagccagcttgatcaactcatttcattccataaaccaaacaaaaataaagagtgagatgataatggacaatttcattccataaactaaataccactaagcctacagatgcgagcaatatcttgcacgaagcagctcaaagcaggaattattaaggctataagttgcttacatcagcttgggggacttcaacctgacactattggaccacctgatcgtggaccctggcctccgcatggttggctgtaacaacaagctcaacgccgggtacgccgcaaataggtacacacacgtggggtgtgggcgcctacgtggttggtcaccttcaccatggcagtgacatcataaattctaacaatgaaataaatcagcagaaacttgatgcataatgttggcagatgcaaaaagaaagaacaatggcagtgatgtgtaaactggcattgacatcttactttcactaaaatggatccaattgttgaaaggatttgagacacaagtgcctgtaagcatccaagagccttgatagcaaaaactaatgaattgtgttaaatgtaactttaagggtctcaaaagccaaaagaaaacttttgctaacaaatgataacatgtgcacagggaaattttatagaatgacacaaaatactgcatagaaaaatagactacataagtacataaccatcaaaaggtaaaggatttgctttggggtggtactaaaatgctcatcgatggcaataagtgcttagataaaaagtatatcactaccacatatacgtcaatgttaactcatctaataattatttgtctggtcagctcccaaatgcaatcaaaaaaaattttgtacatagtggttattaaaaaatgagtaaagtacttgagccttccaattctgacaaaaagcatacctctaacacttcgacaacatcaatgctgatgaacgggtcaacaatgtggtgtacgacgggccgaacaagaagtcgtaaaggttaaacaccatggtagtgaggttgttgccgccactcctccacgtaccgcgcgtcccagtactccgcctcgccgtagcccaacgacctcccatcgccggcgcccacctcctgcgcaccgtcgtcgtagacgggccgcggcggcggtgacgacgacgacatcgcgggggggcaagggggagggaataa

SEQ ID NO: 52311 - DNA, 4901 bp, Zea mays
  Clone ID: MRT4577_147709C.1
ggatcgtgaagctaaagttaggacgggctacgcctaattctcctagcttataattatgtttttccaagttctggagagccagccgacaaacatacacaatttcacaaatatgcatgtatatacgtattcatatttagttctttaagagctgatgcagtactccatgaatctgggggcctggttgagggcactgctcgacccctgccagggccggcgctgctgatagggctcgggtgagtgcaaatgtcagcttttcttccacggtttctgcccactgatcaactctccaaaataatcgatggagcatgacagtgttggaaccaaggaaacatcgggttcaacaaacttctcaacaaccagagcaatccacctatttcctgaaaacaagtgaaattagccaacaattctccaacagtcaaagttacacgataagagaaaaaacgattgaactttctcatgaactgctagtattgcccaatttagtggataacgtcctgagctatgtaatagcacaaatattaatagctcatatacgaacaaaaaaaactccatctcacattaaaaagccgaaagacgcctacagcttttactgtacggatgaagcgattgccaactagatcatggatgaaattgtcatatgccctaaccaactctgcagttttcatctcctcctatatattgatgtttttaaggtctaaccattcatccgaaaaatacgtctcaatcatgagtcttatctcctccctcaaggcatcactttttgtactagcttgaaattctacaatgcttatatgtctggtcgttatgcccggactcttggttggataactcagaacaaacgtctttaccaaatcttatcttcttatagccagatgcaccgtaggtgacaaaagaaacgaactcactgacaaaaaacatgattacttgtatagcacgaggttgccacttgtcgaagccagcttgatcaactcatttcattccataaaccaaacaaaaataaagagtgagatgataatggacaatttcattccataaactaaataccactaagcctacagatgcgagcaatatcttgcacgaagcagctcaaagcaggaattattaaggctataagttgcttacatcagcttgggggacttcaacctgacactattggaccacctgatcgtggaccctggcctccgcatggttggctgtaacaacaagctcaacgccgggtacgccgcaaataggtacacacacgtggggtgtgggcgcctacgtggttggtcactttcactaaaatggatccaattgttgaaaggatttgagacacaagtgcctgtaagcatccaagagcctcgtgcctaaaaactaatgaattgtgttaaatgtaactttaagggtctcaaaagccaaaagaaaacttttgctaacaaatgataacatgtgcacagggaaattttatagaatgacacaaaatactgcatagaaaaacagactacataagtacataaccatcaaaaggtaaaggatttgctttggcaataagtgcttagataaaaagtatatcactaccacatatacgtcaatgttaactcatctaataattatttgtctggtcagctcccaaatgcaatcaaaaagaattttgtacatagtggttattaaaaaaatgagtaaagtacttgagccttccaattctgacaaaaagcatacctctaacacttcgacaacatcaatgctgatgaacgggtgtgcccaaacatccagtataattggagaaataacatactcaattaaagttcattgttctccacctacattttcagatgaaaaaacaacacaaaattctagtgtcgatacagtacatatgacatcttttttctacagagtggatgcacaaacatgttgccataccatgctaaagacatgaagcataagatattttctacagagtggatacacaaacatgctgccataccatgctaaagacctgaagcataagttatgttgaacatatgtatgtgatcaaggctttgactgatcattctacgaatgcgacaatatgcataatagttggtagtttatacaacccctcgatgtacatattgtagatgatggcatcagggaggcaaccagagtgccttgatgtacatattgtagatgatcacagagccatatacagttcatgtaagctaaacatattgtaaaactgcagagaaacattttgcaggccaaactgtccagctccacaatatgcattcaacacgtcgtacaaacaaataaaccaaaaaagtatcagtttaggccaaacactgacatacatcaaaaactctaaataataccctaactttgtatagagttactactataactctaaataactactataatatgacaataatgtggcatttggtgcggccatgcttaccagtcttgtaggtagaaacctccacaacctgtagcatacgttgtttttatcaaacaaatacaataaaacagcaacaaataccacaaatatgtgtaaaaccaaaactgtcaatattatgaaccattctggattacattaaaataaaagagcagcaatcctcgaatcaatgacaagaaacaggattttgcagctaagcctacctccacttcaccgaagagaagaaaggttttgaatacatgcatagacgagaggggaagggaaggtagttttactgagctctataaaagacactgggcatatccattggggtgcaggcctagaatgaactgcaggtgctggtggtcgatattctatcataacttcctccttctgattaagtgcaggctctgccacctggcactcgggcataatgatgtttgtcgagaagccgtcgttgagaagcctcatccagcagcaactgatcagcttcaccttccagacccaaactgatacttgagttcaccactcaacgtgtaatatgccaaaatatccacctcctcttgtagctctatttctgtgcccatatctcaactcgtagcgtgctgcttcttcaagtattggaacagatgacacgagcgttgcatatatatccgggaacagccaattagtggaacaaaaagaaaatgcatcaatctcttacgcatccctgggtggttttggattcttgctcatttcctgaatttgtcttgatggttccaccaataatactaccatcagcttctttcaaccaccaaacctttccaaatgcagccttcatactgagcttagaaggatcaccaacatagacaccatcgaaggtctaacacttccaaaatagcttcatcagccttctgatcctttgaataagctcctgattatccacagtaacaactaacaagaaacagcagcagcaatagccacgacactcatttccttctcaggcctatgctctttttcttctgagtgattgcaaatcgtctcgccatcgcaacattgtaaaatttcctcatatgctctgacaaccgatgtatcgcgccaaggttgactacatctgataacctcagcattatagcatcaaacttcttgtatgaaagtttcatgtcacggtttataacctcatctagaagagcagttgcatattctgtttctccacaatcaaagagaccatagatcattatctcgtaggtatcgatagcacgttgacatcttcttttgtccatctcaagccatatatctaatgctctatgtgcctctcccatctcgaagaacatcatcatcagcatattataggtatgaacactgggctcacagtgtgcctctatcatcctctcacagagttcaagtgcatcatcagcatttcgaagactacaaagcacattaagaaagcaattatacgtgacaatgtcaggaggaaatccagccctccccatctcgtccaacacacgataagcagcatccagtttcccccccaaccacatcccttcaatcaaatctttataagtcgtcacgtcaggcatacagccacaacttctcatgtctgaaagcagttcaaaacactcctccatccggtcagcctttgctaatgcaacaatcataatcgaatatgttttggctgtgggcgatgatatcgtcaacccctcagtcctcatgaactcaaacagttcccttgcctctgacaccaatccagcgctgcaaaatgatataatggctgcaacgtaggtgaaactctctggcgtgtgcttcatctgaatcatttcctcgagcaccttcatggccttcttggggtccctcgcccggcaccacccgaagaacagggtactgtatgtctctgcattacccagcaacttcctcttcacgcgaccaaacactgcctctgcttccttgaccatcccacacttgcagaacgcgtccagcagaacgttgagcgcatcagtctctggcggcgtacgcatccgaacccgccgcttcttggccagctttctcatgtgcgtgagatgcttctccgtgtaggcgcgcaggatctccagaaggtcctcaaccggcaccgacctcgagccatggcgcttcatgtgatcgagcacgttgcagaggacaccgaactggcggctcttgtatcgcgtgccggagagaatgtcgatgatgtcgttgtaagtcgtcggttcgtggttgtagccgtcctgttgggacgcccaggcgaagaaccgaaacgccagcttctcctcgtagcggaggcggtgcagcacgtcggcgacgagaggggtagtcagctcagcgcccaacgcgtcgagcgcggccttgcccgcgttggattccgtccccgtcttaatcacggcatcatagatcctattcgggagcgaggtcgggggaggcggagggaggttagggattgggtgtggggggaggcgggtggaaggggttgctcgtgtggactggagagtggtgggtgacgagcagggagagtgggagacgc

SEQ ID NO: 52312 - DNA, 234 bp, Zea mays
  Clone ID: MRT4577_14770C.1
cttgaaagggttttttttttataaggaccactgccagtgaataaaaaattggtagcgaaacaaaaactgaaaattgtttcggcgcgatcccaaggttaaacctaaatcgagttcggtccgaaaactggcccaaacaaaccaacccaggcttaattggcgggggtttgctcttcaccaagtacatccacgtgccggggggttacagaaccaaataaggcgcaaactttgggggca

SEQ ID NO: 52313 - DNA, 393 bp, Zea mays
  Clone ID: MRT4577_147710C.1
cgttatttctttatgcagttacaagccagatgtaatcaaaggggatatggactcagtaagaccagaagtgaaggagcattattccaacttggtaaagctgctttaatttacattcattactggtatgaatcgaataaaaagataaaacgaattttaatttgggaccgaggggagtactagctagtttaacttctctagtgcctcttttagttctggtgatcaaattggcatttcccttgtaccaatccttgttgagagaaaaaaaaagcaatggtcttggagctgtatatatcagatgggggttcatccaaaaggggataaataacagtatccttttttgttccgacttagcatagtatagctggtggcatctagtaagatgcagctagctga

SEQ ID NO: 52314 - DNA, 115 bp, Zea mays
  Clone ID: MRT4577_147711C.1
atcaaggaatgcttgcttacggatttggcttcaaaaacagtggtttatggtactcatcagattgaattcctagctgccgccgatctcatccttgtcatgaaagatgggaggatag

SEQ ID NO: 52315 - DNA, 710 bp, Zea mays
  unsure (1)..(710): unsure at all n locations
  Clone ID: MRT4577_147712C.1
gccggccgggctcggaactatcaaattaatattccagctctaactctatactagctgagcaaataaagacaccgaggttctcactcccgctgctagcgttgatcatcctgcttgccatactggactgactctccgtcgagattcaaccatgactaacacaatgtgacaggcgcacatagaccctatccattccacagaggaaccaactgatcccacaaatgatttcgaatccactgtatgaacgagaacgcaggcagaaagattccagagtgtgcgtacctactacgcactaccacnaacatcacgtggtgctcaatctgactccgccttcggtgccgcacgttcgagtgcttcttccaatgggatggcaatgcttcaacaacaccggaaacgacactggaatccactcgccacatgcgtacttcaaccaaaatagagtataccgcatctcacatacacagaacaatctcttctatctccgatgcgacacctatactgttaccagaagtgtgaatgtgcacaaatataacccacacttcccttacacatactattgccgaatgtatacccgtaagtgtatactagaacgaatcgcatcacggagtctgcaaacctcatcaactggtggctcgtaaacatcccaccaggcatatgcaacaccatcatgagcttatcacctacctggatacaagacaaccacagcttctgcc

SEQ ID NO: 52316 - DNA, 1240 bp, Zea mays
  Clone ID: MRT4577_147713C.1
catcagtcatcacgcacgcaggcgttcagtcgataggattcaggctctgaataacccatgcagcctagcctgtcatgttcccagtatctgaactctacctgtctgaggaaatcatccacggacggtagaggactcagaagagagcatggggagagacggtggtgatggtgagctcaagctgctggggctgtgggcgagcccgttcgtagcgagagcgaagctcgcgctccagatcaagggcctaagctacgagtacgtcgaggaggatctcggcaacaagagcgagctgctgctcagctccaacccggtgcacaagacggtgccggtgctgatccacaacgggacgccggtctgcgagtcgacggtcatcgtccagtacatcgacgacgctttcgccggcactggcccgtccctcctccccgctgacccctaccagcgcgcccttgctcgcttctgggccgcctacctcgaagacaagattgtgacgccgtggcggcgggtgttcatggtcaaggccgacgaggagaaggccgaggcgatgaggcaggcggtcgcagccatggacgcgctggagggaggcctgaaggaatgctcttctgggggtgggggccagagccccttcttcggcggcgacagcgtcggctacgtggacgtccttctgggtggcatggtttcatgggtcaaggcatccgagccgctctccggcgccaagatcatcgacgcagccaggacgccgctcctggccgcgtggatggagcgcttctgcgaactggacgctgccaaggcggtcctgcaggacgtccatgcggtggtcgagtacgccaggacgatgcagatgcaggcacgggttgccgctgcgaccgcaagcaatcagtagtggaaacaccgcgaaacccgaacccagtaggcaacgtgatcccatcttctcagttggctcccgttcggctcagtgcgtcacctctgtcctgccctttgcacctgccctatccgcgtgttcgtaagccgtcgtcccaggaaacgtcgtgccatagacgatctcccggactgttgagactaccaacgtgtgtttttgaacaggaacatgtacctgcaattactgatacgtgccatcctctcgttgagtcaatggcaacgatgcaagggtctgcatcattttggaattacctcaatctatgaagtgggaatgataaggtgggccacatttgatcaaaaaaaaaaaaaaaaaaaaaaaaaatggacg

SEQ ID NO: 52317 - DNA, 544 bp, Zea mays
  unsure (1)..(544): unsure at all n locations
  Clone ID: MRT4577_147714C.1
ccgggctttgttccagcttttggnatcctgnactttgcagacctggggggttttgccactctttgggttgtagtagctcatgagagngcacaccggtgaaccggaattctcccaggtgaataaagctggaaaggttaataactgtggatctggtccttagttctttcagaatttgcacctggggttcgtnggggcttctgtccattattgatgcttgaccagtcggaggtgtttaggatctgtttgcagattgatgacttccatggatccttgtatcagtttgaatctagaacactaaggttctaatccattcctttttagtcaaaaaaaaaaaaaaaaaaaaaaaaaaaaaaaaaaaaaaaaaaaaaaaaaaaaaaaaaaaaaaaaaaaaaaaaaaaaaaaaaaaaaaaaaaaaaaaaaaaaaaaaaaaaaaaaaaaaaaaaaggggggggcccttttaaaggatcaaattttacttccccgtgcttgcgaagaaatagtttttttttgggggccccaaaattaaatccactggccgggtttt

SEQ ID NO: 52318 - DNA, 312 bp, Zea mays
  Clone ID: MRT4577_147715C.1
ccttatttatataccttcctttttactttttcatttgggtgtcttttttgtttttttttttcattctttcatgtataatatatagcacacccggaaaactacaaattagtaaaccaaacaatctcggggcggggggggcgacccggaaaacccgggccggcacccgagggggatccaactttcccaaataggggggaaactaaagctggggggaaccaatgggaaaacggtgaatccccgggggaaaaatgtaacccgcttaaacatccaccaaaacaaagaaccgggaagctaaaggaaaagactcggggg

SEQ ID NO: 52319 - DNA, 160 bp, Zea mays
  Clone ID: MRT4577_147716C.1
gcggagaggcgcgcgctgcccaacgccagggttttgatccatcattctctgtgctgtgcgcgtggtctggctactgtcatctggatctcaggccaattagattctcaagctgctctaccgtcttaacaagatctaccagtagtcacacactccagcccat

SEQ ID NO: 52320 - DNA, 225 bp, Zea mays
  Clone ID: MRT4577_147717C.1
cccacgcgtccgcccacgcgtccgcccacgcgtccgatcagggacgtccggcgcgaaatcggcttcagcggctgctggcgtcggtgttgctgtcggagaacatctgcttggagatgcacaggcctttaggtgttgctgctgctttctctgctgtggagttgaggttcctctcggccattgggcttctcaggtacgagttgttctcttctttcagggcgtgctgtt

SEQ ID NO: 52321 - DNA, 2381 bp, Zea mays
  Clone ID: MRT4577_147718C.1
cctcgacctcgggccggccgggaggcagaccgaaaaggatcactcacacaccatcgtcctctccttttgccagcaccgcgaacccgccaccagccttctcccacccacgaagtacggaaggctgccggaaggagctctcacctcacatccatctctgtcgcgcccgtcatcctcctcctcctcccctcctcaactgctatcggatttgcgctgcagtggagatcgacccgggctgggaatttctttcgttggtaaggaaccctaatttggtcggatgggattttcatcttcgacgaagcccgcgagattgatcgaccttagctgacgcgagggattggaaagcgaacgctcgggcgtagttaattttctaggaagattggggtttcagctcaaacccccatgctcgatgctgaggacgaccctggcgggagatgacgaggatcttcgtgcagcgcgggaccgccggctcctcgtccagctccggccgctcgggctcgcaatcagcgcagcagccggcagcagctgcccgggaggagttgccgttgcaacctcagccacagctaccagaactattggctatagatgatgtaactgagcatttaaatgagggcaacgagaacaacagtagcagaattaagtttttgaggacggatgacaccatttcagagagctcgagctacgcagaggagagggctgccagggagaagcctcctaaggatgactctaatgtaatcaaccccacttccttggtagaggaaccgatagtgctccatacccctgatcagattgaacatggaaattctgtgccgtcaggaactaattcatcacagatggtgggtgcagcatcgcacccgccgccaccgccagctccgcctccaaaatcattgttggggaatagtgggttgtggagaatgggacctggaagttccaacagtgtgcggattggatctccaagaagaccagtagcttggccaccagtggcagctcggacatctgcttcaggttctcgtccttcttcgcctaggtcactcgttgatggtgaaggttacaatagtgctgatgaacagggtccctgttacgcctcgagttatgatgattcggaaagagagcgtatgtttgagcatgacctaaggcgagtgaaagggttggaaatcagaaagacggccgaagatgggaactgtctattcagagctgttgctgatcaagtttatggagatgcagaagcttatgacatggctaggcagatgtgtgttgattatatggaaagggaacgggatcatttctctcagtttataactgaaagttttacattatactgcaagaggaaaaggagagacaaggtttatggcaacaatgttgagatccaagcatttgcagagatgtacaatcgtcccattcacatatattcctacagtacagagcccattaacatttttcaaggaagctacaacacagacactcctccaattaggttaagttaccatcatggtaatcattacaattcagtggttgatccccgccgacagactattggggcaggccttggatttagctcttttagagggactaatgttgacagggatcaggtgaaggctgcaataaaagctcagcaagaccagcaaattgataatgcactgatggcagaagggcgattctactctgatctggagttaacagagagggaaatagaacggatggtgatggaagcctcgcgttcagaatatctggccaaggagaaaaagcttaacataagggaatcatcgacatcaggggcagagccatcttcatccgctgcaattagtggttcctctcgatcagttgctggagcggacagaagcagcgaggactactttgtgcttccagacactgtgctgactcgcagcatgcagctgcttctcgcaatgggcttcggctacaaccaggtcatggaggcctacagcatattcggcgaggatgtggactcgatggtctgctacctggtggagaccggaggagcctcggcaggtggtagcaatcgccggaaaggaaaggctgctgagtgatgtgtgcaccttcattgctgtgaatgtaattgatggaaaacgttgggcacaactcataccagataatgacagccttatgagttgagatgtcgatatacctgctaccttatgggtgatgaataaatggaactcacaactcttctcgatgccttctggtgatcaagttaaataattaatgatagttggtggttgggattctgggaaaatttgtgggtcaccctggtgcctcattgtgatttttgtgggaaccgcgaagctcgtggtgtggtgtatgtggagtgtgaacattatctatatttttttcatctttaacaatgtctcctaaattcggttctctat

SEQ ID NO: 52322 - DNA, 263 bp, Zea mays
  Clone ID: MRT4577_147719C.1
aaataaatatatatcgagagcggcctctataagatgatacaattacacacacaacacatacggagaggatatatctcatatagagagacataaatatggccgccctctccacagatttaaaacttccttgcgtctgaaaacaccgtcattacacatattaatctccccctaaaacaaatccctttgcccagctttaaaaaatatacgaaaaggggaaaacccatcgctctcccaaccaaatgcgcatactgaatatcccattt

SEQ ID NO: 52323 - DNA, 656 bp, Zea mays
  unsure (1)..(656): unsure at all n locations
  Clone ID: MRT4577_14771C.1
atcagagcttgcttgctcgcatgctagcttgccgtcgtcctgcgttggtccttgctgggtcgtcttgtgttcatttctcatcgtcggagagaagagggagtatagctagctagctagctaggaggggaggtgcgtggtggtccgtatatatacatgcgcatggagggggccggaggaggcgcaggcggaggcggcgccggcgctggagggtgcctgggtatgggccgcggccgtggttcgcgcggggaatgctctacctcaagcagccgggcggcgcggacttagggttccggcgggcggcggtggcggctgctgctgctgctgctgcggggctgtgatctgccgctgtggtggatgcgaggttgagccagcacgcgccggggattctgctggcaatggcggaggcggacagctgcctcgagagcttcgagctctacgagtccgagtcggattggtgagaaatagtgggtctggtttgtgtaacctgctcatgacggttttaatgctcaactgtgacccaatacatattgcgccaaaaactatgaacaaatctcaaacttttgaattatttgtggctattggtgccacccgaatcttggtctttgactgtagaagtcttcatttgctgaagnatgagtacctagttccttaactga

SEQ ID NO: 52324 - DNA, 1968 bp, Zea mays
  Clone ID: MRT4577_147720C.1
gagaatttgtggaggctagaggacagtggttcagatgactggatggtcgttagtttcgagataaccttcccccagctgctggagatggcaagagacttgggtctcgacgtgccctgcgacgagccatccctgctagctatctatgcaaggagagacgcaaagctcgcaagaatccctaaagaattactgcacgcttcaccgacaactctgcttctgagcatagagggaatgccgggcttagactgggagagactactgaaactccagtgctccgatggttcgttcatgtcatcgcctgcacccacagcctacgctctcatgcagaccggcgacacgaaatgcctcgagttcctcgatggaatcgtcagcaagtttagcgggggagtgccctttacctaccctgtggatctgttcgagcacttatgggtagtggacaggatagagcggctgggcatagggaggcacttcacaggtgaaatcaaggagtgcctagaatacgtacacaggtactggggtgacgaaggcttgcccgccacgagggacggtccggtctcagatgtcgatgacacggccatggggttccgtcttctccgactgcatggctacgatgtctctccttcatgcatatgcagctgtgtttaagcacttcgagcaggacggggcgttctactgctacccagggcagtcgaacaaatccgtgactgctatgtacaacctctaccgcgcttctcaggtggcctttccaggcgaggatgagctccgacgcgctgaggcatacagccgtgagttcctctgccgcagacgagcctccggggagctcaaagacaagtgggtcatccccaaggacttgcctggcgaggtcgcttacgcactggacgtgccgtggaaagctagcctgccgcgcatcgagacgaggatgtatctggagcagtacggtggtgccgatgacgtgtggattgggaaggtcctgtacaggatgtctctcgtcaacaacgagctcctcctccggacagctcaagccgacttcagaagtttccagagacaatgcaagctcgagtggcatggcctcagaaaatgggccagcaggagaaacctccaagcatacggcgtgacgtcgaacagcacgctgcgatcctacttcttagccgcagccagcatctttgagccagacagagcgacagagcgtctgggatgggctcgcacggcggtgctcgccgaggccgtctcctcctgcctccgagacggtcgttgtagccgtgccgacggcatgctgagggaactgaccagcggcatccacctacgcaacgacgataatccggcagccagcttggtgcatgctctccatgagctcattggcctccttgcattcgacaatgcttcctacaacagccttcttgatgcctggaagcaatggctcgccatgtggaccgcccagggacacgaagggagcgtagcgctgctgctggttcgcacagtggagatatgctccggccggaggcgtagcgcctctgccaccgacgatggccaagcacacagcctctccgagtactcccagctcgagcagctcacgtcctcggtatgcagcaagcttgctgcaggcgccggagacggagacgacctttccccggcaagtgtggaggacgcagcagatcgcctccgtgtggatctggagatgcagacgttggctcggtgcgttctccggagccgcagcagtatcgacgcagtgaccaggcagacgtttctccatgtcgcgaggagcttctattacgtcgctcattgctcagctcgaacggttgatgcccacatctccaaggtcttgttcgaggatgtcgtgtagccatcgtttgggcctcgttttgtatctttaaagcagtgtttggttccacccaggtttagttccggtcaaatcaaatgtttgaatgataattatatgtattaaatatagtctaattataaaactaattagat

SEQ ID NO: 52325 - DNA, 248 bp, Zea mays
  Clone ID: MRT4577_147721C.1
gcgggtcaacaaccgtagcccacacccaacctaccagatatggacctgcatactatagacccatgagctgggaataaacaaggctaataaactcgacccggctacctaaccaagttggacaatgagcccgcaaaagagcccctccacaacccaagcgagcgaccactggtctgacgaccaaccccaccctaaacataacctgaactggaccggtacaagcggcccaattaatctcccccatgcacccc

SEQ ID NO: 52326 - DNA, 534 bp, Zea mays
  Clone ID: MRT4577_147722C.1
ctgaaactccagtgctccgatggttcgttcatgtcatcgcctgcacccacagcctacgctctcatgcagaccggcgacacgaaatgcctcgagttcctcgatggaatcgtcagcaagtttagcgggggagtgccctttacctaccctgtggatctgttcgagcacttatgggtagtggacaggatagagcggctgggcatagggaggcacttcacaggtgaaatcaaggagtgcctagaatacgtacacaggtactggggtgacgaaggcttgcccgccacgagggacggtccggtctcagatgtcgatgacacggccatggggttccgtcttctccgactgcatggctacgatgtctctccttgtgagtatatatcatggatctagacatgtagtgtatatataaattaatgtgatgcgatggacttgcatgttgcatgcatgcatatgcagctgtgtttaagcacttcgagcaggacgggacgttctactgctacccagggcagtcgaacaaatccgtgactgctatgtaca

SEQ ID NO: 52327 - DNA, 225 bp, Zea mays
  Clone ID: MRT4577_147723C.1
gggaagagtttctcgcgcggcaataacgtaaattcattcagtcccaagctggtttcacccaataatatacattttttccgtaccccaatccaacccttcaaatttccacccttgtcagaaacaaacataaactgggcacaagaaacaaaaaaccatccagggtcctcattttaaccaaaaactcacttaccaaatgagcttggatggaatgcccctaacaaaatc

SEQ ID NO: 52328 - DNA, 648 bp, Zea mays
  Clone ID: MRT4577_147724C.1
ccggccggagcgcgcgcgcctcgtggcccgcgtcgggctctgttgcggtgccgcgctcgggctcgtggcgtgcgccttcgcggtgtccgtgaggggcgtgtgggcgcggatgttcaccaccgacgccgccatcctgcggctcgcgtccgcggcgctgcccatactcggcgcggccgagctgggaaactgcccgcagacggccggctgtggcgtgctgcgcggcagcgcgcggcccggaaaggcggcgaggattaacgtctacgccttctacggcgttggcatgccggcggcgctcgcgctggcgttctggcccgcgcggctcgacttcaccggcatgtgggtcggcatgctcgctgcgcagctcgtgtgcgcggctctgatgctgcacgcggtgcagcgcatggactggaccgagcaggccgtccgcgcgagcgtgctaaccggcagcgtcaaagtcgtcgccgatgtcaaaagcgggcatgcagacgcggccaaagtaaaggcggaggacgccatgctcgtcgtgaccgtgataacttgatcgtcacacggaggattcttaaatattttttcgctctgttcgatccaggggtatttttagcatttggaacgataaaaaaaaaaaaaaaaaagcggcctccctggccc

SEQ ID NO: 52329 - DNA, 505 bp, Zea mays
  Clone ID: MRT4577_147725C.1
cttacaggagctgctcggtgggcgggcatcgttcgctccgtcgtcggcgggacgatccagactttgccagctgaatcggagggcgcgtgcgtgtctggcggagacgcacatcacgtggagagggagacgcgccttgtcagatacgcacattgcgagggcggtgagaggggccgttggaccccgcgcggagcgtcaacgtcatgagctctggaaaccaattggcgagttgccggttctaatcatggagctgctggcaccatcacctgaggtactcgaagttgacctccgtatgctacagctcggtccgggcgcgccggtacatggaaccacaactacaactggcgcatcaggagggccaggctgttgaacactgctgccttctgcatacgactgacgttgaaccgcacttcgaagtactcctcgaccacagcggcctgaaccttgaacagccacagcttcttgtgagggaccccgtcgtcagactcgtagccggtgacggtgccgg

SEQ ID NO: 52330 - DNA, 287 bp, Zea mays
  Clone ID: MRT4577_147726C.1
agttgtcgctgctatttttcctgcagcgcacagcagcgccctcccacatgccctgactgagaaggatcagcagaatgtagtcatccgggagaatcgagaggcacaattgctgggcgatgcaggcaagctgtcattggatggtcagcaagggaacaatgtggtgcaggtagcagtactgggtagttcgagcaccgttggtgctagttatttgcagaacggtgacaaggggggtggattgttggtggctgaggagctaggacgttgtggcagcagtgatgtggggcaag

SEQ ID NO: 52331 - DNA, 608 bp, Zea mays
  Clone ID: MRT4577_147727C.1
tgatcgcttgctcgcgcaaaccgtcgaagatggctcccgatgtcctcaatgccctggctagcatacaaccttcagcttacgacatccgcaccgtacccgtagagtctctacctccaaatcgatacaccaaggagcagcgcatgttgagacactgctctctgccgaactcctctcccggcccgaacttcatgagcatcgccaccatcttcgcctccctcgatgtccaacacataataacatgggtcccctccgtcaatgactatgtggtgaaggtcgtcgacgcccaatgcgatgccgatctattcttgagcgatagtacccacatttgcatatttcaccgaagacgatctcatccgccgtacccgccactacatcctcatcctcgaccacttagcgatcacccacctctcctatggcatcgagatgtccctggccgttgacagtaagaaagtggtatacgatgacgactacacgctccatactcctcgtcaacaatgaagagcagagacatgcggtgcgctcatgcgtgagcgtatgtcacatagagtgagtccgcgctgcctcgtcctctgatgccacggggaagcctgtcgacggcagctgatctt

SEQ ID NO: 52332 - DNA, 222 bp, Zea mays
  Clone ID: MRT4577_147728C.1
cgcgcgctccagctgctctggagcttagtggctagctcacatcagtagaggaccagagcaagcatggagtcggcggcgactgcagcaacattatacaccgctggccgaggcatcaaggacatagtgaaccacatgtctcatgtgtgcatgatcacggagactaaggatgcactcaagctctggaagaaacgagcgctgctgacgcagaacatcaaggtaaag

SEQ ID NO: 52333 - DNA, 279 bp, Zea mays
  Clone ID: MRT4577_147729C.1
cccacgcgtccgcccacgcgtccgcccacgcgtccgcacacgcgttcaaccacgggtggggtacattgacggacgtggtaccccatgtctccgatcagagctccgtacaattcttagatggatatgacaatgctaatccgtagaaagatgatcaactgtagctaggtctctttctagttgcaatgaacctcttgcaatcactacatagcattctacatagtgatcatcgacatcttgttcttctacaggatgtacaacaacatttccgtgaactagatc

SEQ ID NO: 52334 - DNA, 281 bp, Zea mays
  Clone ID: MRT4577_14772C.1
gtcctttttttttcacggagacatcaagatgcagcctgtattactactgcagggtgggcgctatcgattttgcctcggatgttcagtctaccctccgtctgtcactgactacccttcgtcaggccagccgcatgcgtacccgccgccggtatactgctcgccttcacccatgtccgcctgtgtgtaccttccccctccgtagtaagactttaaggcggctacttcatttttctgaaaggatggtaaggatctttctattcacctgccttgtcttgtttcca

SEQ ID NO: 52335 - DNA, 364 bp, Zea mays
  Clone ID: MRT4577_147730C.1
cccccctttttcctcgtcgtgttccttaggtgttcttataggtccattgtccaccccagtgtgaatgccagccagtttgtgttcatgtgattcgtcgggctgccatgccatgcgcaagcaaagctaaaaaaagtagctcattagccccagtgtgaacgctgtcatgaggcactaacccaagagcatgattaattcttaatcaaaaaaggagcatgattcctgttagtcaagtcaactgacattgagctgacaattgtccttttatattcattttttaaaaatacatgcatattcgtttaaaaaaaaacccccccctttttttttttttttttttttttttttttttcagggaaccataatttca

SEQ ID NO: 52336 - DNA, 196 bp, Zea mays
  unsure (1)..(196): unsure at all n locations
  Clone ID: MRT4577_147731C.1
ggccgacccacgcgtncgnggacgcgtggaaggcacggnttatacataaaattatgcgcagccactttgcgcgggttgtggctgcatatgcgagcgcacacgctgggtgttgagacacctgcggcggcagatgaaaagggaaactagcatgcatggagtggaccgactggtacctgtaagagctgatatcgatatg

SEQ ID NO: 52337 - DNA, 316 bp, Zea mays
  Clone ID: MRT4577_147732C.1
attcggctcgagcacggtctcttaaaagatctagcagggatcgacacatactcaacggtcacatgaaaggcaaccgacgatgatggcgacttcgctgagctgcctgtgttcaagtgggcaactctcctgatcccctgcaccactgagctcgtgattaacctggtcggtatagtgcctggcgtgtcgtgtgctatccacaggggctaccactcctgtggctcactattaggcaagctactgtctggaatctgggtgatcacccacctctacccttacctgaacggtctcatggggaagcgaatccgcacacggacca

SEQ ID NO: 52338 - DNA, 262 bp, Zea mays
  Clone ID: MRT4577_147733C.1
catcccttaatacctcaacgttcattaaccccgcgtccagttcatactcgtaccatccacaaggtctatcgaccatacaacccctgaacatgtctaatctctcccatttctcaaacatctttcaacaccagatcaacacattctacatctactacaacgtcaaacttccattttacagcaccttcaagccttatcccaccaatctcaggtccaccattacacactatacagctcttatcctatgttctaccagcttcataca

SEQ ID NO: 52339 - DNA, 348 bp, Zea mays
  Clone ID: MRT4577_147734C.1
ctgggggccgggactaggggctgcgagctaagctccaagcttgccttaaccttggccatatgtgcttgctgcgggaaactgtgatccgctcgcgccaccccccaactatcctgaccctatcatacaagtgtatagctttgcaggggctcatgaaagtcctaacttaccattattgccaagagctcactgacacacctacctctttactgcctgttccacttcctaaactaaggaattcaggcaaccttcggttagaggacatctagcttagagcacgatctttcgactgactaggataatgtgcactccactcgagctgcgagtcacctcgggcctgggcgggacgcg

SEQ ID NO: 52340 - DNA, 228 bp, Zea mays
  Clone ID: MRT4577_147735C.1
acgcaaacctccagaacatggtgtaggcaatcaaaattgagcaagtcgatagtacaagagtgatgatacgcttaccattgctagcatgacgatcgctaccagtgccaccacaaggaccgcctcggggcgtgggcggtattggcgatcgtatcagcggtcgccgccgtgcgagatttcgtcgcggtgctagccgccgccacatcaggagagctaaccacgatggggttg

SEQ ID NO: 52341 - DNA, 217 bp, Zea mays
  Clone ID: MRT4577_147736C.1
ggctcaactcgcatatcattcaggagactgtggcggcggcggcgctcctctgcgcatgtgctcggcggatgggctatcacgcttctccagagctccttacggagcaccagtgaatcaggcgttcagtgccacgctgccgtcgctcgctcccaggactagctgtggctcaccgagtgtcagcgatcaccaccacgctaccgtcgctcaccatgtctca

SEQ ID NO: 52342 - DNA, 449 bp, Zea mays
  Clone ID: MRT4577_147737C.1
gtaaccgatgcggcataaaatttatacattgagaccgaagatagaacgacgatagctctagatagacacaaagctaggcaatgttatattatgttcacaagacacacttagccttttaaaccgttattcgacatgtgatgtttactcctcgtaaaggattacagggggatgctgaacacttcacataggaagatggacatttttttcagtgaaccctaggcctttgaagttgtgtaatgtaggcacaatctgaagcctttgcaggcctgcatgcgagcgtacattgataagcattgtagcttcatgggttgtcaccattatgatccgtgggaagggaataatggaaacccatccgggagtacagtatatgaatgaccctatttttggtggggaaggaaggactagccaaatgcaccatattgagctgacacggcgggcggttcttgtac

SEQ ID NO: 52343 - DNA, 634 bp, Zea mays
  Clone ID: MRT4577_147738C.1
ctttcttggcggcattggtggatcttcatcgacggttcttcatggggtgcgcgcgccgccgttgctcctccaccggcgttgcacccgcgcccgcctaacgccgcccgcgtccgtgcctgagaacgacatcagtgcctaggaaccctcgcgtcgcgttcgtgcctgggagccagctccaacccactgggtccacgggggggggcaaccgtcggccgcaccaggtgagcgccccctagttccctcacgccccagaagaaactgatctcgtcattgttaagggaggggggggagttcgtcttgcctcatgtcatgacccaaatggagaccaagagaatcccaaaagctattaagcccagtcatcaagttatattccaactaaggcccaagcatcccctacatagagctcggtcagcaactcaagagggcagacaacaaattattcagaaagaagagaaaacagagggaatagaagagcaccttcttcctcctcaagctattctgagatcctatccccctctcgatctctattgtggctgctcacgctctcgggtgatctcgccgatgagctacgggtgtgacagtggtatcagaggtagtcatcctcggcattggtgtgacggcagcgctgttgcgg

SEQ ID NO: 52344 - DNA, 742 bp, Zea mays
  Clone ID: MRT4577_147739C.1
tttaatacctgcttctccatcctgcatttcaatctacaaaatcaccactgcatcttgctcatcgatctaaatcacgagtccatcttcgatttgaacttgctttgaatactctcagttggtttaggaaaaactgtgattgacatggacttgaaaaatggaatcgtacagggaagaactctccatcttttcaaaagaagtaatacgatttggcaacctctgcaaagatcctatatggcataacttggggcgatattttgacaagtatgcctctgaaaagttagcgacagataatacacctcatgatcattcaaaggagagtatggaagctattgtccagcaattgattaatttggcacaaaacacttctgctgacgaagagcttctttctgatcttgggactgatgttaaagacgaatgcaccaagtttggtctcggggataatgtcaaggtacacaatgtttgctcacctcatcgactcgagccatgtgagggttcagcgtggaggttcgtcgaggcctgctgctcgtagctcctgtcgctccactcaagatccagcagaagtggagcaactacgagaagaacttaggcgacatcacgattccttgaagcaacaagctgcgcaacatgaatactatgctacacaaccaggtatgggatatttgccgccaccaccatggagatatcctacacattcaatggggccttggggacgccccccatggccaacacaaccacttccatt

SEQ ID NO: 52345 - DNA, 1780 bp, Zea mays
  Clone ID: MRT4577_14773C.1
gtaagtaaaaaaatcaaagacgacccagacgaaacatttgtgaaatcgttctatttcctccatatcctcaaacatatgcctatccccgcacatgttcttactcgcatattggacttacgaaaggtaagccttattcccagctatttaactcaaaaaaaaaactcttaacgcccatatgttcattctttctttgcttctcatgtttccatgctcctttctggtggcaggaggcaaagaagagacataatggagataatgatggttcaaatccaaccattccttgggcgtggttcgagcgagaattcaatgatcagtatttagatgttatgtctcgggaagcgcttcgacagcaattcgttagcctaaaacaagggagtggtactgttcaggactacaatatgaaatgcgacaacttgatgaggtatgctcccgacattgtggcagatgacttccgcttgcgacggcaatatctggaaggtcccagatttacacaaataatcgaccttcctggtacagtgagactagtggatctgatggcacatgcgctacgagtggagtcatatgagcgggtcagcaaagctttgttctcaatgtaaagccacgagggatcatcaatcaaggccaacaatgaattcctcgaggccggccggggaaaggcgatcgcctctgaaaaccgagatcctcaaaacccttccccctcctcccttttcccccgttcgagtgctcgagctccgaccaaatctcgcagcggtagcaatccccgagcgagcccgaagcgcggatcaggggaggacgacgccctcgattctgacctgcggtcggcgcgacttacagagaaccggagatgcagcagggcgacggcacggaggcgcaggtgacgtgggaggaccagcagaacatcaaccgcttcggtcgcctcaacaaccgcctccacgagctccaggacgagatcaaactcgcgaaggagacgaacgagaaccttgatgatgctgggaatgaactcatcctgtcggatgaagatgtcgtgcgcttccagatcggggaggtgtttgctcacatgccgagggacgacgtcgagactaggctggagcagatgaaagaggatgcggctaagaagctggagaggctagaggaggagaaggaatccgtcctcgcccagatggccgagctgaagaagatactgtacgggaagttcaaggacgccatcaacctggaggaagattaagagtagtactggagttgtgacgacgtggctctctctttctagttcaggtcctgtttttgttcccctgctccccccacagaagcgcttggcccgctcgtgtaatggaagcttgagtctctcagtctttcagaagctcttttcaccaagaacccagaatagttttcattctgcgggtttatacggattgaagctaatggcgctgagcccatgaatccttttccagttgatgctaaaaaaaaaatgtgggtacatcgcttgccctatttcctagtacttactagcaagcctgtgactgtgagtaccggaaaacagtggagataacgggcatgtaggtcttgttttctgcctaaaatgggcatcatattgctggtcccttgacatattacgacttttcgtgcaccatctaccggtatttgcactgcctagttagttgagagggaagaggaaacggggcgccagtcgcagcctttgagcaaatttagtctttagcgactagttatttatagcgaagtggaattgtggaaatggcaatgccagtagcagcctttgagccta

SEQ ID NO: 52346 - DNA, 585 bp, Zea mays
  Clone ID: MRT4577_147740C.1
cgcttccaagttccaagcgctaacgcgcgtcaatctctcagacagccggctcacgacgccctggccagctctggtcgccatgagtcgcagcaggttctttgcttggacgctcgcggtcgccgtcgccgtcctcctgtggtcttattgcgccgccagagcagtctgctcctcctcctcgcgtcctctcgctgctgcggacgatgggggcggcgcgagggacgacgagccagagccatgcgccgcgggcggtgccgcctcccgtggccagagggagatctggaacagcaggcggtctttgggtggcaggtcgtggtggtccccgccgtcgccgctgtggaactcgcccaggacgatgcccgtgcccccgccgccgcaggtgtgatgtcgagctgccgagctggccggctggactctgctgctgcgacctgcgactgcgaggagtttcccgtcgagtgtgttgttgtgcctgaatgcctggcctcttctttctggagaggtatgccgtatgcatgcttcaggattgcatacgtacgctgcttcagctgtccgtctacgaacgtactaccgacgtgtgtgatcgaagtt

SEQ ID NO: 52347 - DNA, 835 bp, Zea mays
  Clone ID: MRT4577_147741C.1
tcgaggccggccgggatccgtgatgaagacatttcctgaaccactgtgattagtacagcaaaaatcaccatctttcgactgagattaaaaaccaagtctccgtcgtccatgttgggcctgtccaccgccccgccttgaggccgcagtcgctaggtacgccaagtggcctcgtccccctttcctctctctcttcttctctgacggtctgaccccgcgttagttcgaccaagaatggtcgagcggagaggctggggagtggtgtcgtcgtcgccagcacatgtgggtgagtggcctggtcgccggggcaaggcgggcgggaagacgaaaaccccaacgttgctgcctgcctgcaaaggcgcagaaacccatttgattatgttcgccagtggtgcccacgacggaggggatggcaagctccgtctccttcctgctgttgaagccggcggagctacggaggggatagcaagctccttctcccttcctgctgttgaagccggcggagcttgtggaggcgctgcacaactacgacacgacacctagctctagcctccgcaccgaggacatcgtcaacctgtagcccaccttcgtcgtcgaggtcctcaccctcgacattggcagtcagcctcctcctcatcgcgcttgtggtggtggcggaagccaacatcgctgctggcaatggtaatgcagttttagcataccacaccaccttttcctggctcacaccaccttttcctggctcagcattcttggcttgtgttttagcagctaagttaatacatgtatgatcggtgctttgctgatgaaaaaaaaaaaaaaagcggccctcgagctcagc

SEQ ID NO: 52348 - DNA, 142 bp, Zea mays
  unsure (1)..(142): unsure at all n locations
  Clone ID: MRT4577_147742C.1
gctacacaactgggagcggatganccactctggcaaaanggnnccacgtacntccaggctctgnacatcccgtggtacgccacttcatcacacggncggacggntggnaacnttttgangaaagtnnagnngcccnacganc

SEQ ID NO: 52349 - DNA, 221 bp, Zea mays
  Clone ID: MRT4577_147743C.1
cataaacgcatccgtaacctttttcctcatacctttaatatccatcctagttatagtcctcatgttactaatcgcattagtactactattattagtcctcgtcctcatcatgctagtgttagtccttttcccactaacagcagttctagttagcctcgtaacgctcctttaccttatcctagtactcgtcctacttgcccctctgataaccatcacaacca

SEQ ID NO: 52350 - DNA, 2925 bp, Zea mays
  Clone ID: MRT4577_147744C.1
atggacgtatcggctctctgccccggcgggtggtctccctcctcgatcccccaccccgcccgatcgcttcccctccccactcccctctccaccagcccctcgccggtcaccaccctggtactggtgaccacctccttgtcttccaccccctcggcgacagggtccagtctgtcccggcggctgcactcccaggatgggcggtccaaggcccagagatggtgcggcgactcttcggctggaggttcccttccatctccacgatccattaaagatgcagcccccaccagctcggtttgcgccgccagcccttctccctcggcaagtcactgcgccgccagcccctctcctgcggcccttccggtggatgaggaaggctggcaggtggttggtcgtagacagaggtctcgtggtgtgcatctccctcgtcgagggtcccgagtggatctccgaggtcggtgctacaactgcctctctacctcccacctcgtagcttcctgtcggcggcctacacagtgcttgcagtgcttcagttttggacaccggggggcaaagtgctcgtcccttccggttgaagcacagaagcggacggtgtggcagcgtctgggctacgtcaagacgcgtcctccggtgagacaggaaacctcccagagagctccggtgtggtcgaggtttcctgtgcggcctccggtgtggcagagactctccaacatggacatggttccttctccggagggtaagtttcaggaaccgccccgcagtaaggtttcagtatggaagcgcctcgctgcatcacatgatcatgcaacgtcggaggcaaacgctgaggaagacaagatgtctcctcggcccatgcggaaaaaaagacgttccaaacacgaaaaaggtacagttgcgcacgatttgggtcccactcaggcatgcccacctccttctccccatctagatagtttcagctctgaggtggctaggccaccctcagcctcctcctgtgttctggatttttctgaagtccttgctagggaggaaattgcccttcgtcgtgctctattcgtctctgtggctggtacacgacctggggtttctggttctgacgtgttgaaggaggtgaggcattgttttggtgttaagttggaggacatgaagattcatcagacctaccctgaagacttcctgttgtttctaccggatgaagacacgacaaccaaggttctcaacgaaggaagacctctgaggggaccccgtttcagtttgatgctcaaaagatggtccagatttgctcatgcatcctcatcgtcgatggctgagttggttgatgttaaattaataggcattcctcaacatgcctggtgtcgatctacagttgaacatttgctgagggactcatgttgggttgaagcattacattcagaaactatggaaatgagggatttttcagccttggtggtgaaagcatggtgttttcatcctgaaaaactggttaggaaaatggatttacacatcttggaggctgggattgatgatcaggaaaagagattcttaacctataagatctccattgatatccttccaccaaagaccctacagctgtcatcggctaccccacctcctcctcctccaccaccgtcgggaagggaacctgatgatgatgaccctgacgatcaagatccccaacaatggcggcggccggtcccagttgatctgcggcagcctgtccagctgcgtctgggcccacgacttcctttgggccgcgcgcatgcggtaaatgtgcctgggggtgacccgagagttgaggagactgccccaggagttgaggagacaactgggaggtatgaggatcagttattgttgagcacgggagccaaggagattttgtctcagccaccggatccatatgatgaaactataacccttgatgggccattgggctcgattggtccatcttcaccccaccacaattccttggatgagccgctagagatgaccaacctgaactcgccccatcagctctctccaatacttaaggacactgtgatagggacgctgggcctgaaatatctctcttcgccccctcatgaccagcctgaggcgacgctggagaggtttgtttctggctcgccccataaaattacaacggacagtgaagcaccaccatgtgtctcctactcctccgtgacctttgggaagaagcagactgccactaccctgaaggtctacaccagaaaaatgccaagagaaagggggtaccaggatacagaggttgttcaggaaactaaaatgcagaatatctcctaccttaccattctttccatgcttggttctaatttcagtgaatacattttcttcccttctgttggagtcagtgggggcattttggttgcatggagacacaatcttaaatctactgggcagagcagaattgataatcataggaatgatgagaagctgctatttatgcaggagttaagagatattaggactgcttgtctagggccttggatgttggctggtgacttcaatctcatctacaggaccactgacaagaataccaatcatttcaacagagctatgatgaatagattcaaaagattaattgaagacctagccctgaaagaaattcccttgcatgggagacaatatacttggtccaaccaacaagtgaatccagttcttgtcaagctggatagggtgttctgctcagtggactggaaaatactatttccaaatgtccaccttcaaagtactgcctcccaagattctgaccactgccctctcatcctggacttaaagataacagaactggaagaaggcgtttccattttgaggccttctggacaaaacttgatgattttcaggatactgttgtggatgtttggaactcagttcaggctactacttgccccttcattaccttggacagaaagctga

SEQ ID NO: 52351 - DNA, 417 bp, Zea mays
  Clone ID: MRT4577_147745C.1
gagggagattgagtgggtttaaatctcaaataagtcaaagttttttaaattttttctaatctcattcaataaataaccgaacaaggtatgagatggtctgtgcgcctgtggtcttgccccattctgttgggccgcctgagacgcagattacagtaccagcctcgcaccattctcttcttgaagaactgaaccgtgatggtgatcaagctattcagtcagcttctactgtagatcccagttcctttcctgggcaagctgatctctggtcgatccatcaaccttcattagcaggatcaacaagaggtctgcacatcttcttccaacgcctagggctgaacagaggaacctgaattctagactatgactgtcctcgacgcataggcgcgtgctggattggcgtcgaattttcatcaagat

SEQ ID NO: 52352 - DNA, 319 bp, Zea mays
  Clone ID: MRT4577_147746C.1
ccgtattgtcgtccctctgtagggcattagcaccggccgacgatattactaagtgcttaatttaagtactggcccttggcgtgaaacttcaccagctccgcgactgcgcatggctaacggccttcctgatcctcgctgcgtcgtcctcatggctgacactgcacgctctctcgacaaatccgtcgaagccgtcctcttcgactgctatgatttcatgtgtgacggagatatgctcagtggatgggtcccatcaacgaatgaacgacgtaggaatctgggatcaaacttaatttttgtgtcaaatgactctagaccagtc

SEQ ID NO: 52353 - DNA, 455 bp, Zea mays
  Clone ID: MRT4577_147747C.1
gccggccgacgtgtgcgcgaggttctccgcccccgtggataacctgtacttcgccggcgaggcggccagcgccgagcactcggggtcggtgcacggcgcctactcgtcgggcattgccgcagccgaagaatgcaggaagcgcctactgacgctgaagggcatcccggacctggtccaggtcgcggcatgggaggagatggccggagctgtggctcccctgcagatttgcaggacctgactacctgagtgagctggatcagtgattcagtggctgccttggagtggtttgatgacgttgttgctgcttcctgacgatcgcgaaagtcctttatattgtgtaataatgttattatcttgaacgtgtgtattgtctggaataagtcaagatcgactgatactgaacttattacgttactccttcaaatacttaataataaattatgagtccttaattc

SEQ ID NO: 52354 - DNA, 344 bp, Zea mays
  Clone ID: MRT4577_147748C.1
gcctttcacctatcacctcggctagccaacctcgcgcgatgtcaccaccactcgcggtgagctcgtcaccttctgtgcgtgacatgtgcctcatgcgctcgatggagatcggggccgactccctatacaaagccaagcttatacgtgggttctgccaactctactacggtcaggaggactgcagtcgtctgcatggaggccgacatcacccggtctgatttcattatcaccgtctaccgagaccactggacctacctcgcccgcggaggggacctagtctgcgacttctacgagctgatgtgccgctacgctggatgctaccgcaggaacggcagttccatgca

SEQ ID NO: 52355 - DNA, 313 bp, Zea mays
  Clone ID: MRT4577_147749C.1
cccggcggctgtagctgctgttggaaaacctaaacctaagctgatcccatgttggaatgcgaacacatgaccctaaacagggttgggagtggtattaatagacttagtaaatgggtcaggcccattacagtgagggtgagacggtaattacaaggggaacaccccaaaccctagacgggtagtctaacactcctaaaacttaatcgacatggttctggtcaatattttatttcttctttgatctgagcattttttttgcaggcttttcctgctggttctggtcccaatgaccgtactacatacatgttcactt

SEQ ID NO: 52356 - DNA, 883 bp, Zea mays
  Clone ID: MRT4577_14774C.1
cattgggtacctcgaggccgggccgaaaaagagaggaacttcattttgtagctttgaatcgcctctcagaaccgagatcctcaaaacccttctcccccctcccttctcccctctcggatcgagtgcttgagctccgaccaaatctcgcagcggctgcaattccgagcccgaagagcggatcaggcgaggacgacgccttcgattctgatctgcggtcggcgcgacccagagagaaccggagatgcagcagggcgacggcacggaggcgcaggtgacgtgggaggaccagcagaacatcaaccgcttcggtcgcctcaacaaccgcctccacgagctccaggacgagatcaagctcgcgaaggagacgaatgagaaccttgatgatgctgggaatgaactcatcttgtcggatgaagacgttgtacgcttccaaattggggaagtgtttgctcacatgccaagggatgacgtcgagactaggctggagcagatgaaagaggatgcggctaagaagctggagaggttagaggaggaaaaggaatccatcctggcccagatggccgagctgaagaagatactgtacgggaagttcaaggatgccatcaacctggaggaagattagcagtactggagtcgtggcgatttgaccctctttctagttcaggtgctgttttttcccttgctctccggctctcccaaacatcagtcttgtgatgctggcctggttgtgttagcagttctttcaaaacctctattacccagaagaacccagaaaatagttccattcattccgcgggtgtatatgcattgaagttaatggacctgagccgatgaatcccttttcattcagttaaaaaaaaacaaaagcttttgtcgagctcag

SEQ ID NO: 52357 - DNA, 1663 bp, Zea mays
  Clone ID: MRT4577_147750C.1
ggatcgagctgcgtagcgtaaggggagtacacagaaaatacgggaagtctttccgttaccaggtgtcccgacctggaccacgcacccccgattcgccttatcgcttcgccatcgctgtccgcccacgcgtccgccaacgcgttgggagtcttcggacgctgcctccgcgccacacagaaaggaaaaagtatctctctctcccgcgcgcgcgggtgagccggggaccctcctacgtctcgccaccctgctggtatagcccgccggtcgtccacgccatggccacccaatatgcgcggctctccctgccatgccgcctgccctcgccgctccctccgccggtgccgacgacgacccgccggctgccgcgcgccgccgcggcggcggcggcggcgtccacctccccgcggtgcccacgcgtcgggggcggcggccacgcgcgcccgcggcccgtgccggcctcgcgcctccgagggcgaagtgcagcagcaggaggcggaagcggaccaggtggtggacagcaacatgctgccctactgcagcatcaaccgcaaggagaagaagagcatcggggagatggagcaggagttcctccaggcgatgcaggccttctactacgaaggcaaggcgatcatgtcgaacgaggagttcgacaacctcaaggaggagctcatgtgggaagggagcagcgtcgtgatgctaagcccagatgagcagaagcttttggaagccgccatggcgtatgtctctggcaaccccatcatgacggatgatgaattgatttcaactaaagctgagactaaagaaagatggaagcgacattgtacaggaaaggtccaagatgcagcctacggagtcgaaaggtctacagtgacttgactgttgactacttcaagatgttgctcctaaatgttcccgcagctgttgtagctctggcactattcttctttttggatgatttcacgggatttgaaatcacatatcttctcgagttgccggagcctttcagtttcatcttcacatggttcgccgcactgcctttaatattttgggtagcgcaggcgatcactaatgtcatagtgaaggacttcctgatcttgaagggtccgtgtccaaactgcgggaatgaaaacctctccttcttcggtaccatactgtcagtgcctagcggtggctcaaaaaacagcgtgaaatgtgcaagttgtggcactgagttggagtacgactcatcaacccgattgatcacactcccagaaccggctgaggcttaataagtgatggcgtggtttcgatttcgctagcaggaaagatggcccggccggcccgcagattcttgatcgtcgacagtacgaagcaagaccgtccttggatcgggtggcaatcgtggagtgatgtatgtttgctgtgctagtctgtgtgtatatatatttgaacaagtttagacacatgcattatatagatctaatgaaatgggtatatgtatgtgcatagagtgtacaaagaaaattttaataagccgagttattgtgtgtttttttcctcctatatattgctgttacctagtcggctactactacaaacaatgaggaataaacaagcaaataaacaacgatttctcgatggaaaaaaaaaaaaaaaaaataaaaaaaaaaaaaaaaaagcggac

SEQ ID NO: 52358 - DNA, 322 bp, Zea mays
  Clone ID: MRT4577_147751C.1
ggttggggttttttttttttttttgggttttttttttaaaaaaaaatatcaccatcgtttcgcacaatatggacagaacctgttttgagaaaattttcatagttcccactggtcttgcgaaggggtcgcacattatttctatcaccgcttcccaaataatctgggcaagggtaccaaccatcctgtgtttgaaaaggaaaatgcgcacaattatcctctttactctggaacatgttacggtaaacaaacgctgctgcacacttggaaaggccacaatttctttcctcatctcaaaaccgcctttaaggcaacccaaactgtc

SEQ ID NO: 52359 - DNA, 416 bp, Zea mays
  Clone ID: MRT4577_147752C.1
cagcatacaaaaacacaacaaacgaagcgcactatcaacgacctaacaccaatggcagcgaacatatcaaacctgctcgcactaatcgcccttaatagtgaacgcaacaaatgcgatcattaaatcacagtactcacttgctcctagagccattattgcacacctcctaccaccagttacttcaaagggcttccaacatccaacaaaacaagcctacaggctacaactagcgcatgcagccatcacattacaacaaccaatagcacaactgcaacaacaatccttagcacatctaaccctacaaaccatagcaacgcaacaacaacaacaacaacagcatctgccaccactgagccaactagccctggtgaaccaagtcacctacttgcaacaacaactgctagcatacaaaccac

SEQ ID NO: 52360 - DNA, 455 bp, Zea mays
  Clone ID: MRT4577_147753C.1
cttgttttttttttttttttttttttttttttttttttttttttttttaaattcaatcttcctttatttttttttttttggggggggcaaaaccttttttgccgccggtgggaattttgaaaaaaaatttattgtttgcatgggggttcccctttttttttgggggcatttttagaaaacacactgctccacatgttttttttccacccatttttaattttacggagccttcctcctctacccaaggcaaatattgtccctggaacatctaatttttttttttaaaaaaacaaatgctttttaaaaggccatgccttatgcaaaaccattttttaattcaaaatacaaacctggctaaaaagaatgtcctggaacaaatttggggattttgggaaaagaaactcctttgttcacaggattttagaaattccaaaggggttctttgtttggtcaat

SEQ ID NO: 52361 - DNA, 210 bp, Zea mays
  Clone ID: MRT4577_147754C.1
gtgcgacccacgccgtccgctgcaagtccatgcaaaggaaaatatctgccatcctacaatggttggctttccgatgcccaccgacagatattgaatgaaagacacgcgcggatggatgatatatgactggatgaagagagatagccatctgctaatgctaacttgactgcactgtcatattgtgctgatgccctgatgatgcatatgcgc

SEQ ID NO: 52362 - DNA, 565 bp, Zea mays
  Clone ID: MRT4577_147755C.1
gaactatctccatatcaaattaccaattattcattacagttacagaagggaaataaaatccattattacatgaatttaaaaaaatcatgattctgtctttattttgattaaaacgagtctaattccagactacattataacaaatggacgaaaggagagtgaaagatttgacgaacatgattaatcttcgtcactgtcatcaatcacggccttacgacgatgagtcggagcttttctaggcggagactcctcctcgtcagactcaatccctttccttttccggccacttccacggtgatccttctctgccctacctcccgcaacctcttcctcttcttcatcttcatctgagtatctgttagattttcctcgttcctcttcatcttcttctgcatcttcctcatattcatcttctgaatccttgccccttccacgggccggtgacttttcttcctcttcttcttccgtctcatattctgattcctctctctcactctcagaatactccattttgacgtcttgacggtctggccgaagtcattgaagacctccccgggatgccttt

SEQ ID NO: 52363 - DNA, 178 bp, Zea mays
  unsure (1)..(178): unsure at all n locations
  Clone ID: MRT4577_147756C.1
ggaattcccggctcgacccacgcgttcgcccacgcgtgcgtccacgcgtncgactggaccctggtggttatttgcagcaacaactattaccatgtaaccaggtaggtactggctaattttaagaacaaccacttgttgcatttaacccattgggcggaatggaacccggtggttattt

SEQ ID NO: 52364 - DNA, 273 bp, Zea mays
  Clone ID: MRT4577_147757C.1
cttggtttgttttttttattaaaaaataaacagttaaccgtgacgtgcgtcacgactgctagtccaacagagcggaagtagatcaggggaaggaaggatgagactactactaaaagcgaagaaacgggtaagccggcttctccctacacttttttttaggggaggtgcacgagaataccacgtggtactcctcgctcatagacggatggaagaggccgaagtgctgcttcacgcgctaaaccttgccgtccttgttgaacatggagagaaggt

SEQ ID NO: 52365 - DNA, 340 bp, Zea mays
  Clone ID: MRT4577_147758C.1
cttaagcaaaaaaaaaaaaaacccccggtttaatttgcctaaaaaagccctctggaaaaattacttgggcaaatttaagtttcctttctttaggggtgtgaaaaatgaaaattcaaaggggggaagctttgggggcaaaccctagggcccccaatttttggaataacacccctgcctgttcagggccaaaatttgccccccaaaacccaaaatttttgttgcaaagacccacctcgggggaacctttcctctttttccaacaaattcatattatccccaatttgctttccttggaaaaatctttttttataagggaaaaggcccccttgcttaatttaaa

SEQ ID NO: 52366 - DNA, 659 bp, Zea mays
  Clone ID: MRT4577_147759C.1
gcggggcaccagacccgccccggactcctacgcagtcccatgagccaggccgcgcccgtggcgaaccctgctcgcgccgcgcctgcccattccccctccccccgtacggtcaccgggccgactcgcccgcccggcgcccgcgcggagccacaggcgatagacgccacagccggccgttcccctctgccggcggttcccgagggcatatccgcctgagcgaggcccgcctgtatctggactaaatccatcattagcgcattaaggacaccaatctcgtgggtgatgagcagcattatgaacggtaccgacagctacagggctaccaccggcttgtacagctacctaccaccgacgaacaaaggaaggcggaacgctccagatggagctcataagatttctcaatgcacggcgcgttctgcacgggcgccgaccgccacgtgctgccggctgaggccacccgcgcggcgatgctcatgcgcgtaaacaccctcctacagggctactccggcattcgcttctagatcctcgaggccatcgctaagctgctcaacgccaacgtcacgccgtgcctgccgctcaggtgcaccatcaccgcgatagggcgagctcgtcccgctatactacatagacgtcctcatcacggaccgacagaacttctt

SEQ ID NO: 52367 - DNA, 1154 bp, Zea mays
  Clone ID: MRT4577_14775C.1
ccggccgggatgccttccccctcctccacctttttcccccgttcgagtgctcgagctccgaccaaatctcgcagcggtagcaatccccgagcggccgagcccgaagcgggatcagtggaggacgagtggacgacaccctcgattctgacctgcggtcggcgcgacttacagagaaccggagatgcagcagggcgacagcacggaggcgcaggtgacgtgggaggaccagcagaacatcaaccgcttcggtcgcctcaacaaccgcctccacgagctccaggacgagatcaaactcgcgaagttacaatgggagcactgcaaacgatcagattggagaagagtcgaaggtagaagccgatgagctgaaatcccctcgcagtcgtagcgtcgtgaaggtgcgaatgttgtggctggaatagaggcatgtgtgcactccatgtagatgatagcccccggatgccgaggtagccgaagtcgaggtggtcgaagttcgagcatcaacggtcggtggggtgacacaaaaatggacaacaacagactcgtggaccttcttgattctttccgtgtccggtcatcgaggagcctcgccaaggaagccggcgcagcgcatgcgtttgcgctggtcaaggtggctgcgctcgctagaggggccgcgccggcctccggccagtggaggcggcggcggatccggtcgggaaggccccgacagcgacagatctagccataaagactcgcttcgacagcaattcgttagcctaaaacaagggagtggtactgttcaggactacatatgaaacgcgacacctttatgaggtatgctccccccattgtggcagatgacttccccttgcgacgccaatatttggaagggcttcatccccgattttcccaaataattgcccttcctggtccagtgagaaaacgatggaatttgtgtgtttttgccttgtaatgggcatcatattgctttttcccatgttggtaaatgcatccagatcagacctttgggcatatcccccgcttatatgccatgctcttctttatatatttttagatggtttttgccttgataaaaaaaaaaaaaaaaaaaaaaaaaaaaaaaaaaaaaaaaaaaaaaaaaaaaaaaaaagaaaaaaaaaaaaaaaaaagcggcc

SEQ ID NO: 52368 - DNA, 445 bp, Zea mays
  Clone ID: MRT4577_147760C.1
tggctctggaacctttgggctgatttatgtgcttgtggatgtgcgggcttcgaaatcgcctagccaatctaggttttacgtgtccgtcgccgccagcctccctggaactttcgacgttccttccagcttatccgtccccgatcggaccgaggtaaacgtatcgctaattgggagttatcgactctaggcccttatacatgagttaggccacttcgcgaaagcatcgaacaccgacggtggggtacagacattgcacaatcataggagtatccgccgctctggaataaaccgccgcgaacttcgccccgcacaacagcccctccgaacacaagtgaatgcagttcaataggttaaagcttacgcaacggggcccataatagcaacaatccgtagagcgacgcaagtgagccgccgagtagcaaacaaaacatctccgctttaaaaa

SEQ ID NO: 52369 - DNA, 573 bp, Zea mays
  unsure (1)..(573): unsure at all n locations
  Clone ID: MRT4577_147761C.1
ttctttgctcaaagctccaagaacaaccagaaggttatccncattttgcgaaatcagatttccagtattcctattggtacatggtcgcagcatactggaagggcaagtactagacagcttagaacatcgggactgagtgctcctctaattacttgcctggattttcttctggaagatagaataagctcaattcctatagttgatgataatggatcccttcttgatgtctactcactcagtgatatcatggctctggcgaagaatgatgtttacgcttgcattgaacttgagcaattgaccgtggagaatgctttggagctgcaatatcaggtgaatgggcggagacagtgtcatacctgtttgagcacgagtacgttgctcgaggtgttggatcaattgtctgttccaggggtgcggcggcttgtcgttattgaaccgatgactagatttgtgcaaggaattatctcattgagagacgcaataacatttctccttggataacatttgtgtagccatttcatacatgaaagcctgttgtatttgattgggacaaaataaaaatgttgttttggc

SEQ ID NO: 52370 - DNA, 512 bp, Zea mays
  Clone ID: MRT4577_147762C.1
tttttacgcttccgcggacccttggcctggggcctggtaagtacctgcctacattcagatcaatgctaatcttgataataacctgacagcctgcttcatactctagtcattgaagttaacaggaaaaaatagtggtcttagaattaaaacaactattggttgtgtaatttaatttttttaatgcactgtgctgattactggaatttctttgcactatttattttatttccatttactgtatatgattataacatatatgcattaggagctattgatctttggttttccagttataattatgttcattttaccagataaatagataataactgaaaattctggacggtaattctgtgtttctgtagttgaaatatccaactaagagcatctacaagagtttccaaaacccacttttgatctagattttttgtcaagattgaaaaaaaaactgctctccaaccactccctgtctcaactcccaatctttccgcacttggaaaaaccgacctcgc

SEQ ID NO: 52371 - DNA, 512 bp, Zea mays
  Clone ID: MRT4577_147763C.1
gttttcagaacatattttagagaaacactctgctactctcactggagcagaaaaacaattgattcatacagatgcaggcagccttaaaatttcattctgattcccagacacgtctacaaggcaacagtggcaatttacatattcagcactggttgtttctaactggtcaaacctttgaattttcacaggaggtcgcaaggacatggaaggtagaggcgatgccaacgttcgtgctggtcaaggatgggaaggaggtaggccgtgtgattggggctaagaaggacgagcttgagaggaagatcaggatgttcgtcacgtcatcttcctcgtcctaacttagcagtgcatacactcccaccttcttactggtttctcgactccagtggttcacctgggacggggttgctgaaatggttcccttctctgaatactgaaaaatcaaaaaaagaagtatatgaaaaaatgatggtagacgtgtctgggtcaataagagtttctgaaacttggatttg

SEQ ID NO: 52372 - DNA, 1799 bp, Zea mays
  unsure (1)..(1799): unsure at all n locations
  Clone ID: MRT4577_147764C.1
cgcaccatggcggagccgagcttcgtcccttgtgcgtcgcccgacggaaggccaggcaggcagcgagtaacggagaccgcgaaacgaaggaccggcaggcagcgactgcaccagctagagccagccgcgaccggctccttcttagggacctcagtgaccaccgccgccggcctccgacgacccgacctgcgccgcggcggccgcgcactccaacgccacctacgacgggcagtgggccgcccacaacgagcagcagcaagctgatggatggtcggcttctcggggtcctggtgcggccgctgccgcttcatcgcagccgcccttcgagggggggggctcccgtgatgccgacgccatcttcgtcacggttgacgccgtcaaccctggggaagtcgaggtggcaggatctggtcctgcgatgccgacgtccgaggtggtttggggatggcaaggaagcagcccgtgcgtggggggggaagagggagtagtgtcagagaacgatttgggtgtcccccaccatgatggtgctcgcataagctgatgagggcacacactcccaccatcatcagaaactcttgggactagcctgcagcagaccttctgccatggatggccccttttcagtgaccctccgtgaatacaaaacaataagaacagagaaaataataatggtatacgtgtttctttcaatgttgccctctgtttatattgcatggacataaaaatcattaggtgttattatgtgggtgtgcatagaccagaaaatgatgagggggccccctccattcctctaatctgggaggactaatggctatgattggccccaacaaacaggcgtagagaagctttgacaaaaaaaaaagaaatacctttggagaggtgtaatcttcttcagagagtgggaggagggaagggacagtgaagacagacagaaggacaggcaggcagcgagtgcaaccgcgagagcgatcagcgatgggctccttcttctcgaccttagtgacgccccctccgcccgccgccgacgacccgaactgcgccgtggtggccgcgcactccaaggccacctacgacgagcagtgggcggcccacaagagcagcagcaagctgatggtgatcgacttctcggcgtcctggtgcgggccctgccgcttcatcgagccggccttcaaggagctggcctcccgcttcaccgatgccatcttcatcaaggtcgacgtcgacgagctcgcggaggtcgcaaggacatggaaggtagaggcgatgccaacgttcgtgctggtcaaggatgggaaggaggtaggccgtgtgattggggctaagaaggacgagcttgagaggaagatcaggatgttcgtcacgtcatcttcctcgtcctaacttagcagtgcatacactcccaccttcttactggtttctcgactccagtggttcacctgggacggggttgctgaaatggttcccttctctgaatactgaaaaatcaaaaaaagaagtatatgaaaaaatgatggtagacgtgtctgggtcaataagagtttctgaaacttggatttgtatgtgtcagtctctgtgttctgtttccaaggaatggatcatgtgagtttggaatatagctggaaatatgctgtgctgttagtttctgttttcaaaaaaaaaaaaaaaaaaaaaggccgtttctgggaagggggggggggggcccgaaacaccacacaccccgcgggngtgtgttttttttttttnnnngggncccccccccccccccccccccccccccccccaagcgaaggggggggggg

SEQ ID NO: 52373 - DNA, 113 bp, Zea mays
  Clone ID: MRT4577_147765C.1
gcagggtctgcggcggctagatgattttcggaagggcattggaggactacgcgtaggcggttatgaggaagtgccaattgcataggcaaaagttttagctagctttaaaaatg

SEQ ID NO: 52374 - DNA, 323 bp, Zea mays
  unsure (1)..(323): unsure at all n locations
  Clone ID: MRT4577_147766C.1
anncctgggnnngattttttttttttttttttttttttttttttttttaaaggaaacagggaaacccctccctttttttattggatgcatgaaaaggccaaactgaattggaacaacccgtttttagccacggggctggaaagtttgcctccaaagaacctttcgggggaaaaaaaaaaagaaaaaattttgggttccaaaccacacaatttttatgggctgcacccacattatgaggcccccgatttttaaacggggggaagaaactttttggtgggctttttcgggggggtgaactttttcaaccacttggcaaacttctt

SEQ ID NO: 52375 - DNA, 268 bp, Zea mays
  Clone ID: MRT4577_147767C.1
gcgtccacgcaaagcctccccgtgtcccctccttcccgcccggcaccgtcaacctcggcggtggaaacagaacagacccaccaaccatggcaaactcggcgtcgggaatggccttgaccgacaattgcaagctcaatttcaagaagctcaggtcaaagcgaagcttccggttcatcacgttcaagatcaacgagcagacgcagcaggtggtggtggacacgctggggcagccgggccacacctaagacgaattcaccggctccatgcc

SEQ ID NO: 52376 - DNA, 360 bp, Zea mays
  Clone ID: MRT4577_147768C.1
gtcacaagaaaggcgttaaccttttggacacaatacgaccccgaacacgtaccatttattaggacagggccagttctgcacaaatgataagcacggggcagatcaagaattacaagtaggggccgtaaaaaagcttgttagagcgcaggcccaccagaccaggcctgaccagaccaaaagctttttacaaaacagaggaggcgcctcatgcaaaagacggcttttccgtcttgaggggcttaaccacctcccaggggaagtaggggtcgcacttccaaaaatgcccgaaggccgtcgtcttgaggtagcgcccgttgccgactttcttgaggtcgaggttgatgatgatcatgccgggcc

SEQ ID NO: 52377 - DNA, 368 bp, Zea mays
  Clone ID: MRT4577_147769C.1
gggggtatgaagccataggggtcctttatattatgcaaaagggtggaacatggttcttacattatcaacaacaacaaaaaaccggcattggattagacctccacaccaagcttgctccttcttccctagggaatggatccatgggataaagaaggtcattgattccaagctgtgctgggcataactctgggttaaaaccatcccctgggcacaactccaggaagcaacatatcatgcaaatgcatttgggggtgggggaaggcttggattgcactttcactggttcgtcggattcttggatacaggtacatatcggcacccacccaagtctcaggtggggtatcccatcaggggctttctggccctat

SEQ ID NO: 52378 - DNA, 135 bp, Zea mays
  Clone ID: MRT4577_14776C.1
ccaacacctaagacataacctgtagatgctcagctatctcgttatcgagcagcgggagcatgtagctttacggcatggtcgcactgggccacctatgactgtggagattgtccgtgtgatagcactcaccttggg

SEQ ID NO: 52379 - DNA, 181 bp, Zea mays
  Clone ID: MRT4577_147770C.1
aaatcgggcgggacatttaatagccgaactcacatatatacaagacccgtacacgcattagaatcggaaccaccatgatatacgttgttctactaagagagacatccgttccacactgcataagagatagggttgtttcgttgggcttgtaactaccatcgcccacacattcccgtaacct

SEQ ID NO: 52380 - DNA, 293 bp, Zea mays
  Clone ID: MRT4577_147771C.1
cgacccacgcttacgaaacacttacacgaaaaccacgttttcttattgagcctcagttcacacacaacgatttggtattttacaagatgcgtgacggctcctatatttcacctgatgaacaacatcttattaagcaccccactctatcttactatattacaatatgcgaccagcatataatggaatctgtaatagatcaaaccctaactcctttttctgctttacagaccaatacacactatcatcagtgatttcctgcaaactctattcatcaaaatatatcttctctagaa

SEQ ID NO: 52381 - DNA, 363 bp, Zea mays
  Clone ID: MRT4577_147772C.1
aacgtgtgtgtgtgatatgtcttctgtccacacccatgttcacctctcccctgcccaagggggcggggtcctaggggctggggtcctattcctctggctgtggagaccatgcccactgattgccctatctctccgcggccaagatggctcagggagggaccagcctgcatgaccctcgttccacgttctgctaagcagggacttggctctacttcgacaactgtgaggccgagcctgactcaactacgaacgaaggcaagccccggtgcatgcaaccccttatcttgggtgtttaaatactttgtgcacacttacgtctagtgaaatgtgcattaggttcataagaggtacttgaaacccttt

SEQ ID NO: 52382 - DNA, 304 bp, Zea mays
  Clone ID: MRT4577_147773C.1
agaagatgaatcattgattgaatagttatacagatgttatagtaaatttattttattttagatattaaatgatgttttattagataaatttcaatcagggtttttagattaaacaaacaaacaattgggtacccagttaaattttcatttcagatatacaacaaataattttttagtataagtacattattgtttatctgaaattttaattgaactaacaatcctagtttgatactcccagtcttgtcattgccagctgtgttggtagtgctgtgttgaattacggaataatgagttagaacta

SEQ ID NO: 52383 - DNA, 507 bp, Zea mays
  unsure (1)..(507): unsure at all n locations
  Clone ID: MRT4577_147774C.1
aaaaaaaaaaaagtgctctcctatctcctccattccccttgtctcttcgccatggtcgccatctccgctcacctcatcgccactcttccgtctctcccgactcttccgtcccttgtcctcgccggcttcagccgagcgcctttgctgcatccgaggccccgcaccgagcccccgcccccggcgtcgccctccgtggctgcagcaggcgttgcagcccttccgtaagaagatttcatgggtttcagaatgccataagctttgggaaggagcataacaggtgtcaccgtgttccttcttgtcctctgggtcgttggatcggtcgttacctggattgtgggcttggtctttggcgctgcgaaatcttagaaggtggatggtaggctaccaatcagctgtatatactttatnttgtgttggaatcgttacattgaatagctgcatttgctgctctttttttctgacggaaagtctaggatatataaattgcaattgcctttttgtgccggc

SEQ ID NO: 52384 - DNA, 703 bp, Zea mays
  Clone ID: MRT4577_147775C.1
gccggccgggttccgtagaggccaccacaccggccgggaaaaccgcagcaacagatccatttctgcggccagtgctctcctatctcctccattcccctcgtctcttcgccatggtcgccatctccgctcacctcatcgccactcttccgtctctcccgacactccggccctgtcctcgccggcttcagccgagcgccttcgctgcatccgaggccccgcaccgagcccccgcccccggcgtcgccctccgtggctgcagcaggcgttgcagcccttccgtaagaagatttcatgggtttcagaatgcaataagctttgggaaggagcacaacaggcaagccctattcgcttcaggcagaggttctcctagctccagtgacgatggctcgagttctcctgatggcccacctgtcctgaccattctggcaggtgtcaccgtgttccttcttgtcctctgggtcgttggatcggtcgttacctggattgtgggcttggtctttggcgctgcgaaatcttagaaggtggatggtaggctaccaatcagttgtatatactttatttgtgttggaatcgttacattgaatagctgcatttgctgctcttttttttctgacggaaagtctaggatatataattgcaattgccttttgtgctaaaaaaaaaaaaaaaaaaggcccctaaaaaataaaaaaaaaaagcggcc

SEQ ID NO: 52385 - DNA, 2236 bp, Zea mays
  Clone ID: MRT4577_147776C.1
ctcccccggctggccagccacatgattcttcccgggctgacagtttgctgccatttacacatagatgagccgtagtgtttttgccgagacgtgttttttgtgtgtgtagacatggtttcactggaatgtgtttcttgtaattctgttgtgccatgatcagtgtactgccttgttttcatctaaagagcggcaaggtttccagtcagaagttgttcgacttgctcacagtgaaatgaaacatcttgtgcccctagatgtctcgtcactaattacatttgctggaaatgctggtccaccactagaattatgtgatggagatcctggtacactatctgtagcagtttggaatggcttcccagatgacatcacactggagtctctcagtttaaggttgtcagcttcttctagtgcagatgaaggtatcaaggcaattaaaagttcagattctcatgttctagtaccaggtagaaatatcatctcttttgacattcctcgtcaaaagcctggctcctatgtgttgggtgctctcactggacagattggcaagctgtcattcagatcacatggattttcccaagatggtccagttgaaactgatgaatttatgagctttgagaaaccgacaagacctgttttgaaggtgagaaaaccaagggctttagttgatattacacctgctgtgtcctctgctttgcttatgaatgagctccaatggattggattaatcgttaagcctatagactattctttaaaaggtggaatattgcatatcgatgctggcgctgaactgaaaattgaggagtctcagatgattgaaatagaaatttacgtaagtgatatggagtgtgctaattctgccaacagctccatcaaagctggaaaggttgaaaaggtacctattgaaaatggaaagatagaacttcctgattgggctagtgatgtgactactcttgtttggtttcctgttcgtgctattgatgacacaattgcaagaggagaatccctagtgtctcagaaacagagcgttgtagatgggatgagaatgattgctctcaagcttgagtttggagttttccgtaaccaagtgtttgaaaggaccattgcagttcattttactaacccattccatgtaagcacacgcgtcgtggacaagtgcaatgatggagctctacttctacaggtgatattgagttccggagtgaaggccacactgcatgtaaaggatgtacggttagatcttcaatctggatttgatcacttgggcaaaggagatggacggccagctttgagtttattccctctggttattgctccttcttccaaagctggaattttattcatgttacggttaagtggtacaaaggatgtggacgacgcagaaaatgcagacagcacgctgaatatcacctacgggatatctggtgacagaaaaactggagcacattctcctatacctgtcaaatctggtgattctgaagaacttgtgttcaagattgcactcagactgaagcgacctgtcctggatccatgtgtagcagttggattccttccattttcaactgactgcctgagggttgggcagttagttaatatgaggtggagggtcgaaaggctgaaaaccccggaggatgcatccatatccattgacgaaatactttatcaggttgaggcaaacccgcagaactggatggttgctgggaggaaatgtggtcacgtatcgttgtcaaatgagcaaggttcaaggatggagatcacggtgacatgtgtgccactggtgtctgggtacgtccacccaccgcagctggacctgccggaggtgggtgaggcaaacattagctgcaacccagcagggcctcacctggtgtgtgtccttcctccagccatcagcacatcctactgtataccagcgatatgattcttcctgggctgacagtttgctgccatttacacatagatgagccatagtatgtttttgccgagacgtgttttttgtgtgtagacatgtttcactggaatgtgtttcttgtaattctgttgtgccatgatcagtgtacaattctgcattgactgatggtacatgaaactggttccccagtattccgtgaaactgcaagccggatttgctgtgttcagattgtgttgttgcagactggttgcctttcgtaaatcagccagattgtatccttattaggtcgttttcatatctctgaggaatggatgattctagaattttttt

SEQ ID NO: 52386 - DNA, 723 bp, Zea mays
  Clone ID: MRT4577_147777C.1
gccacactgcatgtaaaggatgtacggttagatcttcaatctggatttgatcacttgggcaaaggagatggacggccagctttgagtttattccctctggttattgctccttcttccaaagctggaattttattcatgttacggttaagtggtacaaaggatgtggacgacgcagaaaatgcagacagcacgctgaatatcacctacgggatatctggtgacagaaaaactggagcacattctcctatacctgtcaaatctggtgattctgaagaacttgtgttcaagattgcactcagactgaagcgacctgtcctggatccatgtgtagcagttggattccttccattttcaactgactgcctgagggttgggcagttagttaatatgaggtggagggtcgaaaggctgaaaaccccggaggatgcatccatatccattgacgaaatactttatcaggttgaggcaaacccgcagaactggatggttgctgggaggaaatgtggtcacgtatcgttgtcaaatgagcaaggtaagaaccatggtaccagatgtttcaatccatgcctgtggcagaaaatgacaacttccaatccaatctgaaacaattttcacatcacactgcactcgctcataggttcaaggatggagatcacggtgacatgtgtgccactggtgtctgggtacgtccacccaccgcatctggacctgccggaggtgggt

SEQ ID NO: 52387 - DNA, 800 bp, Zea mays
  unsure (1)..(800): unsure at all n locations
  Clone ID: MRT4577_147778C.1
ggcttcatctcatcttttatttctctcatcttgcgggggccaaggcgccggcggaggagttcgtctgaatccgcccagtttattcagtctccgaatttgtttcacttgccagtccgtcaaactgttgacagcagaaggatctggtagctctctcactgtggcttcgatggaaccatggcaatgcagccaacaaagaagaaacgcgtggccagcttgccgcaagatatcatcgaactggtacttgtgaggcttccggtgagcaatctgctgcggtgccgtgttgtctgcaagcagtgggatggcatcatccgggatccgcagttcaccatggcacacctcaggcacgcgcagcctcgcccccttttatttttccaacgaggcgagacttatggcaagtccttccctagcgaagcggtcctctttgatgaggcctggttgccgtcgacacggggtgtgccggtgattgagcctgatgatttcatgtgtgcttcgtgcaatggtcttgtttgcttgtactcggataaatcaaccatcaagatagccaacctcgccaccggtgaaagtatgcacctcgccaaacccgtcaagtacaagcactccatggatgatcactcttcgttctacagctttggtttcagcccagctacaaatgaatacaaggtcttgcactttcttccgggcgaggagcgccaccatgttggtggttccttcagtgtcattcaagtttacacactgggcgatgagaaatggagggacgtcagaactgaaacagctctgagcttgntctgtgtgaaacaaac

SEQ ID NO: 52388 - DNA, 452 bp, Zea mays
  unsure (1)..(452): unsure at all n locations
  Clone ID: MRT4577_147779C.1
aataaaaaggcgtttgttggtttaaaaaaaaataaaaaatttttttttttttaaattaataaacaattaaataattatttttttttaatatttaaaaccaaaccaaaaaacattaaaaacaccttaaaaaaaaacttatttttttctaaacaaaattatttttggggggggannccttctttttttttaacttctctccaaccccaaaaaaacaaaaaaattcccccccgctaaattcacccaaaaacccaacaattaaaaacttcttttcatcaaaaacgcccactccatcttccaaaaactaaaacccctttaacccaggcccaacctcctttttaaaaaaacccacaatcccacccccctccctaggcccctaatacccctaaatcttcttcccctggcccctaaaaaactttatgttcccgaacccttgaacctcttccttggaacca

SEQ ID NO: 52389 - DNA, 350 bp, Zea mays
  unsure (1)..(350): unsure at all n locations
  Clone ID: MRT4577_14777C.1
gacacaacaccaantctagtagctctatttcaccaattattttccgcgtgaactccancntcntcgggctcgatcccaaccaacagtggcgggggccaccaccncctcatcttcttctaaacgttttcatctttcctctccctatttccgcctctccgctctgctcggcctattttttttttttttcgtcacggacaccacctaatcttccaattccacgatcttctattaatacctttataatagcatagccaacaatgatcttaactacaataatattcttttcaccattttctcctacttttctctctccttcatctttttatttcttttactttccttttccccta

SEQ ID NO: 52390 - DNA, 377 bp, Zea mays
  Clone ID: MRT4577_147780C.1
ggctgttgttttccatgcagaccgcgagcggcctccgggcagtgatctctgggagggcccaacatgctaccgaagaagtgaggagaaggttctacaagacctggtgcaagagcaagacgaaggctatgacaaaggatgctctgaaatatgaaaatgatgctggcaagaaggaaattcagctgcagctcgagaagatgaacaaatatgcttctgttctccgtgacattggtcatacccagattaggaagatgacagggctcggagcagaagaaggctcacctgatggggaatcaggccagtggcggcacccttgctgacaaggcggactgtggcttcaacatctttgggagagaggcccctggtgacgggtgcttgca

SEQ ID NO: 52391 - DNA, 415 bp, Zea mays
  Clone ID: MRT4577_147781C.1
aaaatccgttttttataacatcataagaggaatcaactcacagagaccgatgttttatatatatggatgtacttaaaaggcaaaagaaatggaaaagaaaatgcctaccttgattaattgatgaaccgtgcgtgcatggtgaataaattaagatagctagaagaagttaagccgcggatcccttgaggaaggcagatgattacggttcgctccttagagcttcttgaccctccgggaagacctttttgttccaggaatgtacttcttgagtttgaagaggtagtagacagggtgctttcctcccacaaactgccatgttcttgtaggccggggagtatgaatatcctagggtggtgcctgactgactaccgaagaggccgcgcaagcttggtacctgcctgtgcgcaccacatgg

SEQ ID NO: 52392 - DNA, 143 bp, Zea mays
  Clone ID: MRT4577_147782C.1
gatggctgataaggttcgagcagtcatagaggggcctcttacactggctgactttgacatggttgacatacatgagcggagtggtgctcacaacgagtgacgacacgtgccttgaagattgcatcagagaggatgctcatatg

SEQ ID NO: 52393 - DNA, 1424 bp, Zea mays
  Clone ID: MRT4577_147783C.1
gagagcataaccgaatagaaatagctttggtgcaaacaagcaagcagcagagcagatcaagtaaaggtagcaatttgagtagtgtgcaagctaagatggggcaacaagaaaaggaagtgatcccgctgatgaccccgtacaagatgggacagctggagctctcccaccgcgtggtgctggcgccgatgacgcggtgccgcgccatcggggacgtgccgcagccgcacgccgccgtgtactactcgcagcgcgccagcaggggcggcgtgctcatcaccgagggcacgggggtgtccgccaccgcgcagggcttcccggggtcccccggcatctggacgcaggagcaggtggcggcgtggaagcccatcgtcgacgccgtccaccgcaagggcgcgctcttcttctgccagatcgcgcacgtcggaagggcatccaccaacgatttccagccggacggccaggcgccggtctcgagcacggacgcgcagctcccacccgacgccgagtccggcacggtgttctccaggccacgccggctgcgggccgacgagatcccggggatcgtcgacgacttcaggcgcgccgcgcgcaacgcgatcgaggccgggttcgacggcgtggagatccacggagcgcacgggttcctcctggagcagttcatgaaggacggcgccaacgaccgcgccgacgagtacggcggcagcgtcgagaaccggtgccgcttcgtggtcgaggtcgtggacgctctggtccgtgaagtcggcgcgagccgggttggcatcaggctctccccgttcgcggactacttggactgtgcggattccaaccccttggcgctaggtcactacatggtggaacagctcaacaggcacgaggggtttctgtactgccacatggtggagcctcgaatggccatcgtcgacgaccgcaggcagattccgcatcgactcctgccgttcaaggcggcgttcaatggcaccttcatcgccgcgggcgggtacgacagggaggaagggaacaaggtggtcgccgaaggctacgcggacctcgtcgcatacggaaggctgttcttggccaacccagacctgcctaaaaggttcgaggtagacgagatcctgaacaagtatgatcgttccaccttttatacacaagaccctgttgttggctatacagattaccctttccttagggaggacagcgaagacttagctgctcaagcttaatggcgtggatgatcgatgtaatcacggttactgcacgatcgagatcgatactacatccatttgaatatatatatgtctaagatgcattgtttttgttttaagttagttttttttatatttgaccaaatttatgtaaaagatatatgtgctaaactagttgagtataccggtgtgttgcaacgacaaacgctagtctgtatc

SEQ ID NO: 52394 - DNA, 581 bp, Zea mays
  Clone ID: MRT4577_147784C.1
gaaaaaaaagggtttttttgtgtttttggtgctcctacgacaaaattacctgagtagatctatgatcaaacaccaccatacataaattgccaccgtccaaacattgtaacacaaggcagaaatgagctactatatctacacaaaaaaacatgctaataattttcttttgtaagtacggctcacactggtgccctgaactttgctccggcgaaaaccgaggcatcaccgcccatcttcctcgatcctgaccaacgtgcttggatttgaccatgcagctcagaccggcaaagagatcccatcttgatttgtcccgtaaacagaccaagttagacgtcaccactgaaggtgtcctgtggctcgccactcataaagctagccataactccccattcgtcgcactatgacatccagacagattggatactatcagccacagaccccatgtcgttcaccttcaacagaagaagattacagggcttctcattgatggccttggcgaccctggggaggttggcaacgagatcatcatcttgtacaatctgcactttctgatcaatctcatcagcgaatttggcatactc

SEQ ID NO: 52395 - DNA, 2354 bp, Zea mays
  Clone ID: MRT4577_147785C.1
ctgtcttgtacgtattccaaccctctgggctctgggacacagctactccgcctcctcgcccttttctcctcatccctcgctttcgcttcgccgttccaacgcggagcccccacggaaaataaaggccaagaagtgatggtagtggagtaaaaccacgcgttggagggcagagggacaggttggtggaggacgcgcacccagcgtggagagcagcaggagctacgcgaattcgggccgcgagtgcgccggttcaggttgccgccgccggtggaattgtggcagacgaggtggcctgttggtagccgcgggagtttgcgagtaggtcggttccggttggtgtgcgagcgaaggtgctgttggaggcgtggatctggccggcggcgggcgatgggaaggagggactagggctcgattggagggaaaggcgcgatcttggaggttcccatgggcggatgcctctcgcaggaggagcaccggctccagagcaggccagctgaagctgctggagcagatggattgcggaagtctaaatctgattctaaagctgtagcaagtgttcttgctcctccaaaagatgtggtggacctgcaagtagaaggatatggaaatgtgaatattttcacatatgacgaattaagagcagccacaaaaaacttccggccagatcaaattcttggagagggtggatttggagttgtttacaaaggtgtaattgatgaaaatgttagagcaggtttcccatcgagacaggttgctgtgaaagaactaaacccagagggctttcaaggggacaaggagtggcttgcagaagtcaactatcttgggcaacttagtcatccaaatcttgttgaattgattggctattgctgtgagggttcacatagactgcttgtctatgagtacatggcttgtggaagcctcgaaaagcacctttttcgccgggtttgccttaatatgccatggtcaacacgcatgaagattgcattgggtgctgcaagggggctcgagtaccttcacggagctgagagatccatcatttatcgagatttcaagacatcaaacatcttgctagatgcggattacaatgctaagctttcagactttggtctcgcaagaacaggtcctagtggagaccaaacccatgtgtcaactcgggtcatgggaacttatggatacgcagctccagaatatgtcatgactggccatctgacggcacgaagtgatgtttatggcttcggagtggtgcttctagagatgattatcggaagaagggctgtggacaagagccggccaagccgtgagcataacctagttgactgggcacggcccctcctcgtccataacaggaagctgttccgaataatcgatccgagaatggaagggcaatactccaccaaggctgccactgaggtggcaagccttgcataccgctgcctgagccagaaccccaagggacgaccaaccatgagccaagtcgtcgagacctttgaggccgtgcagaacatgcctgaatgccaagacatactcctccagaacagcatcacaggtgccgtgacgctctatgaggtccccaaggagcctgcagacagagttgagctggagaaggccaagcaggaaccggcagtaaagagcgccgcgatgccgcccatgaacggaaagccagtcccccagagcaggcggacgcggcctgggaatggccggagcaagagcgagccatcgttggagtgcaagatgtacatcccgtcaccggactctgatggacaccagctcggcctggaggcagtcgcatccccagatggaagcataagggaccctcctgatgaggatttgtacaagatataacaccagggcagtttttcttcaacaacgaggggcagatctggcgcagtgttgagttgtgggttttcaaaccagcctcttcgcatttagggaggaagatttgcatctgtttatctctttctcatacctcatttacgtgggagcctcgatctgcctttttaacgtgagcccgcgttgctcacctttggcgccgccactcccgttcttaaagatcaatcagctgtaattttttctctgatggccactggccacggtagcgttcatattcttccgattagcaattgtatgtagaggagagttgtgatggaaagcatgtgtgtgtttgccatgacgacgctgtaaaaacctgaaacacttatttctaggggggtttccactccaaaatggaagtggagagatgtgtcctgataattggtgcctttaaaaaaagtgttgagtttacttgtaaagatgcttcttcgttgtaatcttcagttctgcgggaaatccacaccagcatagaaattgatagatta

SEQ ID NO: 52396 - DNA, 136 bp, Zea mays
  Clone ID: MRT4577_147786C.1
cacgccacgcacgcgctacgtacagctacggcaattacggctcgagccacgaccgcccgcgtactcctctgccacgccggcgccggtgcctccgctggtgtggtggcggcgacttcgtgtgccactcgagtcatca

SEQ ID NO: 52397 - DNA, 226 bp, Zea mays
  Clone ID: MRT4577_147787C.1
cccacgcgtccgaagagacggagattgcatcggctgagtaaagattttgggtggaacttgcatcgtgttgacgcaaccgaagcattcttctgtaagtccattggtaccctgtcagatgcgtatgccttctctgtagcaactcataatctccctctcatattttgataggtgccactgacgactcatggcaaaagaaagttgtcaaaccatgtgtggatgtcgtaag

SEQ ID NO: 52398 - DNA, 360 bp, Zea mays
  Clone ID: MRT4577_147788C.1
cttattttttttttttttcttgttcaaccgccccaaacaaattcctggctaatcaatgctaaacagtgtggggactaaaagcataaaaaatacaggtccaaaactgtaaccacagataatgcaaactcggtgcaacacccagggatccttgcacttagcgtttacatagcaaaagccaactcaacctaaatggatgtgtatgtaccaatccttaaacacttattttttcaattcaagtttcgaaatacagtgtttcaaggtatggaacttacttggggccaacattcttgagccttcaaatctgatcttccccattaccaaactgaacagtaccaacaatatccttgccactttaaaacc

SEQ ID NO: 52399 - DNA, 426 bp, Zea mays
  Clone ID: MRT4577_147789C.1
tgtatttatctagaaatgttcttatttattggtgggaagtttcaaggatccgacaaggaactttgaggacgggctgtaacccataataaatataagggagggcaccatcaatgatgggaagttggtagaacactgctcggacagtgaaaacacgatgggtgaatggcaaaaaatggggtagttgaaagacggacaccagcggtaggagcaacgcgcacgttgaacggccacaactgaggttgcggcaagaaggtagcatggcacacaccacctaactggatgattggtaagtggttgtccctgatgtaaataaaaacgagaaatgaaagctgacacccggttgtacggaatagaattgcgagggtgggccacacggaggaagattaatggcattggtatgcagtagaaaaaggaattaaaagttaa

SEQ ID NO: 52400 - DNA, 195 bp, Zea mays
  Clone ID: MRT4577_14778C.1
ttttttttttttttttttattctcctagccgaaggttgcatcatcacacatcatggctgatgtcatccctattgctccatcactcgatgacatgtggggaccttttgctagaactcctgttcttgtgcttcatctcgccatgcccaggagacggagccatcgcgatcccaacggaaacaataaactcgcaggttt

SEQ ID NO: 52401 - DNA, 594 bp, Zea mays
  Clone ID: MRT4577_147790C.1
tttttttttttttttttgcttctcttgagctccattggtcgtactgggactcgattttgctgggtctgagaaattgggttatccgggttatccggagctccagttcaacgttgtgttgtagctcatttgagctgttgggttgcttggcagctgctcgggattaacttgagcttctggcgatgctcaagtgcggtgtgatctgagcagaccagcgaaggtagcagtttagtagttcgaactggagcaacaaatcatttggtgcggtgtgtttcattagttaatttggagcttgcttgtcgctctggttgttccatttgtgactcggagttctcgaatttctacgtttctcctcgtttgctcgctttcgtggtatggaattgcgttttcaattcagtgttcgctcgatgcacttttttttattaggcaactgctgtgctggcaacccttttcagcgagatagctagattggttaaatttagtttactgtgcattgcaattggaagggacctttttcagttgaggtcaattgtaggctgtagcttctattgcctgtatattctgctgagacagggcgactgttgcattccaatatta

SEQ ID NO: 52402 - DNA, 475 bp, Zea mays
  Clone ID: MRT4577_147791C.1
gcgcggattgttgggtcctttttccatcgggcatctctggggcatgtgctaaccgcacgaccggatcagaaagggagtcccatacaccaccatgcaggcgatgcgtacgtgctgggagggggaggcacaggaacacgcagcgagggcggaggcagacaaggtgaagagggaggtaggaaaagcccacgaggaggaggaggcggtgcctgaggagaaagacgtagcggctgtatgtgaggaggcggcggcctatacagagacggagacatgagactgaaggacaggcggaagatgatgatgtggccgaagtggacgtagaggaggaggctgacgccgctgcatagcttgcgaagaagaatcatatccatgtgtacaccaacatgatgccgctatgtttctacgtcaatctggacaagaagtgcagtgccacactacgaccaggttgagctgttccctctggggatggctattggta

SEQ ID NO: 52403 - DNA, 615 bp, Zea mays
  unsure (1)..(615): unsure at all n locations
  Clone ID: MRT4577_147792C.1
aaaggggaaaaaacggacccccagggccccatgattcccaggggacctaacgttacgaaaaaccaaacaaaacagcttttccacgacgtattttacagcaaacaacacccttaatagcccaaaaaagctaaaacccggaaacggggccctctcctccccaccccccatgggggggggcggggcagcgggccaaaacaaccctcactggaaaggccccggccccgcccccacaatggggctacggacaacgggccccccgtcgttccacgtaagggccccgttccgaaccagggagctcccgggctccatcctccctccgagggccgcctccacccgcaccggaaaactaaaccgttgcccgtcgccccggaaccccagccccccggggtgccccgccccgttgcccccctggggggccgggaccgacccgcggaaccccgccctcccgccccccacgtgggcccccgcccggaaaaagggggtccaacttgccgccgccgccgccgccgccccgggggcccaaaacgggggggacagggacgggaatttggggttcccccngggggccggggccccgggcccccgggaaaccccccgggcccccggggacggccc

SEQ ID NO: 52404 - DNA, 805 bp, Zea mays
  Clone ID: MRT4577_147793C.1
cctcgaggccggccggggagcctggcctaaaagcgacgggaaagcctatcagccagtgaagcccactacggtccgaccgatgtctcgctgacgtcacctcgtgttcaccagttaccaccggagtccggagtgaagcgcaggtcgggttcgcttttttcctcggcttcttctctctcgtccatcaacccagggggaaggagcgggagggagcgagccatggtagtcagcacgttcaatggacccgggattgggatcgggttcggtgtcggctgcgggttcggcgtcgggtgggggttcggaggaatgcctcttaacatgttcggcttgggtatcggtgggggttgtggatttggtcttggactaggatggggctttggaaatgcttttggttgtcagtatcgatcttcaagagttcagttccaaggcattgaatttcagaagaaggcggaaggagatgatgcaccaaaagttgtttcaccggagcttgctcaaaagtctcgtccttatggctagtatgcctgctaccataaaaattcagagactgttttgtgtgatgaatcacagtttaattacatacctacgtgttccttgttagtaatgttatgctacacttattttcgtttctgttgtaaccaggatgaagttaatcgatgggattttcaattaggaagaaatgacactaatgtttgccctacatgctatccatttacttttcatggctgaaggatcttcgctatgattggtcgctgtgctttatgctgtacagctaccatatcgtgacttggtctgaaatttgcattggcag

SEQ ID NO: 52405 - DNA, 595 bp, Zea mays
  Clone ID: MRT4577_147794C.1
gggtacctcgaggccggccgggccgggctttctcgcttttttcctcggcttcttctctctcgtccatcaacccagggggaaggagcgggagggagcgagccatggtagtcagcacgttcaatggacccgggattgggatcggtgagcgaaccaaagttctcctttcaggcgccaagatcagatcttgatgttgctctctctgatttttcgctccttatttggtttgttgaattcttctctttctgtttgatgcggtattgcggtgcagggttcggtgtcggctgcgggttcggcgtcgggtgggggttcggaggaatgcctcttaacatgttcggcttgggtatcggtgggggttgtggatttggtcttggactaggatggggctttggaaatgcttttggttgtcagtatcgatcttcaagagttcagttccaaggcattgaatttcagaagaaggcggaaggagatgatgcaccaaaagttgtttcaccggagcttgctcaaaagtctcgtccttatggctagtatgcctgctaccataaaaattcagagactgttttgtgcaaaaaaaaaaaaaaaaaaggcccctagggcc

SEQ ID NO: 52406 - DNA, 198 bp, Zea mays
  Clone ID: MRT4577_147795C.1
gtaccctccgggctggccgggatgccggccggggagccagtagcatcgtaaggccttgttcggttacatcggattgcacccggaatcgttccggttaatcaaagtttatataaattagagaagcaatccggctcggaatcattccgacccaccaatccgacacaaacgaacaaggcctaactcggtttgttacctatt

SEQ ID NO: 52407 - DNA, 540 bp, Zea mays
  Clone ID: MRT4577_147796C.1
gcgtttcaccaacaggtgtccctgccctctgtgcttctactccggcccccacattggccggatgctgctgtgcatgtcatgccagcgctcccccatgcgcttcaccggcaggagggggtaactactgtgaaaactacatcgggatgctagcttctacggtggggcgtgccctgtaacagatagggcacgcggggctcggacaggtagcaagcgttcgatcggacaggtctggcaactatacatttaaggcaggggtccatcatcctgcggctgagagaagattgtaatggagtgcatgtgtctgtatgtgtatccccaatgcgctcgcacgctgctttgggcgagtcacagaagagatgcaacatgatgcatacagattactatgttacaacacagacagttagacattattactgaagtcctcattgtggtgcgcacactgacacattatcttcgcgaccactggtaacataccactgcctttcggagcttccaggtcctagagtgccctccaactattaggccaatgtactatgatcg

SEQ ID NO: 52408 - DNA, 375 bp, Zea mays
  Clone ID: MRT4577_147797C.1
gacatctactgtctgtttttttaagaagcttgcagggggaatttgaaggatgatatctttgtggtgaatgtaataacatactaggcgcacacacaatcaagcaatggcgccttggggttgacctatccccacctaatccgatctgtttaaccgcgtgcggaccgtgctaaactgaaaccaccgctatgatgacccccctgtttttcagatccaaaggaacggcacacgggggcgtcttggataacggatgtggggcggccgtacagaccacatctgagtgatctacgaaagctttcccgagacaatgaccttgaccacttttgaggtggatccattgccggtgcccactcttctgatgggcttgagaactgctat

SEQ ID NO: 52409 - DNA, 374 bp, Zea mays
  Clone ID: MRT4577_147798C.1
atcacgcgtacctggaatcgccatctacagacccgcatccagggcatttccatactacagcgagcgagctttacatatcatatccaaaatcacctacgcgttcaagatacattggttctacatcatcaccacccctaaccccgtgttcagccacctggctgggaatacttccgtctggaacgccatatttcctgatgtgctgcaggcattcttcaacaccactcctgagatggataaactgttccgcttcaagatgctcgactcgtagatctttttcgcgcctttcagcttcaactgaaacaccagctcttcaatactttttatatgagatcgttcttgattgttgtcaatgtcattgatattaataattaaat

SEQ ID NO: 52410 - DNA, 322 bp, Zea mays
  Clone ID: MRT4577_147799C.1
gctgcgtctgcagccatgagtatgcttaggctacagaagaggcttgcctctagcgtcctccgctgtggtaaaaagaaggtgtggttggaccccaatgaacccaccgatcgccccgccgccctcgcccgtcatcaggtccggatcccgatcgctgatcgccggatcctccggctgcctgtcccggtccatccccgggctcgtggccggcggaaccccctggcccgccgggagggcaggctttgccgcgctcggtccgggaagggcccggccgacgctcggtcgccccgcttctcaggagtacgggatctagagatgccgcata

SEQ ID NO: 52411 - DNA, 730 bp, Zea mays
  Clone ID: MRT4577_14779C.1
gttctagatcgcgagcggccgccctgtgtgttttttttttttttttttcttttttttcttggagtttttttttggacagaactcactcctcttgtacaatgctctacactttacaatggaacattccaaaagaatggtatttgtcatttagctctacacccaacaacaggtccagtaccggtataatatcgatgtcattgtctcgaatccatggacgagttaaatttcaaaaaggcttgtccgagcatgtcacccagccggagttgggcttctgtggagaggtgtagttggtcgtcgcggaggggcaatcctatcgcgtctacaagaactacgttaggaagcttgatgtttctctgagcctccctgacgatatcagtgtaattcccctctcctgatgcaagaccaacctgtatgacgagcagattcggcatgccgagatcagccctgaaatcgttgacgaggcgctccatcctgccgccgtaggccgtggcgtcgtcgagctcgatggtgtcgctctccccctggaaccagagcacggcgccgagggtgcctccgccggcggcaacagcggcgcgcccccgggcgacggcggcctcgtagagaggctcccccttggcccacatccagatcctggtgccccgacggcgcagggcacgaggcccaggacgaggtccggggaggcagcgtggaggagacggtgggcgaagggcatggcgggaccgaaccgacg

SEQ ID NO: 52412 - DNA, 643 bp, Zea mays
  unsure (1)..(643): unsure at all n locations
  Clone ID: MRT4577_1477C.1
gtgactggtttacttccttgttttttttgtttgtcacctgacgtttgttctgtttttttgtgtgtactcgtttgtcttgttacactgcgaccatacctctgaatgaaacgcctgattagccgcgtagtatggagaccatactgttggcttgttacactacgaacactcccgttgcgcattatacctgggggaggcgtgggaggatgctaaactttcgcttgagaatttaggccaggtcgcatgtcgttattgaacgtaactcatagcatangcactgtgtgtttcgctacataggctgagcgtatttgtcacatgcttgttgggaagtaatttgcttcgatactagcagaaacaacacaaaagcataatgcccaaaaggggtgtgagatatcaaatgaaaaacattatggcgaggtgcgaaaataacaattgcattaatgtacgccttctccagaatttcctttacgatcattatcaatgacaattgtttggacgataacactattctcactgaatgaaacactagccacacactaactcataccaaacagggtcaccatggctgttgccacaactattcgtgtagcctatagaagaccatgaaccgttggctacctcggtctcaacaaagataagctactca

SEQ ID NO: 52413 - DNA, 281 bp, Zea mays
  Clone ID: MRT4577_147800C.1
tttttttttttttttttgttttttttttttttttttttttttttttttttttttttttttttttaaacacaaaagggggggggggtctgagtcccggaaccaccaccgcttgttccctgcggcttgctgcggctgcaatccgggggggggggggggttctacaggatttttctctctttggattgcagctgcagcagtacaaacaggtgcaacagggtcggcttgtggcccgcccaacacccccatggttggggggcccatgggacccggcctacgggggc

SEQ ID NO: 52414 - DNA, 393 bp, Zea mays
  Clone ID: MRT4577_147801C.1
gggatgacccggaagcgggctttatggggggggaatcggggaaaaattggtttaggggaggaaaccggtttgctagggaaacggccccaaaaatctttactttagggctaggggcctttggggaaaaaaaaagggctttttaaaatagcccccctccattggggtctccacctttttccctgttttaaaaaaaggggggtgggggatttggggggtaaataaaaaccattttttggaggggatccccaaaacccgaaaaaattgggggaggtattttaaacggggggggggttggaccaaggaaaacccgaacccccaccttttggttggaccctaaaaaccccctggtgaaaaaaacccccacgttaccaaaatgtttacaaaaacttgggg

SEQ ID NO: 52415 - DNA, 628 bp, Zea mays
  Clone ID: MRT4577_147802C.1
tcaggccggccgggccggctcttctctctctccccacataatccctaccccgcgccacccaagcgacctcccatttaagcaccatcgtccaggccgccgctccacatgaacgggaatccccgcgtcacgagctcccgccagaagtggcggaagatgcactttactgacccgtcctccgtccgcagcgttttcatgatccgcggcatgcccgacttacctccgccacaagtacataggtgcagctccatcctgatccgctaggtacgatccaaatgcattccgtgagagcaacctactactttcgtaaggggaaaatgacgaaggtataaccgcgcctgtgggtgatccaagctagagcgtatcattccgtgagaatcctatcgcttcaaccattgaacgcagaatatccagccctccaagaagatcaacaacaagctaaaggtcgagatctaccaaaaggatttcctcgaacatgaaactcacaagatagacagcgatgacgctaatgtacaggtcactgaccacgatcttgtagcgacggatcgttattgctaccggcgcaacactatgtgcagcatgacaaacttaatgaacgtgatggagaacatgattgttgactgagcttgtg

SEQ ID NO: 52416 - DNA, 1748 bp, Zea mays
  Clone ID: MRT4577_147803C.1
cggacgcgtgggcaccaatgatgcgaagaactgtgatgggaacatatgtcatcgcaaagatcaagaaagaagacggaaatatttatgtcttgttgaatgggatgggtgccacaccagaaggaaatgttccattcctcgatttgtttgatataaatactgggagtaaagagcgtatatgggagagcgacagggaaaagtactatgaaactgttgttgcactgatgtcagacaaaactgacggggaactgctccttgatcagttaaagatacttacgtcgaaagaatcaaaaacagaaaacacacaatattacttgcagacttggccagaaaagaatcaagttaagataacaaatttcccccacccatatcctcagcttgcttcattgtataaggaaatgataagataccagcggaaggatggagttcaacttacagcaaacttatacctgcccccagggtatgattcatcaaaagatggacctttgccatgtctagtttggtcctaccctggtgaatttaaaagcaaagatgctgctggtcaagttcgtggttcccctaatgaatttccagggattggtgctacatctcctcttctttggttagctagagggtttgtgattctgtctggtccgacaatcccaattatcggtgaaggcgatgaagaggccaatgacagatatgtggaacaactagtaacaagtgcagaggctgcagttgaggaagttgtcaaaagaggggtggctcaccctgataaaattgctgtcggtggtcattcatatggtgcattcatgacagctaatctgctggctcacgctcctcatcttttctgctgtggaatcgctcgctctggagcttacaacaggactctaactccatttggttttcagaacgaggatagaacactctgggaggcaacaaacacatatgtcgagatgagccctttcatgtctgcaaacaaaatcaagaaaccaattttacttatccatggagagcaggacaacaattctgggacattgacaatgcagtcagaccgattcttcaatgccttgaaaggtcatggtgcactgtctcgtttggtaatacttccttttgagagccatgggtactctgccagggagagtatcatgcacgtcctctgggagaccgataggtggttgcagaactactgtgtaaatggtactagcaaggttgactcagtgtcagaggctgacagtaaaaacaaaacattgtcagctagtggtggcagtgcagcccgtgaaggtctaaaccctgaggaactctcatcattaccaagatcgcttctgtgatcaacttcagttggtgttcatgaaacattccctggacagcaagcctaaagggaaaaaatagtgtatcgttgcacttctaccttaaccgactaccagggatgccttgattggcctcatatttgtttcgattgctgcaggtgatcatgttactggcatgcaggagccccccccccccccccccccccccacccccaccccacaaatataagaaaggcctagtctctggtggccactgcactcagatatatttgggtcaatttgtattctattggtaatggccaatggaagtcattcttgcgattaatatcatgtacagaaatatagccttttgcagttttgatcccaactcttgcacttggcagcgaactgatacgttggttttctttgacagcaatctaaaataaaataataactaatgagattatcataagcacctgctcc

SEQ ID NO: 52417 - DNA, 345 bp, Zea mays
  Clone ID: MRT4577_147804C.1
ggggggaaaagaaaaaaacccctgttttttggtacatgacaaagggggaacctccctgggggcttaattataaacaaaccccctgattttacaagacaaaacccaaaaagcccatgcattggatattcttaacccgaaagggcccttgtgtttaaaacaaagagggcccccccccccaggatcccagagagggggacggcccaaaaaaaaaacccagggggtccccccaccaaaaccttcccggggggaaaccaaaaaatcttcttgaaaaatgggctttattcctccacattccccccgaacttgtgaaaaaaatgggacaaccccttgcccttggcctttttt

SEQ ID NO: 52418 - DNA, 266 bp, Zea mays
  Clone ID: MRT4577_147805C.1
ggggacaaaccaacggcctttggggggcctaaaaaacccaaagacaggggggttccaattcccaaaaaaattggttttaatgggttaaacaatttttaaaaggggttttccttttcttttaagaaaccaatggggggggggggcggggttttttttccacccccattttattcccggctataagggctcccaaaggggtaaagggggcttggccaaattttccccaggggggaaaacgggggctggcgccccgttttatttaaaaa

SEQ ID NO: 52419 - DNA, 591 bp, Zea mays
  Clone ID: MRT4577_147806C.1
agaagaccctttacatgagctgcacgcgtactgcacccctgcattcgcctcgagtacaagatggaagcaccctggtagcaggaacagcactaattggcctaagctcagggttcatctttgctgcagcagtgtcagtgacctccgagctctttggaccaaatagcgttggggtgaatcacaacatccttatcaccaatatcccgcttggctcactcctctatgggcagattgctgccaaagtatacgatgcaaatggccaaaagatgacagtagtggataaccgcactggcattgttgacaccatgattgtgtgcataggggtgaagtgctactcaaccaccttcgtcgtgtgggcttgcatcacatttctggggttagcatcaagcatagttctattcataagaacaaagccagcttatgccactgctgctagtcggtcaagttgtaagcaccttcaccaagtttccagttaaagtagttgacagagaaacttactgttgtaatcaccgctagcttgtataaaattttggttagttgatagttctagctgaaatgggttacatacaatacgtgaaatgaagagcttgtaca

SEQ ID NO: 52420 - DNA, 313 bp, Zea mays
  Clone ID: MRT4577_147807C.1
atgaagcgcacgctttaaccctgttcctggggggggcctggagggccaacatctgctgctggcatgggaacccggacgcgacctttgggggctctaccttcggtaacatcacactgaagcgggggctgcagaactgagcggagcagctactgtagaccaccgtggagagcttcctgctcagattttagacaagcgggcaagccaagggcacctataggctgacgggcgtgtccgagtaggaggcgctggcgcatggatatcgtgaagacctccgggctggtgtacacggtgtacgccacggcggtggacccga

SEQ ID NO: 52421 - DNA, 537 bp, Zea mays
  Clone ID: MRT4577_147808C.1
cacccgtccgggaatcctacgctacctagcttggaaaagccagaacatttcatttttatgaaaataacaggacaggcgcggggggggtgcatctgcactgctcttaggctctctgctctcctggtactgcctacgatgctctgtatgtgtcactgaatagtgcagaaatacaccgtccaacgacacataaaaagaaaaggagggagtactacctagtagaaaatgcgcatctgaacggtacccaacgccagcgagacacacctcattcaattcatcagcacgtgaaaaagatgcaaaaagaaaagaaaacagacgaaacgccttctgccctcctgcgccgctgtccgctacgcccgtgacacacagcgcagccgcgggcctgaacgtgactcggtgctggtacgtcatgtcagacgctgcatgatgcgcccgacgagccattctctcactgctgatggtgctgcgcctgaacgccggcggcaacggcaacgtcgtcgaggagccaacggttcatgggcactcactgagccttgtgcg

SEQ ID NO: 52422 - DNA, 110 bp, Zea mays
  Clone ID: MRT4577_147809C.1
ccagatttacccaaatgggttggggatctcccgaatggtagagtgtgtccctgagatggaatcagcttgagtactctgcaattggtcacaactattcatgcttcctgtga

SEQ ID NO: 52423 - DNA, 1342 bp, Zea mays
  Clone ID: MRT4577_14780C.1
ggtattttgataagagggtactctctcccgtataagtcagtggtaaactaagatgtggcatccatattagtggcaaaaagttagatctcccttgatccaaacagccccatacgttgccttgggcaatcgagctaatcaatctccgtgcaattccacctcccgaagacccgaactgagtccctccaccgacccaaaccctagcgcgcacccacctccctccccctttcccggcgtgcggtccggcgttggagatgcgggcgctgctcgcggacggcgggatggcgctggcgatggcgccggaggttaacgagtcgtcgggcggtgctgcgttgtcgcaggggctgttatggtgggcgtcggagtgccacggggtgttgtacagccttgcggtgatgctgccgtcgctggccttcgtgggattcctagcatggcaggcgcggcggagcttccgtaggatcagctacggccgctctcacgtcgtcgtcgtcgcgtactacgcgctcctctgggtcgtcgccgtactcaacctcctctggtgcttcctgcaggcatggcaatgtatgcctgacagggcattttcttggaatgtattgtcactgttcacaaaatcaggaatgttattcttggaagtcagtttgatagcctttctacttcaaggaaatgatgccagtggttttgaatctttggcacgaacctttgttatctctggagctgtagttgcagctgacgcattgctcaagactatatatgtttttggcttcggtgttcctttgttcattgatgctgatcaaggaactggtgggaaatggggcctatggattctccacaaacttgtgcttactggagtttatgggttgattgttttcatgcatcattcaagatggagaaacaggctgcctgcaaaaccagcatactacaactatgtatgtgcgatgttgctattgaatggtgtatcactgtttggatgtttccttgttgcaagtggagctggatttggtttatggttatataatctcacaatcgtatgctatcattcgctttaccttcccctcctatatgtgactttcttagcggactttttccaggaggaagacatgctcctagagagcgtttactattctgaaatgaaggatgctgggttctttgatgctgactgggattaatcggtggctactgcgctctatgaccactccaatgtgaattacgatgtgtttctatctgtgtactctcaacgtagaacagaaaatgtatgtagctaaccgtggtaatgaatggaaatatgtaaatattactggcgcatacttcagatttcaaaaaaaaaaaaaaaaaagagccccacccc

SEQ ID NO: 52424 - DNA, 867 bp, Zea mays
  Clone ID: MRT4577_147810C.1
cgcgcgggcgccatggtgagtgagccttccctcccgtcccaccctcgctcgatctacaacatcctaccctatccccccccccccccccggatctgacggtgggctgcgtggcagtcggtgacgctgcacacgaacctaggcgacatcaagtgcgaggtgttctgcgaccaggtgccgcgcacggcggagaacttcctggcgctctgcggcagcggctactacgacggcaccgttttccaccgcaacatcaagggcttcatggtccagggcggcgaccccaccggcaccggcaagggcgggtcgtccatctggggcgccaagttcgcggacgagttgagggagccgctcaagcacaacgcgcgcgggatcatgtcgatggccaacagcgggcccaacaccaacggcagccagttcttcatcacctacgccaagcagccgcacctcaacggccactacaccgtgttcgccaaggtcatccacggcttcgaggtgctggacctcatggagaaggcgcagacgggacccggggacaggccgctcgccgagatcaggctcaaccgcgtcaccatccacgccaacccgctcgccgtctgaactcctcttcctaccgctctcccctccactcgctcctgtcctcatccaccgggatctgagcgtcatcagccttgctttcaaccgcaaaatcacgctttggtttcggaacatcaatctgtagctctctaattttataccgatgctgtgacatgtaacctttgatagatttgttttgcctggcgttttttttttcttcatcgaccatcaaaatcttcaccggccatgtctgccagggtttgagtttgacactgtaacttgcaaaacaatatagca

SEQ ID NO: 52425 - DNA, 955 bp, Zea mays
  Clone ID: MRT4577_147811C.1
gctgcaaagcgcgattcggaaggtccgggtcgagcaccggaagcacatcgcccacccacccgctgcgtcccgctcaccaagtcaccactcaccagccttgctgcgcgcgtcctcccacccgccgcccgtagccatggtgagccttctctcccgccgcccgacctgtgtgctatcctatcctattcgtatcccgtactgacggcgtcgacgcgcggatggctgtggcagccggtgacgctgcacacgaacctgggcgacatcaagtgcgaggtgttctgcgaccaggtgccccgcacggcggagaacttcctggccctctgcgccagcggctactacgacggcaccgtgttccaccgaaacatcaagggcttcatgatccagggcggcgaccccaccggctccggcaagggcggctcctccatctggggcaccaagttcgcggacgagttcagggagtccctcaagcacaacgcacgggggatcatgtcgatggccaacaacgggcccaacaccaacggcagccagttcttcatcacctacgccaagcagccgcacctcaacggccactacaccgtcttcgccaaggtcatccacggcttcgaggtcctcgacctcatggagaaggcgcagaccggccccggggacaggccgctcgccgagatcaggctcaaccgcgtcaccatccacgccaacccgctagccctctgaactactactgccttccacctgctcctgcagtcctgtcccgtggctttattaattactattattactcatggaaatcaggatgagtggctttattaattactattattactcatggaaatcaggatgaggagagtaatttcgcgaggacacttttgattgattttgaaacatggatctgtagctctctaaacacttgtagttgtagaactctaaaaaaactttagattctcatttctgaacagaaaaa

SEQ ID NO: 52426 - DNA, 711 bp, Zea mays
  Clone ID: MRT4577_147812C.1
attgggaccctcgaggccggccggggcatatatcacgtgtgttaccaataaattttgttatggtgctggtggttctatggcaaaaaaaaaaaaaaaaaaaaaaaaaaaaaaaaaaaaaaaaaaaaaaaaaaaaaaaaaaaaaaaaaaaaaaaaaaaaaaaaaaaaaaaaaacacggcccggtcgtttattcgtttcccaaaaaagggcccattaaccctagggacagcctcggttcgtttgatccccggggggagttttatttccgccaagggggggaaccggggtccggatccggaaccaaaaatgacggagtccctggggggaaaaaagccggggagggccacaatcaaggaaatgccgggggggcaggacggcccgcccccggggggtttcgcgcccgggggtttcccccgccggatccccacctgggggcccagggccaccgccattttcctcaccaccttgggggttttcgcatatggaatgaaccaggccggccagggaaacaaggtccgccgggggttcaaaaaaaaaaaaattgttgctcgcagggttatactgccgatgctccaagcaaaaaaggatgaaagatttgtcaaaaagggaaaaaagggtcttgaggaggaggcgaggatcttgaaagacgttccagggtgaaaggccggcaaaagcgtgaacaactctggaaaagggatgctcccggttactgg

SEQ ID NO: 52427 - DNA, 340 bp, Zea mays
  Clone ID: MRT4577_147813C.1
gacaagcttttttttattttttttttttttttttttttttgttttttttttttttttttttttttttttttttttttttttttttttttggcgaatttaacaagccaggggaccagagccaaaacgcccttaaaaaaccggggggggggggggggggaaaacaagggaaagccccctgaaccggaaaccactaaccaaaaaaagggaaccaaaaaggacacacaacccggggcaagacaacccaggaaaaggcccaaaacaacaaggccccagcccctcttcccccggagccccttcatggaaaaccaaagggcgtaaccccaaaggaggcaccccgggg

SEQ ID NO: 52428 - DNA, 302 bp, Zea mays
  Clone ID: MRT4577_147814C.1
aaacagaccaaacgtaaggattttacacgtacgtagaacatcactgtttaaaaaaaacgaacacggcccaaaaaaggggtaaagaagatcaaaaccttatgacgaccccacaaacttactaagacctagcttcctagttcctatattggtaacatactggaacattaaacattttaaattacaggtcccggggaaccaccgaccaggccaggttacttttttttttgcctcgcaactgattttttaacttcggggtgcgctgtttgggttacaaaagaccacttttttatattacccttagg

SEQ ID NO: 52429 - DNA, 1568 bp, Zea mays
  Clone ID: MRT4577_147815C.1
ccggccgggagccagccaggtccaggagcgcgagttctgtgcctgtgcctctgctccacctcccctgcccctgcgccccaagtccacgtccaccactcagcactcacgctgctcgctcgctcgctcgtacacgcgcccgcttcgcgcagggaaggaaccgtggtggggggagcggacggacatgatgcacgccaagtcggagtcggacgtgacgagcctggcggcgtcgtcgccgccgcggtcgccgaagctgcgctgctcccgccgacctccccccccactaccccctgcgccagtgacgccgctcgttcgcgcagttttggtcttctggccagcagggcagggggggaacccgcgggagcgaggcgcgcgagcgagcgagcggagggaggaggaggatgatgcacgccaagtcggagtcggacgtgacgagcctggcggcgtcgtcgccgccgcggtcgccgaagcggggcgttgccgcggccggcaccggcggcggcggcggcggctactacgtgcagagcccgtcgcgggagtcgcacgacggcggcggcggcgggcgcaaggtgctcaacgacaagggctggcccgagtgcagcgtcatcgaggaggaagggccctacgagggcctcggcgccggggacagcggcctctcccgccgctgccagatcgtgctcggcttcctcaccttcgtcctcctcttcaccgtcttctgcctcgtcatctggggcgccgcccgcccgtacgagcccgaggtcgtcgtcaagagcctggtgatggacgacttctacgctggtgaaggcacagaccacagcggcgttccgaccaaattggtcaccacgcgcccgccgccgcgcgggtcggtgtacaaccctgccacaatgtttgggatccatgtcacctccggccccatccgtctgatctattcagagatctcaatagcagtcggccaggtccgcaggtactaccagccgaggaagagccaccggacggtgacggcggtgatccacggcgagaaggtgccgctgtacggcgccgggggcggcctgacgctgtccacgagcgcgggcgggggggcggtgcccctgacgctggacttcgacctcacctcccggggctacgtgatcggcaggctcgtgcgggtgacgcacagggcgcacgtgacgtgccccgtcgtcgtggacgccaggaggaccaagcctgtcaggttctccaagaaggcgtgcgccgtgtacaaggcctgagcttgagagctcgtgaaacctgtgatcgaccgagcggtagcaatgcgtgctcttgcaaagatgtagctattgtgttgatggtgaagaacaataagcgcacacgtatggtcttgtcgatatatcgcgctgtaaggcctgttgttcttgtgtgtgtgtccctttttcagagcatgatcgtagagacggaagatgacttaccatgacaattttcctatacctttataacttcaaaaaaaaattattcagggctgttattcttagcagacaaacctatcacaataatatacaaaaaactgcaagtactccagaaaaaaaaaagaaaaa

SEQ ID NO: 52430 - DNA, 479 bp, Zea mays
  Clone ID: MRT4577_147816C.1
gtcaaatcggatatttgttcttttttgtaagcctgttgttggcgtggcttgtgttcgtcaagccatagcaattgttgggcttgtgtagactagatggtcgcaaaattgcagtatgatggattccatttccatcttataagagtttcttgaccatggggtgcctcaatcttggttatgctggagggctgtgctgatgcaactgatgggttatggtgtgcctaaatcgtggctatgctgacggaatcgattggtgaagatttcgttctaaatggaccaggtgtgactgcccaggtgttccttctacttgtacgttgcttttttgacggcactgcacatggacagttggtcataagtttctttttgatggcactgtatatattgttgtacaattttatctcttgacagttgcagtagaagttcgagggtatgagaacacaagtttcaaagtttctcgttattatattcaattgatggtttgg

SEQ ID NO: 52431 - DNA, 954 bp, Zea mays
  Clone ID: MRT4577_147817C.1
caggtccaggagcgcgagttctgtgcctgtgcctctgctccacctcccctgcccctgcgccccaagtccacgtccaccactcagcactcacgctgctcgctcgctcgctcgtacacgcgcccgcttcgcgcaggtgcgtgtagaacgacggaggcattccatttccgactgagccggaaggaaccgtggtggggggagcggacggacatgatgcacgccaagtcggagtcggacgtgacgagctggcggcgtcgcggccgccgcggtcgccgaagcggggcggcggcgccggcaacggcggctactacgtgcagagcccgtcgcgggagtcgcacgacggcggctacaagtcctcgtcgatgcagcccacgccggtctacaacagccccaacgagtcgccgtcgcacccctcctacggccgccactcccgctcctcctccgtcagccgcttctccggcaacctccgcaagggcgccgccggggaccgcaaggtgctcaacgacaaggggtggcccgagtgcaacgtcatcgaggaggagggcccgtacgaggacctcgccggcgatagcggcctctcccgccgctgccagatcatactcggcttcctcaccttcgtcctcctcttcaccgtcttctgcctcatcatctggggcgccgcccggccgtacgagcccgaggtcatcgtcaagagcttggtgatggacgacttctacgcgggtgaaggcacggaccacagcggcgttccaacaaaattggtcacaacaaactgttctctgcacatagctgtctacaaccctgccacaatgtttggaattcatgtcacttctggccccatccacctgatgtattcagagatcccaatagcagtcggtcagagcttggtgatggacgacttctacgcgggtgaaggcacggaccacagcggcgttccaacaaaattggtcacaacaaact

SEQ ID NO: 52432 - DNA, 107 bp, Zea mays
  Clone ID: MRT4577_147818C.1
tcgatcataccagagcaatttccgtgacccagtgtagcaatactgatctggaaggtgaggaaaaaatgtctctcctggaatggtttgtcaattaatacaagaagttt

SEQ ID NO: 52433 - DNA, 1614 bp, Zea mays
  unsure (1)..(1614): unsure at all n locations
  Clone ID: MRT4577_147819C.1
cattgggtacctcgaggccggccgggagccagccaggcccaggagcgcgagttctgtgcctgtgcctctgctccacctcccctgcccctgcgccccaagtccacgtccaccactcagcactcacgctgctcgctcgctcgctcgtacacgcgcccgcttcgcgcaggtgcgtgtagaacgacggaggcattccatttccgactgagccgtgtgtgtttggatcggacaacccctgccaaaaccgcgtgtgccggcgctgttctgcctctgatcgtgtgtgctgctgttggttttggttttggtttggctagggaaggaaccgtggtggggggagcggacggacatgatgcacgccaagtcggagtcggacgtgacgagcctggcggcgtcgtcgccgccgcggtcgccgaagcggggcggcggcggcgccggcaacggcggctactacgtgcagagcccgtcgcgggagtcgcacgacggcggctacaagtcctcgtcgatgcagcccacgccggtctacaacagccccaacgagtcgccgtcgcacccctcctacggccgccactcccgctcctcctccgtcagccgcttctccggcaacctccgcaagggcgccgccggggaccgcaaggtgctcaacgacaaggggtggcccgagtgcaacgtcatcgaggaggagggcccgtacgaggacctcgccggcgatagcggcctctcccgccgctgccagatcatactcggcttcctcaccttcgtcctcctcttcaccgtcttctgcctcatcatctggggcgccgcccggccgtacgagcccgaggtcatcgtcaagagcttggtgatggacgacttctacgcgggtgaaggcacggaccacagcggcgttccaacaaaattggtcacaacaaactgttctctgcacatagctgtctacaaccctgccacaatgtttggaattcatgtcacttctggccccatccacctgatgtattcagagatcccaatagcagtcggtcaggtatatccatcctccgtccttggcctatttaatagccgcttttaagtgctgtcctcgcattgactgatgatactgctctgcctcgtgttgagagagtaaactgcgcgaggagacgaatctcctcctttttacctctctatttaacttcaccattcatttaagagaaactccactagccaaacatttctcatgtgcttcacctttctatccataattccatccatatttgtcccatccatcgcgtcaaagcctcaaaggtcgtcaaagatctgactaacggatgcgtaattccttgtcaagttaatcgtacaaaatgcatgatcgagttgaaaagttttggttgtggggacaaaagaataaagacagtatgtatactagggctgcttcagcaatagacagtgctaacatactatgtgcatcagttgagtcaaaagccagaatcgctggtaatagtcattgaatctgacgtggctactgtgactgcgatcactctcaggttcggaggtattaccaaccgangaagagccaccggatggtgacggcggtcatccacggcgagaaggtgccgctgtancgcgccgggggcagcctgatgctgt

SEQ ID NO: 52434 - DNA, 227 bp, Zea mays
  Clone ID: MRT4577_14781C.1
gtctaatgtaagtggattaagatagaccagttaagagtttggtctcaaggtttgtttgtacccaggagatgaacttttgcaaaattaattgagagtatattagtataagaatcatgaatataagagagttttgtatatgtgataattattaaccttagtattttatctcagttgttttctcagaatttctgtaaactcaactacttagtttgcagaattttagtcat

SEQ ID NO: 52435 - DNA, 223 bp, Zea mays
  Clone ID: MRT4577_147820C.1
ataactgccgatggagaatcgagcagcccacggccaatgtcagatcaacgatgctgccatgctggctatggctcagcaaaaacaattctataagctgggttggagccggaaaaaattcatctacgctgagttggagacagcaactcggatggatcatgagacactgaccaccaagggagcgggagaaagccatcacctaagatagggagccacaagccttcag

SEQ ID NO: 52436 - DNA, 355 bp, Zea mays
  Clone ID: MRT4577_147821C.1
gctaccgccgggcgcagcacacacggtgcctgcgccgcagaccctctctcggacgcatgagaactcgcacggcgctgctcaccatgactgcgctcacgagggcgcacatgtctagtactactgaccgactagggcatctgattcagcatagagcacaactctaggcacttcgtaaggataaacactgtgtcatgttcacgttggaaagacaacgatggctaaatgcaaaaaagaatgccacagacaaggttcaagactgcaggtgcttgcacaaaatcatgagcatgacaactcacataaccctaccatgcgcggagcttaaggcctacccgagcgtactcaagaaatgctctta

SEQ ID NO: 52437 - DNA, 474 bp, Zea mays
  Clone ID: MRT4577_147822C.1
gggacatagaaagcgaaatacagctgcaacactacagcaacaatgtgcggtcaatatattttccatccttatgctactggctctttctacgagtgttgctaactcgatcattttttctcaatactgacattctcctatagctgcccttcttcccgcataccttcacatcgatgaccgttccagtatgcgacaacccatcccttctaccctactagctccaacaagcactggcaacatgcaacttacctttatcacccctgttctttcaacagtcgccaggcctatctttggtgcggtcattgatacaaacaatcaagcctcaacagctgctgcaactcgagctaccacggatcagcccagtagctctgggacacctttgtctgtactctcagctaccacaatctattccattcaaccaactgcttacactgaaccctgctgattatgtgcatcaacgacatctactactattca

SEQ ID NO: 52438 - DNA, 360 bp, Zea mays
  Clone ID: MRT4577_147823C.1
gaaaacccaacttcagttaataaaactaaatttcctttgaaacccccaaaccactgggcggtccaccttttttaagggaaagaaaaaaaaggggtttacatttcgtttcacaaaaatggaacctaaacaacatccatttttatttcctggcatttgggttacttttgcgcacactggtcctttttaaagacccccttggcgatcaaataaaaaccccccaaaaactttcggatttccttttttttaacaaggcctttctggtttaaaagggcgggggaacgaaaaacaaaccctaccctttttcccccaaggattaacttattcttgacctttttggaccggaggatgggccccccatta

SEQ ID NO: 52439 - DNA, 396 bp, Zea mays
  unsure (1)..(396): unsure at all n locations
  Clone ID: MRT4577_147824C.1
cccacgcgtccggcttggcggagctcgattcgctgcgtcgctgagcctgagtaatcgattcgtgctgggcggtggcgtggtcggagggatctgaatcctagcgccgtccgtatctgaaacccgcgccggcgagctgctcggcgcctcggtggcatgggtggctggaaagcgggggagaggagaagcagcggagatatgaacggaggcggcggcagcagccgggacgagttcgggcggacggtggcgcgggccgcggtggcgcaggcactgcaggccgcggggttcgattgcgcgcaccgcttcgcggtggacgcggtcgtcgacaccgtnctgcgctatatcacccacctgggccggtctggcgtctttcacgccaacctcgccggccgcgcgcac

SEQ ID NO: 52440 - DNA, 278 bp, Zea mays
  Clone ID: MRT4577_147825C.1
caaacgaatctccttagactatgtagatatcccacgattaagcggttgccgtggctttatggcgatctttctcttaagtctacagacaggacaggttcacaggtgcacctcatccccagcaagcactgtgtgctggcccagtgaagcgtccatccccagccagtcacagcaggcctgaccaataggggattcttgtcaggctgatctcaggattcagcttgccggtgctactgacgtagacgaagcttcagactaccttaggaccagagaaccttgtg

SEQ ID NO: 52441 - DNA, 2235 bp, Zea mays
  Clone ID: MRT4577_147826C.1
cattgggtacctcggggtacctcgaggcttcccgggattccccgttcctacccaccgtaaaccctagctgcgagctatggcccgcaagcgccaggcgccgccgccgccgccgccgccgccgccgccgcaggaggaggaggatgagtcatcctccgaggaatctggctccgaagaggagtctcctcgcctccccgagctccgaaggccctcgcaggccgccgccgccaacaacgccgactcgtcggacgcggactcggattccgacgccgacgtccaagccttccagatgcgccaggtgccccgcttccccaccaagcagacacacccagtctctcacccagaatccggtgccgaagaggaggagggcgagttgtcagagtcggagcacgagaacccggtgcctgtggttcagaagaaggccgtggcggcggcagggatgtccaagacagggcaggagaggaagaggcccgcctcggatcctgctccaagcgggaaggcaaaaaagaccaaggctgaggctacccctcctgctaaggcgaagaagggagagaagctggcgcctgatgcgactcctgcaggaaaggcaaagaagggcaagaccgagctagagacactggcacctgatgccactccagcaggaaaggcgaagaaaggtaaggtcgagaagacagctcctgaggccactccctcaggcaaggggaagaagggtggggacaaactggagaagccagcagcgctcgatcgctcaccttcagacagcaagtctgaaaagcttgcacatttttcccgcacatgggagaaagatgatgagatgaagatcttggaggctctcgcggcccatgtcaagagtgagggcgtgctgccgaagactgattttcttcttgctagtgttcgtgaccgccttgtcaggaagaactgcaactacacggatatatatgagaaggtacgaaggctaaaggagcgctatgaaaaattggtgagcacgggcactgtaccgagtaaagaagatgagctccagatgtataatctctctaaaacaatctggggagagaagtcaaaggaggctactgctgccattacgtctcaaaaaggtggtgctgtgacaaagcgtaagaaggggcaggctaacaaagagaagatggatggaaatgcaaagagtggtgtggcaaaggaggctgcccatagtactgccaatcaaagtggcgattctcataaaggaagtaagaaggggcaagccaggttgtcagaggacgctaccaccactgtatccccaagtaagagtaagaagcaggaaagtcgtaatgaggaattagacaaagatggtggtaatttggccaagggaaagaaggggaaaacagacaaagggaagatggacagagacacagataatctgacaccaaaggaaaccataaatgaaaatcagaatggtgacattctgattaggagtaaggaaggagaaattcatgatgatgaaacaggagatgctaatgtgcaaggtgtgcgcagaggttttgataagctgcagaagttgtattccaaccttgctttttatgtggaggagattgaggcccatcatccatgtggggagactctgaagagagcatttgagttcattgctgatgagaaggcagaaggtctggaatccaagatcaagaagcaaagagtagcagaggcgaaggcggaggtccgtcaaggcgacgtaaagaaggaggttcttaatttgctgctcagcttagtggactaaacctttctggattattgtggtataacattctacttgagttatttagtttcctcttgatgtctggtgcattattattgcccaatttgtagaattcataggttcaaaacttggatttcacatttgaatcaattaatcagtgttactaacaaattaagctgttgatcctgctaatccctacatctgagctagcatttagctttagcatgtatgcttaatgcggtgctaaattattggaaactcctttcattgagttttgacatgaaaaatctttgttaggtccagcactccagttaatgatgcaagtagttttgttctgttatcattcccctgtagatttttctatttttagtgtaagtttgtatctgttatcagggtaacgtggtttgtccctgaagtctgaactgagaactgaatatgcatgagttctcaaaccagtttgcttgaattgatctgtgtggttgaaattgatgtaaaaaaaaaaaaaaaaaaaa

SEQ ID NO: 52442 - DNA, 1015 bp, Zea mays
  Clone ID: MRT4577_147827C.1
tcagaaagcaagtaagaaggggcaagccaggtgtcagagaggctaccaccactgcctccccaagtaagagtaagaagcaggaaagtcacaatggggaattaaacaaagatgatggtaattggctaagggaaagaaggggaaaactgacaaagggaagatggacatatatatggatcgtctgacaccaaaggaaaccgtaaatgcaaatcagaatggtggcattgtgattaggagtaaggaaggagaaataaatgatgagggaacagaaggagatgctaatgtgcaaggtgtgcacagacgttttggtgagctccagaagttgtattccaaccttgctgtttatgtggaggagattgagacccatcatccgtgcggggaaactctgaaaagagtatttgagttcattgctgatgagaaggcagaagatctggaatccaagatcaagaagctaagagtagcacaggcgaaggcggaggtccgtcaagggaacataaaaaaggaggttcttaatttgatgctcagcttagtggactaacctttctgaattaatgtgatgggcggatagaagatttgatcaacaaaaggtgatgtgtgttgaatttatgggaaagatgcgagcagtgagcatattttgcaatttcatggtggtgagcattagtgatacatatttgtattttcttctaagctactgcttaagctgttgatcctgctaatccctacatctgagctagcatttagctttagcatgtatgcttaatgcggtgctaaattattggaaactcctttcattgagttttgacatgaaaaatctttgttaggtccagcactccagttaatgatgcaagtagttttgttctgttatcattcccctgtagatttttctatttttagtgtaagtttgtatctgttatcagggtaacgtggtttgtccctgaagtctgaactgagaactgaatatgcatgagttctcaaaccagtttgcttgaattgatctgtgtggttgcgattgccatat

SEQ ID NO: 52443 - DNA, 522 bp, Zea mays
  Clone ID: MRT4577_147828C.1
ttcttcgcgtccgtaaataaactcaccttgcccttggaattaaatggaaaactgtcaactgtcatcgggcagcagcagacgtacatgacgcgagctttggagcttcttgaatctactgcacgaaagcgtctgaatgaaacttgtttagtctcagcgaacatgccaaaataggctgcgtcagatgcagagtgacgtgcactaatctgcttctagggggcatgcatggacacatgttcaccagaaaggccgatgacgcagcgtatacgagctagcattctagcaacagtccgtagattcgagtaatgcccactactaggcaaacttttgtataaacaaagctactcaaagcatggatggatggatcgcaggtcgcagcaagttgactctagaaatagtttatcatgctactcgagctgtatccaagtttgactgacattggttcatcttttactggactggtcataatattacctgggctagggtttaacaggcttatttttgttgggccgacaaggaatgggc

SEQ ID NO: 52444 - DNA, 475 bp, Zea mays
  Clone ID: MRT4577_147829C.1
cgagcggccgcccgggcaggtacaagctttttttttttttttttttttttttttttgctttttttttttttttttttttttttttttttttttttttttttatttttttttttttttttaaaatattgcccttttttccgggcggcccctagggcgaatcccaaccaaagggggaaatggaaaaaagggtccgctgtgtgaaacgaatttgggcttacaacccaacttggtgtttaccggggaaaattgttttccgggccaaaattgcataacgagcgaactgaaaaaaaaaaattgaaaggcggggaatgccaaaaaaccagccaacaaaaattaagggcctaacgcacaattaaatctttccacccacgaaaacaggtgggccgggtaaaataaggaatccccccacctcaaggaaaaagccaattccctatgaggggccgtttcggttagggggctaattacactctccggc

SEQ ID NO: 52445 - DNA, 1356 bp, Zea mays
  Clone ID: MRT4577_14782C.1
cccctcgaggccggccgggtaccctgtcagcaccgtcgcgccgggatccggcctcgcacggctccacccacgagccagtggaatcttaccgattcggcaaccgtgctaatcgatatccgtgcaattccacctcccgaaccgaatccctccaccgacccaaaccctagcgcgcacccttctccgtcgtcctttcctggcgcgcgggccggtgtcggagatgcgggcgctgctcgcggacggcgggatggcactggcggtgtcgccggaggccaacgagtcgtcgggtggcgctgcggtgtcgctagggccgttatcgtgggcgtcggagtgccacggggtactgtacaacctggccttgatgctgccatcgctggcctttgtggggttcctggcgtggcaggcgcggcggagcttccgtaggctcagctacggccgctctcacgtcgttgtcgtcgcgtactacgcgctcctctgggtcgtcgccgtactcaacctcctctggtgcttcctgcaggcatggcaatgtatgcctgacagggcattctcttggaatatactgtcactgtttacaaaatcaggaatgttattcttggaagtgagtctcatagcctttctacttcaaggaaatgatgccagcggttttgaatctttggcacgaacctttgttatatctggagctgtagttgctgctgatgtattgctcaagactatatatgtttttggcttcggtgttcctttgttcattgatactgatcaaggaactagtgggaaatggggcctgtggattctccacaaacttgtgcttactggagtctatgggctgattgttttcatgcatcattcaagatggagagacaggctgcctgcaaaaccagcatactacaactatgtatgtgtgatgttgctactgaatggcatatcactgtttggatgtttccttattgcaagtggagctggatttggtttatggttatataatctcacaaccgtatgctatcattctctttaccttcccctcctatatgtgactttcttagcagacttcttccaggaggaagacatgctcctagagaacgtctactattctgaaatgaaggatgctgggttcttcgatgctgactgggattaatccgtggctactgtgctgtatgacccatcccatatgaagtacgctgtatttgtttttattttatctgtgtactctcaacgtagaacaggaaatgtatgtagctagtcgtggtagtgaatggaaatatgtaatcttactgctgcatacttcagaaaatcagaattcaagtgatttcacggctgagattgccatctcaaaaaaaaaaaaaaaacggccgtcgatggtac

SEQ ID NO: 52446 - DNA, 328 bp, Zea mays
  Clone ID: MRT4577_147830C.1
agattaacttgatggaaccaataccaattcggcagagtctgcatataggagtttcaacgttctatcataacacgcttagctaaactgggcaacgttgaacataaaatgttataccaagcactaaagttcattatttcaaatttattggaagattatgcacttgatcggatcctgcccccctaaagccttataattttggatggcacgaccatagcctccacctacgatgccatcgtcacctccggagtcaccacctacatagtctgcggcgctattgctatcaccaccagggtttcgagaagggctttaattagccatgttgacacgt

SEQ ID NO: 52447 - DNA, 239 bp, Zea mays
  unsure (1)..(239): unsure at all n locations
  Clone ID: MRT4577_147831C.1
ctcaacccactgtcctcggcatacaaggatgcggataatttttacgtctacggccataatacacatancccaacaactagtttcactctaatctgcatttttggcatcaacgatcccttgcgcccagaaatcaatgacgctgtcgaggcctctaaatatactggcatcctcatgagaatggtcaccggtcacaacatcaatacagccaaagctatagccaaagaatgtgggatactaac

SEQ ID NO: 52448 - DNA, 187 bp, Zea mays
  Clone ID: MRT4577_147832C.1
ccccaggcccctttttttttttttttttttttctgtcttaaagggcataggttctcttattattgattataaactcaagcactgaaaatcgctgcgcaaagtactgcgtcaggtggaaaaggcaggacagggaatttacacaaactgaatggccaagatagcacctatcatctaccttgtacacagg

SEQ ID NO: 52449 - DNA, 608 bp, Zea mays
  Clone ID: MRT4577_147833C.1
agtttctacgcgcgatgtgtctctctctctctccctctctcgtctacctacacgtgaaacgagatgggcatccgcgtctgactggtacgtggcacgcactctaaccacagcgtgtgcgtctatcctggtgtgactcgatctgtgacaagcactcaccagaacagctgtcgtcctcgtcgacaagacgctatgagcgattgcgtttacttagatacaatgcacttcctgatgatagagagaatgaatgtcatgctttgggaaccctccaaagtaaccatcatacacgtagaccgccctatgttcatctcctaggtgcggacacaccagagagcatccaccctgtgagcatgatgcgaggaatcacatcagctaaagatgtggaattgcttgtgacacactgagctgagtcttataggcgtgtatactatgaggccaactgctgacgctctgtctcagctacttgtaggcagaagaagtatctatagctgcgctatctatatgagcgctgaactcatatggtcgtcatcgcgtaggacaaagatacagacgattcgtaccactgtctgaatcatgtgacctttactttgtccagctctatggagatgaat

SEQ ID NO: 52450 - DNA, 160 bp, Zea mays
  Clone ID: MRT4577_147834C.1
ccaatccaactcaaactatgacctttttattttctgggaaccacatccatatcaccaataactttatggctgacctttccctcatcaaaaatctaggctaggccacccccaatgaagggaagctcactcaccactggtaggtttggtaaagcaaggtctc

SEQ ID NO: 52451 - DNA, 319 bp, Zea mays
  unsure (1)..(319): unsure at all n locations
  Clone ID: MRT4577_147835C.1
caaaccccacccccccccactgcgcacccgcacccacaccccacacccgcaaccgccctggacggaatggagaaccgcgtgccatccagaaccacaccactaaaccaacacaggcaccaccgcggctgggaaccgaaagcacaagaagaggaggaacctggacggccagcccacaacagggcgccgggatcagggtcctggcggcgctcttggcggcgctcgcggcagccaccgccggcgtgacggcgcagctgcggcaggactactacgcgncggtgtgcccggacctggnanancatcgtgcgcnccgcggtgtcca

SEQ ID NO: 52452 - DNA, 305 bp, Zea mays
  Clone ID: MRT4577_147836C.1
gcggccctgccgtcttgcgccactgctcggtatgaacagcgcaggcgccgaacctcgacgtacagcggctcccgcgcggtctcccaatcccgcaggtgctcagccacccggacactcccgcgctgcggccctctttagttcgtgcttggccttggccgacctagacgcgggcccatcttgtgccttcttcgccgcctccggggcctactttgactgcttgttcagatgagcgttcaccggcaggagggcagctatcttttggttcttctccggcagccttaaagctaggcatactaaccccgggc

SEQ ID NO: 52453 - DNA, 693 bp, Zea mays
  unsure (1)..(693): unsure at all n locations
  Clone ID: MRT4577_147837C.1
ctcgaggcttgnccgggaaaaaaaaaaaaaaaaaaaaaaaaaaaaaaaaaaaaaaaaaaaaaaaaaaaggaaaaaaaaaaaaaaaaaaaaaaaaattaaaaaaaaaaaaaaaaggcggccgtttttttttttttttttttggatgggcccaaatggcggactattgccgagtttggggccctcgggttaatggccctttaatattatttttgggtggaccttaaaaaaaacccctccaatatacggttaataaaaccttttttctccccctaagttttacaacttattacatactgtaaaatataaacactctaggaataaaagggggcctgtaccaggatcgctccaccgatcttttttttttttttttttttccggggggccccaaatacggacatattgtcgagttgggggcccctgggttaatgagcccttaatataaagtttggtaggaaacaaaaaaaaacccctccgacaacgggaataaaactgttttccccacccggctgtctgaacttttttacgaactgtgaaataaaaaaacctcggaaattaaaaggggccggatgcaagaactccaaagggaaagattaatgtgttttgttgttttgggcacgccccaaattgggccttaattaaagtttgggggcccccctgtttttcgcccattaaaaaataattttggggggatct

SEQ ID NO: 52454 - DNA, 703 bp, Zea mays
  Clone ID: MRT4577_147838C.1
gaaggatctgacactgagattaatgttccaaactattctgacctagaagcactgatacttgatctggacctgattccatgggatcaagaatctgacttcatccaaccagaagtttcaaggtttcagtatcctgaaagcaggaaggatttgataagattagagaaaggtgtctgctcttatatgaaccgatctatcatgtctaagggtgctttcgcaattctttatggccaacgcacgaaatactacataagagagcccgaggtaagtcttgggagagaaacagaagaagtacatgttgatatcgatttgagtaaagaaggaaaggcaaacaaaatatcccgtcgacaggcagttattaagatggacgatggtggatctttctacataaacaatactgggaagttttcaattttcgtgaatagcaaagaagtaccctgcagtaaacgtataaacttaatgtcagactcattaattgagataaggaacctgaaattcatttttcacgtgaaccacgaggctgcaaggcaatacatagttcgaaaaaggagaggaagctcccaaggcgggatcacggcgtttgattggagtcagaacccatgagtagttaacgttatgatcaaggttgtttataatctgcgatagctacctctctcttcaagaaagtattggataagcgtaaagttatttataatttccgatagct

SEQ ID NO: 52455 - DNA, 276 bp, Zea mays
  Clone ID: MRT4577_147839C.1
cccacgcgtccgcccacgcgttcgcggactcgtgggcggacgcgtgggcgggcgcgtaactagttttttaacaaaccttcatgtccagcaagtcttcttttccatagcaagggacatcaaacatagactttcggagaccgattccaatcctgaggatctaactatgaagatcaaggctgaagggtaagctgaagcagcggctgcagcgcataattcatcttgctttttctcctgatcacttgtcaccataagattattgtcttctcgcgcatgtaa

SEQ ID NO: 52456 - DNA, 263 bp, Zea mays
  Clone ID: MRT4577_14783C.1
ggggttggggtttttttttttttttccatcacataaacacaaaagccccacattttttttttcacaaaagcatcacaattataatcccattcccaactttattatttacagatgggtggctagatcattcaaaagggtccataggggggcaatcccaatagggtttagttttcaagggacaatttaaaattaagccccaatttaatgggttgggctcagcaattcatggggctccccaggtgggggggtggggcccaaatttc

SEQ ID NO: 52457 - DNA, 650 bp, Zea mays
  Clone ID: MRT4577_147840C.1
actccacaatagcgccacccaaccaccctcttgcttccaacgactccgccgagaggaaagaaaggggggaataggctgccaaagtgagccatcactgcgttccagaaggcgggatgtctgcatatagccccttccgacaaaaagaatacgtcgctgtcgacgactacctccgaagctacgagatgaaggacgacaataataaacgggtgatcgctgccaccaccatggcctaggatcacatgctctacccggttctcaccggccgcgtctgatacgtgagcaaaggcgccgtccaggacgagggcgacagacacggtcgacgaggcacatactcaagagcacgatgcgtgacctcgaggagaccgcggactccgcccgctgcccctaacactaccaccggaacagctcctacactgaccactaccccgccgacgccaaagaccgcgtcgacgctcttcgccgcctaatgctttctctgcactctcaggccgacctcacgcgacatcgtgccaccattgagaacgaaactcccatcccatatgatgtggcgaatgatctcaaagctggataatataccggttcgcctctctacctgtactgctcagcccgacgtcggtggtactctacaggcgtgcaacgttgctcactct

SEQ ID NO: 52458 - DNA, 461 bp, Zea mays
  Clone ID: MRT4577_147841C.1
ccttaattccctggtctacccactcttcctatgattggaaaaaaaaaaaaaaaaaaaaatttaaaaaaaaaaaaaaaaaaaaaaaaaaaaaaagaaaaaaaaaaaaaaaaaaaaaacaactaataaaaataacaaacccactttctttaaacatccaaaattacacaccattattcttcaacaactttaacaaattatctaatcaacactcatacaactattcttaatcttaccctaccaccttctctacaacatcttcatctcctttcatctacccctctctttctcttctccttactcctacataccttttcctcctctttttttccatttaatctaccacttcttactcctctaactatttttaacccttctttctactttcttcaccttctttcatttttctccctttccctttttatctctttttcttacctccttcttcttcaattctttctttt

SEQ ID NO: 52459 - DNA, 1678 bp, Zea mays
  unsure (1)..(1678): unsure at all n locations
  Clone ID: MRT4577_147842C.1
cggacgcgtgggttccacttcacggctgatgagtgatgaccctaccagaaatcgacccgatacggctcaatagcccgaatcacactcatcacaagcctcaaacttttccaaaccaatttagatgcggcgtgagtgctaaagcgctctctggactctgtttcgcagtggccgcagctgcagcgtcccttccctttttgccatccagcatcacctgtgccgccggcgcgtaattgcaccgcggtcactggttagtaggaagaagggaaggaggaggggggagcggtgtcngggtatcgtctcgtgcccatgggcgtgcacgccaggtcgatgagcttccaaatcttcggggcttgcattgcattgtccgcctgcctaagcacgcaacgcaaggaaggtatagtattctctacttcatcttccagtcctcctgctagctagctttgcctacaaagcaaccaaaaagcgagcgggcggcaccacacgtcggtcgagtgcctatcccttgaagcccttcgacaacaccgagaggaacggaacggaacggatcgcccccctttatacaagcacactcgccgcgcaacactcccgaaacgtgcatcgcgactagttagcagttactgccgcggacagagcacggcaggaaggagcgagcattcgtgcgggagagctggtggcacatggaccgccgggactcctccgaggcgccggggccggccgtgaacggcactggcggcgtcggaggcgcgggcgcggcggcgcccggggtcgtcgacgcgaccttcgacaccaacacggtgatcctgctggcggcgctgttcctggcgctgctgctcgccatcgcgctcaactcgctggccaggttcgcgctctggtgcggaggccgggccgcggccgggggcggcgaggtggcggcgtcgccgagcgtcgccgcgtcgtcctgcgcgggcgtccggggcgggatcaagaagcgcgcgctgcggagcatccccgtggaggtttacgtcggcggggatgcgaaagacgacgaggaggagggggccgggagcggggacgtgtgcgccatctgcctcggcgagttcgcggacggcgagaaggtgcgcgtgctgccgcggtgcggccacgcgttccacgtcccgtgcgtcgacgcctggctgctgtcccgcggctcgtgcccgacgtgccgccgccccgtcatggacgccaagcctgccagtgccagtgccacaggcggcaggggagtggcccagcagagcgcccgccgcccggacagcgacaccgtcgccgtggtcattgcgtgagggacgacggaggggagcatgggcgtggccatgggcccatggccatcgcaagcagcagagacctagtggtaggagcgagcacacgcaacgaagcaaggtatagagtagcgctctgtactgttccggcgtcgctgtggataagttcatgtaaaaaatatctccgtagcctgccctgctctggtagccgcatcgtccgatattatccggcgacggctggcccacttgcactagatgacgctacatgcttggagtgtactgctcgctagtgtagcatcttcttgccgttgccgttgccgtcaaatgtagtgcacgagtagctgcccagttgctctgtcacagttttcagtttcggtggtgccgtgcaacaatttgttacagat

SEQ ID NO: 52460 - DNA, 737 bp, Zea mays
  Clone ID: MRT4577_147843C.1
ccggagtccggagtcggcgggcctcgactcgggagtcggcggctccgcgcccaggccaaggtgtgtctccagtctccacgctccagagaccacatctctctctctctacatggcgacggccatctcgttcccccgcgcgccgcttgtcactccccgcgcgtgcaccccccgccggcttgtccacttgtcggcggcgcgcgcctctcccccgcgcggaggagggcgcgtcggtcgccgctccccgacggtccccgctgtagcgggagcctcctcctccggcttggctccggacacaagcgtgccggcgtgggacgctctcggcggcgtctccgtcctcgccgcgggaacaggcaacgctgtggcgctgacggacctgtgggactccgccgagggggtggctgtggttgcgctgctgaggcatttcgggtgcttctgctgctgggagctggcctctgttctcaaggacgccatggcggagttcgactcggcgggggctaagctgatcgccatcggcgtcggaaccccggagaaggctcgcatcctcgccgaccggctgccgtttcctatggactccttgtacgcggaccccgagcgtaaggcttacagtgtgcttggactgtaccatggtctgggtcggacgctcttcagtccagctagtgcaaagatatattcgaggctcgactacatcaagaaagcgacggagaactacacgctggaaggcacgcccgccgacctca

SEQ ID NO: 52461 - DNA, 784 bp, Zea mays
  Clone ID: MRT4577_147844C.1
tctctctcctggcgacggccatctcgttcccgcgcgcgccgctggtcactccccgcgcgtgcaccccccgccggcttgtccacgtgtcggcggcgcgcgcctctcccccgcgcggaggagggcgcgtcggtcgccgctccccgacggtccccgctgtagcgggagcctcctcctcctcctccggcttggctccggacacaagcgtgccggcgtgggacgctctcggcggcgtctccgtcctcgccgcgggaacaggcaacgctgtggcgctgacggacctgtgggactccgccgaggtaccactgtcttcctccgtgatctgcggccggtcagtggccacacagcgggacggccctgccctggcctgccttccctgccgtcgtatgctgacgccgccttgcgcttgcgcgcgcagggggtggccgtggttgcgctgctgaggcatttcgggtgcttctgctgctgggagctggcctctgttctcaaggacgccatggcggagttcgactcggcgggggctaagctgatcgccatcggcgtcggaaccccggagaaggctcgcatcctcgccgaccgggtatgtggcctcgtgctgaaccctctatatgtgaaggcttgaagctactgaaagtctgaaaccttgccgaaaactgaatctctgaattagtgcgcgttgcagctgccgtttcctatggaccccttgtacgcggaccccgagcgtaaggtgccagtacagtgcagaagggtctcagcttttggaatttcaagtgttttggggtgcgcg

SEQ ID NO: 52462 - DNA, 1084 bp, Zea mays
  Clone ID: MRT4577_147845C.1
gtcttagttcctgagatagaaaccgaagtggtcaaggtgatatccaagattagagaggcaggccaaagagcaagacatgaagctgggggttctcatagtaagcagaggagagatagctcaacgaatccgcctgtaccgtatgttgctgttcacatgagaatagaaaaagattggatgatacattgcaagaagtgggagcagcggtccaagtcacatgaaatctgcagtagtaaagaagagatcattcataaggtctcacagatcactgacctacgtcggccggttgttgtttatcttgcggtagctgacagccttcttgaagacgattcaataaccagtgggtggagagtgggtatggttgcttacgagaagaagaagcttggtgttactgacatctacgatcgtcagccatatcttataaagtctgccatcgacttcgaggtgtgctcgagagcagacgtgtttgtcggcaacagcttctcaacattctccaacctcgtagtgctgtccaggacagaaaggctgtacaacctgggaaaggcgagctcgtgtggcgagaacatcgggctttcgtcgtatgcgtacaatgtcatgggcgacgatggtggaccacagagatggatgacagatatgtcggacacaagcctgcagaggttaagttacggaacaaataacgtctcatgccactgactttgacgcatagcaaacttgactgaacatgatgtatacctgaggaagagtccttgcccgacttcgctttttatcggcaaaggaagcaagtatgtgcagctaatttgacgtgcttctgtgttcgaagctagagcccacatgtcgcacttgtgaaggactatggccaagagtttagatgtgcttaaaagcgttgacagtgttgggcagtttgtagtttgtataacgctgaatgctgcgcgatggcttttacctgggacccttttgtttttttatggtttcagaatcagacctacacattcaagtgtattttgttcacatgcagcgtgtgtgtttttaagatggtttgctgtgttctgactttttttattccaaaaaaaaaaaaaaaaaagcggcc

SEQ ID NO: 52463 - DNA, 270 bp, Zea mays
  Clone ID: MRT4577_147846C.1
aaataatactgagacaaaaaactacctacagggggtctattataagggaccggcgagaaatacattatgctccgaacaagcatatcggtgctacaaggtaaaagacacatgaaactagtccctacccagcgcaccaaagtgtgacacgacattagacataaccaggaagacacatgtttaccccttcactcgaggaggagcatcaactcggagggttgcacctgaaatgacgggctccaggaactcgaaaaactcttctaggagagctac

SEQ ID NO: 52464 - DNA, 2437 bp, Zea mays
  Clone ID: MRT4577_147847C.1
aactcgggtcacgaagtccgtcccattcccatccgcgcggacgtctcctcacgcaacctgtagccgagaccctgtcacacgcttccgatctccacctcctccgcggttgccggccgacctcttccccgccgcctccgccgcgcctcggggcaccggacccgtctccaacccctagatctcgcgccccctccgccccgccggccggtggtcacgccccgcctctcccgccgccggacgagctcgccgtggagcggagaggtcgccgccggcgacaggagccacgcgatgtccagggaatcctgccctttctcctcgccgcagtccttggggacccatccgtgctaacttctaccgttggcttgcagccttttgtatcgagcatgtgctaaattgggcacgcagaaatatcatcaagtatgctgatattaccgttccgaaacatcccaacttgccagcattggtcggggtaaatttgtcaagttatcaattgaagtgtgcttggttattgatttccattaaattgcagcatagcttgctcttcatctgaaagttttcgagggtagatgtttatcgtgcaccatggtcgttggtaatgacatagttgacatggttgggtgctaaaaggacgagaagggtttgaataaacggtccgatgaacattctacttgagcttaagcatctcaagctctttagcatgcccgcaagacctgtcatctgtaaaggccttctgatagtgattgcccttattttgttgagagcaattgtatctccttttcttgctatagattcatctgagaagaaagaattttacgagtccacagcccctgacttgcttcctagaattagacgagacaagtttcttgaggtcccacagatcatatgggggttgaacaatcagaagattgcattcgccagagcatgcttgactgcaagattcctgaacagatcccttctcatgccaagcttgagtgcttctctcttctacaaagaggttgacttgctgcagcctgtcagttttgacaaagtgtttgactttaacaagttcaatgcgcgttgccatggcttcgtaaggttagctcagtattcagaagtttcaaatcggacagagcccttcaaactccaaaaggggaccggtagaaggtggacggcagacagagatttggattaactacagcaatccataggcagcaatgtggatgactctgaagtcattgaaattgttgggaaaaatccatttctgtggcctgaccactggccagtcaaagactatgccaaaatctttgattgccttgtcttagttcctgagatagaaaccgaagtggttaatgtgatatccaagattagagaggcaggccaaagagcaagacatgaagctgggagttctcatagtaagcagaggagagatagctcaacgaatccgcctgtaccgtatgttgctgttcacatgaggatagaaaaagattggatgatacattgcaagaagtgggagcaacggtccaagtcgcatgaaatctgcagtagtaaagaagagatcattcataaggtctcacagatcactgatctacatcggccggttgttgtttatcttgcggtagctgacagccttcttgaagatgattcaataaccagtgggtggagagtgggtatggttgcttacgagaagaagaagcttggtgttactgacgtctacgatcggcagccatatcttataaagtctgccatcgactttgaggtgtgctcaagagcagatgtgtttgttggcaatagcttctcaacattctccaacctcgtagtgctgtccagaacagaaaggctgtataacctaggaaaggcgagctcatgtggcgagaacatcgggctttcatcgtatgcatacaatgtcatgggcggcgatggtggaccgcagagatggatgacggatatgtcggatggaagcctgcagaggttaagttacggaacaaataacgtctcatgccactgactttgacgcatagcacttgcctgaacatgatgtatacgtgaggaagtccctgtccgatttcatttagggcttgttcgtttgtgtcggattgcacccggaatcgttccaactaatcaaagtttatataaattagagaaacaatccggttaggaatcgttccgacccatcaatccgacagaaacgaacaaggccttatcgacaaaggaaacaagtacgtgcagctaatttgctgtgcctctgtgtttgaagcacttgtgaaagactatggccaggagttgtctgttgatagttgtgcttaaaagccttgacagtgttgggcagtttgtagtttgtataaagctgaatgctgtgcgatggcttttacctgggacccctttgtttttatcgtttcagaatcagaccttaaacacattcatgtgaagtgtatttgttcacttgcagcgtgtgtgttttaag

SEQ ID NO: 52465 - DNA, 460 bp, Zea mays
  Clone ID: MRT4577_147848C.1
atctttttatcagctgggcgctcactcttgcggctgcacccttcactcagtcttagctctaggctctagctaagccactccttcgcgtatccaccagcctagctcttcgccaccaatggccactgccgaggtccagaccccgaccgtcgaggcggccgaggaagcgcccgtggtggagaccccgtcgcctgacgatgagcccgaggagtatgcccccgtcgaggccgaggcctaggctgctgctcctgctgatcccgaggagcttcccgtggtcgagcagcaggcagctcgccaggcagaggccgcggctactgctgctgccgaggagcccgacgcggccgaaccggacagacaggcggaagcttgtgctcctgctggtcccgaggagactcctgcggtcgagcaagaggcagccgtcgacgaggaggctgctgctgctcctcctgctggcgccgaggag

SEQ ID NO: 52466 - DNA, 361 bp, Zea mays
  Clone ID: MRT4577_147849C.1
caggagatacaactctactggaaatgaaattaggcagttcaatacagaacaagattccctgacaaatgggggtttacctgcaccagcctatctcatgctcaaatatgggttcaaaccagcaggttggcgtgcccaaaatgatggtgaaggcaatgatgatgggttcttgaaatatatatcaagaagagtcattgctatatttcttaaagtactctcttttttgcggttcttcattcgtcgacgacaacacttggccaatgatcatccacatactgcaactgcacccagtaatctggcagatcttcagacatttaaggaagatcgtgtaaatccttgcctggaacggcttgataggcttgag

SEQ ID NO: 52467 - DNA, 629 bp, Zea mays
  Clone ID: MRT4577_14784C.1
cgttggtacgcgtcggaaacgataaaggcggcggcagcagcaagcatgacgaggtcgcgagctgtagtgacgttagtgctcctgctggccgtcgccacggcgagctgcaggctgtcgctcgccgccgacgagaccatcgcggccatcttgggccgcgacctgcgggggttcatcgccagggccggcaacctcttcaggtcggacggcggcgcctggcgcgccgcgaacctcaccgccgccgaggcgaagaacctgagggccgccaggaagtcgtcctccggcggcagagcgggctgcgtgagcgccgcggcgtgcgggaagaggcgggtgttctgcggcaagaggtgctctgacgtcgcctcctcgcgcgccgccagcctcagccacgtcccgtcgcgatgcgtcgtcaagtgcagggagtgcgtgcccacctgctagatcctcggcccctctcttcgttcgttctgcgatgggtctccactccactctcgcctcttggtgctcagcgcatatgcaggcaatgcagctccgactccggtccacacttgtgtatcgtaggttcagtcatcagtggaataaaataaaagatgcagagactgttccacaaaaaaaaaaaaaagggcggccgc

SEQ ID NO: 52468 - DNA, 1538 bp, Zea mays
  Clone ID: MRT4577_147850C.1
tcgcgaggatgtttacagtaatcgctgtcctaagccccgaaagacgctcttcctcataaagatgctactatttattatgcgccaagttgctcaacatcaccaaaaccaagggctccagaatgccactggcgcatctgacattgctgaggacaatgatgtggcattggccctggctcccggccgggacacacggcccaaaatagtcttgcaaagtccaaggaaacgacgggttcacagccgctgcgctcaattgaccctcccctcgccggcgtccggcgatcgccggcatccgagcgatggatcacccatccacgtgatggatccgacagctccttccccggccccccctgcgggcgatggggcacagccatcggaccagaaccggcagcgaccaaggtctgcactccgtggcgccctcggggtggccttccccatcgtggtatcgttcctcttctccttcctcgttgggctcgctgggctcgcgcttggtggcctctcgtccactgcatcggtctccatgccctccacctgccgcatcctctccagtggcgttgaccttaggtcatcaaaagtttgcgagcttgggttattgaactatagagctaagcatgtcttctacccatcgagtaagaggagattccgctgccatgatgactactactgggcttcagttttacaggttgaatatacagaatatttttctggccaattatcttatgcagtggccgaggccccgaaagaggctcttcctcataattgtcgacctgattttggtgctgcttggtcaacaacattaaagttcaaggtcaatgaatcgtacagctgcagatatatgctaggtagtaacaaggctgatattcactcgaacaagctattcaattgtactgctgaggaaccttcgactggggagcttttcaaaaggatacttatactgttttcagagatgtatgtgtcagaagatttcagttcagggcgaatgcttgctgatattcggcagcaggtgttgttctgggcatgctgagttcgatgttcattacggccttattcagaggtatgtatgggttgttgctcgctgccgccaggtgggctgtgaggaagcattgcatcagagtatttgccagccggttgaagcgtgcctgccttcttgtcgcctatgtatccgctgttggctggatcaccttgcagtacagcaaatttatcgggttgaaagaactcctgtcggattctgaagtcatggagaggttcttttaggctgtagatgtattcgccggtgtatattgtacttgtaataccattcggttatttaggaaggtttcttcttcttctttttgatgtgaaaccaatgctctgttgtacgagtatgtacatgccagttgccggctacactgctgctctgtcacaaacgtgttgttcatgccacattttatcagggacagctagctgacgacctgacgcctcagacgatgcatccttttttctccttgggaaatggatggaattgtatgttgcaaacgaaaaaaaaaaaaaaaaaagcggcc

SEQ ID NO: 52469 - DNA, 481 bp, Zea mays
  Clone ID: MRT4577_147851C.1
aagcagtggtaacaacgcagagtacttttttttttttttttttttttttttggcgacgttgttatgtataagtttttttttactcatcctggtatttttaaccacaacttacacacttgcaggttatagactgttacattaatttgataaaagctcaaaagcatctaaagtgccgatctggaggtcgcgttcatatagaaaatgctttccagttcaatttcctgaagagagatggtgatgttgaaattaaaacagaagagctatatccaaataaagacatgacacaaatatgtagcgctgaacgaagggtgttactttacttagaccatgacatggtacatatgagtttgcaatctgaacatttagtgtatatatgtattttattcttatgcaagtatttataactgttttgtaggtgtttattccgataaacatccgagagacgcactggtcccgcgtactctgcgttgttaccactgct

SEQ ID NO: 52470 - DNA, 316 bp, Zea mays
  Clone ID: MRT4577_147852C.1
ccacaagcgacgcctaacgattacagctagccaagccgtattcttgtgcagctacggagcattacgagtcctgtcttgatggaagcaatgatggctgccaaggtcctcctaactccttgcttccggttcaagaaggtgcccagaaccttggcttctttccccttggcccaacaacaacgtctgggtaatttctggcttggttgaagaaccaagcccgttgacaagaagaagggtaacttgaagcgctttttcaatggcaacggcgggccgtcgaacggcgtcttgtcgtcctccgaaagaatggttcttgacacct

SEQ ID NO: 52471 - DNA, 1765 bp, Zea mays
  Clone ID: MRT4577_147853C.1
ctggccggacggccgggagtctatgatacctttacagaacctaaccaccattgccaggcagcatatatagctagattgcttctgatcgattgttccttggcttgaccagcttcacaacacaaccacggtgtcgtgtggtcgtcttatgcaagaaaggccagggccactgcgcgcttcaccagagagagcaaggctacaaccaagaggtgtgctggaattatacatctccaaaagctagctagaagaccttggtgggtggtgagcttggaggaggagctcatggctgcttcttcctgcatagcttgcaataatggcagtaccgatgagaaggaggagaagcggaagtgtgatctcgtcgggtacgaagcactgcctgagtggctcaaggacaacgagttcatccatggctactaccggtgcgagtggccgatgaaggagaccgtcctcagcatcttctccatccacaacgagaccctcaatgtttggtcgcatttgctagggttcctgctgttcctgtgcctggcaatctttacagcaatggtgatcccaaggaatggcagcagcaggagcagtaacagcgctgcataccagctgggagatctggtggagatggccaacatgacggtagcgctgaggcacgaggcacttgcagcgtgtttcctgctgccaccatctgctgctgctttgtctgaagatggtcagcagcagatcccaaccagctgtccacccaacacttcctcctcccatcatcatgccatccagatccagagcagcactggtacggcggccaccgtggacgccggcaccgccgccgaccccatcacgcggtggccgctgttcgcgtacctggtcggcgcgatggtgtgcctgctgacgagcagcgtgtgtcacctgatcctgtgccactcggggcgcacggcgtacgtgacgctccggctcgactacgccggcatcgccgcgctgatcgtcacctctttctacccgctcgcctactactccttcctctgcaacccggcgctgcagcggctctacatgggctccatcacggcgctgggcgccgccgccgtgacggcgtcgctggtccccgcgttccaggcgcctgagctgcgcccgctccgcgccgcgctcttctcctgcatgggcgcgtcgggcgccgtgcccatcgcgcacaagctgctcctctacggcggcacggcgcccggcgccgtagcctcggcggggtacgaggcgctcatgggcgtgctctacggcctcggcgtcgccgtgtacgccgcgcgcgtccccgagcggtgggcgcccgggaggttcgacctagtcggacatagccaccagctgttccacctcttcgtcatcgccggcgcgtacgcgcactaccacgccggagtcgagtacctcaagtggagggacgtcgacaaatgctgactggactggttgctcacggcgtaagcaatgcttgtgctgcggccttgcttgagaagagatcttgtgaaactttcaaagaatggcaggtgggtccgaccgatatatacctggtcggtggcaaagttcatggagaggtttggtgagaggattatgatgtgtacctaattagtagtagcagtagtagtagacaatacatcgaggttactttttgtgcactgattgacatgaatgggtgtaaacaaattattattgtatctcatatttaagtattattacgtggctgaacaccacacgacaatgttcagcctcagacttcaagtcatgagatacagaaatattcttt

SEQ ID NO: 52472 - DNA, 240 bp, Zea mays
  Clone ID: MRT4577_147854C.1
ttttttttttttttttggccacagtgtgcaggcacacaaatcactaaagaatcgcatcacaatcacccattctgatatgcgtgtatgaaatttgtagcacaagcaaggagggatcgggtacacgaacgaaccaactcaccagatttcttttctttcggcgaagtaattcttttcttgacacgctcccccgcccatgtatttcatggctctgtgaccgccatctccatcgccactgttacc

SEQ ID NO: 52473 - DNA, 338 bp, Zea mays
  Clone ID: MRT4577_147855C.1
agcagttctaatctcacagcatgctaaacatcacggagcaagcctcactgatcgtgcttctcgacatggtggccctgctgtacgacgatctgctgacgcaacccctgcataaggatagggaaggcagcgaacacgatgacaccgtctacccatacatcgcctgcatctgctctataaccccgttccaggaggtgtacacgttcaccgccatgcgggacacgtgcaattacgctatcatcgacaacctggcacgtctgaacaatcacttggacacgttcagcatacgcaccgctcaggcgcgcatgcacgtcgcgaggccgatcactaccatcccgacg

SEQ ID NO: 52474 - DNA, 160 bp, Zea mays
  Clone ID: MRT4577_147856C.1
caatagtcaagagtatttttcttccctctgcttccgcgactcaaaaacaatactcttgactattgcacaggcttagtccaagaggctgaagcctgtgcgatagtcaggggcttgctgctgagtcgcggaagcagagggaagaaaatactcttgactattg

SEQ ID NO: 52475 - DNA, 1911 bp, Zea mays
  unsure (1)..(1911): unsure at all n locations
  Clone ID: MRT4577_147857C.1
tgcttgtttgtctatgatgctctgattatctttactgaaccaacggaaaataaagtaagcaagatatttatgtgtagggcgtggatatcaaatggcttgttacacgaaaaaaaaaaaaaaaaaaaaaaaaaaaaaaaaaaaaaaaagaagcacaagcgcagacagattcgaaccggagaactcgatctgatagcagaagctttcttgtctcggcggaatggcggaggagaaggggacgctgcaggcgatgaggggctgggtcgtggaccacaagctgcgggccgtagggacgctgtggctcacggggatcgcgggatccatcgcctacaactggtccaggcccggcatgaagaccagcgtcaagctcatccacgccaggcttcatgctcaggccctcaccctggctgccttgggttgttctgcgctggtggagtactatgatcaccagtcaggctcagggtcaaaagttcacgactatgcgaagcagttccttccgtcggacagaaacgccaaaaaggactctgtgtagaagaggcagcaaattatgatataggcttccattagctgatatggaattcgttgatgttattttctgagcaaacaatctggcatttcacatgccgttatccaagttctgcaggcttcctgttctctgtataagctactgaaccagcatctagatgcagccgtatgcaaatccgtggtgatggaaatatgtactttcctgaaccgcgcatgaatgttaatgaatgaaatgtttctctatgaaaaaaaaaaaaaaaaaatcgcaatctcgagtagccgtcccaatcctcgatctgttctcagaccctcctccgtccgtcgcagctccagatttccttccccatggctcccgatcaagatcggcatcaatggtttcggccggatcggcaggcttgtggccagggttgcgctccagagccccgatgtcgagctcgtcgccgtcaacgaccccttcatcaccaccgactacatgacctacatgttcaagtatgacactgtccacggacagtggaagcaccatgaagttaaggtgaaggactccaagacccttctcttcggtgagaaggaggttgcggtgtttggctgcaggaacccagaggagatcccatgggctgctgctggtgctgagtacgttgttgagtccaccggtgttttcactgacaaggacaaggctgcagctcacattaagggtggtgccaagaaggtcatcatttctgctcccagcaaggatgctcccatgtttgtctgtggtgtcaatgagaaggaatacaagtctgacatcgacattgtctccaacgctagctgcaccactaactgccttgctcctcttgctaaggttatcaatgacaggtttggcattgttgagggtttgatgaccacagttcatgccatgactgcaacccagaagactgttgatggtccttccagcaaggactggagaggtggaagggctgccagcttcaacatcattccaagcagcactggtgccgcaaaggttagaaactggaccttccttttcccagcagcgaaagggcatctagctgagttggttaggtggtctgagtagcactcctcaggtcctggtttcgactccccgtgggagcgaatttcaagttgtggttaaaaaaaccctcgtctgtcccatgtcaaagcacaggtctaaggctcagccccggttgtggtcgttctcacatgggcttcgatgccgctgtgtatgggtggggcagggattcggggggagggggagttctcgacctgtgtgagaaggtcttcttcttaattcaatgcccggggagctgtcttacccctcgcacgtctagttttttttccttgtggcccttttaacaacatagtaattantgaattgcccttcgtggctttgcatgg

SEQ ID NO: 52476 - DNA, 424 bp, Zea mays
  unsure (1)..(424): unsure at all n locations
  Clone ID: MRT4577_147858C.1
atttttctaagttcgctacctgggagtgcaatacaaatagtaggcgtcatggcgagcagcaccatggccctctcctccaggtncttctccttctcggccttgtacgtgccgtcgtcgtccgccttcggcgaagttcctcctctccatgcgcaagacggacgtccaaacgcctagccagcgtcgttccagcgggagcccgcgttacggccccgaccgcgtgctgtagctgggcccactgtgcnatgaggcaccaagctaccttcaagggcgagtttcttgtgcgactacggctgggacaccgcgggtttgtcgcttgacccacgagactttcggcaagaaccgggagcttggaggttatccactcccgctcgttcagctgggcgctctgggatgcgtctgccccgagctgctcgccccgcaacgg

SEQ ID NO: 52477 - DNA, 1427 bp, Zea mays
  Clone ID: MRT4577_147859C.1
cacgcgccgcgcgccgccgcgtcggcgcgccggaggctgcccatcgtcgtgcagttccacggcggcggcttcgtcaccgggagcaacactgccgcggccaacgacgccttctgcaggagggtcgccaagctctgcgatgccattgtcgtcgccgtggggtacaggcttgcgccagagagccgataccctgccgcgttcgatgacggggtcaaggtgctcaagtggatcgccaagcaggccaatctcgccatgatgaccaaggtcgggggtggtgttgacaccttcggtgcatccactgttgagccgtggattgctgcacatggtgatccagctagatgtgttctacttggtgcaagctgtggtgcaaatattgctgattatgtcactcggaaggtggtcgaagatgggaaaccgtttgacccggttaaggttgttgcacaagttctgatgtatccatttttcatagggagtgttccgacacactcggaaattcggcttgcgaactcatacttctacgacaagtccacatgtttacttgcttggagattatttttgtcagataaagagttcaacctagaccaccctgctgccaaccctctggcgcctggcagaggaggccctccactgaagtgcatgccgccgaccttaacggttattgccgagcatgactggatgagggatcgagcaattgcttactctgaggaactccgcaaggttaatgttgactcgccggttcttgactacaaggatacagttcacgagtttgcaaccctggacgtattcctaaaaacaccacaggcgcaggcctgtgccgaggacattgccatatggatgaagaaatatatatccctcagagggcatgagttctcatattagttgtagcaaaaaccatgcattgtgaaataggccctttgcagggaagcgtcaatgtgttcttttcaactggtggaaagagggatgttggattgcagtcgggtaaaccagctagcttaatgctgagtactgagtcctttaggccctgttcggtttcaccggaatagaccaggatttattccagctcatcaaaatctatataaattagagaagtaatccggctaggaatcaatccgaggctcaaatccataacaaccgaacagagccttagtgatttttgtggaagaatgtagtgtgcaaagttgtagactgtaatcaaaagatactcttccccttgtagagcttaattctttcattccttttgtaccctttgtgtattttggaattactggtgctgggggttaccattttttgagaagaaatagcaatctcagtggccatacttgtggagcactgagctccacacaacgacatgtaacctgatcgttcattttgttccgcgtagcgtatctgcttatatcagcatgcatcctttttgttgaacattgtatttt

SEQ ID NO: 52478 - DNA, 180 bp, Zea mays
  Clone ID: MRT4577_14785C.1
accacgtaattccggaccagttcttgctagagtgacactttttcctattgggagtagtattattttttgccgggggctgggtgatatctgtttcctgtgcaaaattgaaatccgttcaaactcggaaacataatacgtaaccgcatgcttaacctaaaaagcctgctaactcctattaat

SEQ ID NO: 52479 - DNA, 310 bp, Zea mays
  Clone ID: MRT4577_147860C.1
gtaccggcccggacttaattaccggctgcgccagcacttttttcggcggccgaccgtccttagaggcctgaccgttttttttgagtggcatccaaaggctggtccaatgagcaaaggaggccacacgttccccgcgctaaaatctaagacgccacggttcagccctctcgcgccgtccatcggcccaccgatatggtggccgattactacaaagtacttgcccccccccgcggagacctctttgactacctccccttggcctatccaccgctcgcattgcgaccgctccccgacatgttctctaccttta

SEQ ID NO: 52480 - DNA, 247 bp, Zea mays
  Clone ID: MRT4577_147861C.1
gggggcccaacctttttgaattaaattttgaaatgcccccttaccctttaggggggttaaattaaaggtgggcttgaaacaattttggaatcctatttttgttccaaaataatttttcttttctggggggacaaaaccggggtttcccagttgtattttgggcacccccctccccttttgggtgccccagactttacccccaatgggggaatccctgggggtcttttaacatgtttaaaaaagcaaa

SEQ ID NO: 52481 - DNA, 693 bp, Zea mays
  unsure (1)..(693): unsure at all n locations
  Clone ID: MRT4577_147862C.1
gttgtgtggagctcagtgcttcacagctggcaccactgagattgatatttcttctcaaaaaaaatggtaacctcaagcaccagtaattccataatgcacaaatgatacaaaaggaatgaaagaattgagctctacaggggaagagtatcttttgattacagtctacaactttgcacactacattctcccacagaaatcactgaaggagtcacattaagctaactggttactcaactgtaatcaaacatccctctttccaccagttgagaagaacacactgatgctccccggtgaagggtctatttcacaatgcttgatgatttttgctacaactaatacgagaactcatgccctcggagggatatatattttttcatccatatggcaatgtcctcggcacaggcctgggcctgtggtgtttttaggaacacatctagggttgcaaactcatgaaccgtatccttgtagtcaagaactggcgagtcaacattaaccttgcggagttcctcagagtaagcaattgctcgatccctcatccagtcatgctcggcaataactgtcaaggtcggcggcatgcacttcagtggcggagctcgtctgctaggcgccagagggttggcagcagggtggtctaggttgaactctttctctgacaaaaatagtctncagcaagtaaacatgtggacttgtcgt

SEQ ID NO: 52482 - DNA, 199 bp, Zea mays
  Clone ID: MRT4577_147863C.1
acgcttacctactcctactttctacataatatttcttctatagtttcccctacatacaggccggggatcttaaaatgacaacatcctctctgataaatactcttttatacacattacaacactgtcatacttcatgctctttcatctagctaaagatacaactatgaacccagtacttatcacattatcaaacaccatc

SEQ ID NO: 52483 - DNA, 468 bp, Zea mays
  unsure (1)..(468): unsure at all n locations
  Clone ID: MRT4577_147864C.1
acactttttgttttttttttnttttttttnttttttnttgttatccgaattatgtaataggtgaacattatcgattatcttattttgtagtaatgttgaacatgcgcaacacatgtgccatagccccatacataatccggcggataacagggcaattacattgataggatccaaacctttatggttcttgtggaagccgaggacctttgttacacagcagcaaacctggaaatcatcaagcaatttttcacaggaccaagtttataatggcgtacaaacccacaggagtaggcgagaacatgaggggggatcatgaaacacgtgatggcgagtgactgcgcctagcgtgcccgacccttgaactgatcaaaactgatttcacttgcatctgtagccaggagctccaactgaaggccatggagcccactcttgaacttttgggtaggagcttgcgtaaagcatcttgct

SEQ ID NO: 52484 - DNA, 375 bp, Zea mays
  Clone ID: MRT4577_147865C.1
ggctagttctagagcgcgtcggcgtcgccggacctcctgccgatcaagaagggaccgcagcagccgccgcagccgggcccgcgcggcaagatctaagctcatcgaccagctccggcctccatttgcgttgcatggtctagtagtagcttgctttgcactgctagctcccggtcggtcgcactctcaactcgccatggatcatcatccctgcctgttacgctgttcataactttggtatatttgtgatgctgatattgagtactcttttggcacacaattaaaagagccttttagccgtgtgtccataagccttagataagtttataaaaattttcaaaatttttcggtccattgaaatttatgaaacaaaataac

SEQ ID NO: 52485 - DNA, 1050 bp, Zea mays
  unsure (1)..(1050): unsure at all n locations
  Clone ID: MRT4577_147866C.1
agcacctgtaccgctagtccactacaggctacaccagcgattggtgcggcgaagcagaatcagtaacggacctagtggcacaggtttacagtagccacccccaccccttcgaggacggaaggcgcgaccgcgagatggagtccaggacgcccacaaagccgcggccgtcgcccaagaccgggaccggcaccggcatcgggagcgtcaccccgccgaagtcgtccccgacgctggatgggccgtcgctgccttgctctccgccgccgtgtttcccccgccaccgccaagcgccgcgggagcccgctcaagtcgatcgcgtctgcgcccacggacgtcgacgcctccttcgaccgctccatccgctcctgtcgccgccgtctcctcaagctcttcgcccgcctcgacgaccttggtagttcgcgcgaactgcgcgctgcctccgaggcggttctgcgactccgctcctcatcggctcctgcgactccgcctatgcctctgactctgccttcacagaaccacgaggacatcgttgcaagcgggcgcccatgatcccgagtacaggcattacgatgatatcaaggagctcccacctcaccgcttggctgaaatcatgcgcttcttcgaggactaccagaagaatgagaacaaggaggttgctgtgaacgactttctaccagcgagcgccgcttatgaagccatacagcactctatggatctgtatgctacatacatcgttgagggcctgaggaggtaggattctgatggctaggaaaggtggggaggatgttgacgaaaaactaaaactgggagaccatttaccgcatggaacgagtaccgttattattttatttgtgtcgtgtatactgctagtagtgaaccctcaatcaaagaccgaaatcccctggggagtcggagtcgggagtagctgaagctagtaacaaggttggcgaaatattattttctggcctgactgcctatatatgttgtacgtgatgggtatcgtaataatcattcccctttgtgatnntnnnnnaaaaaaantaaggntgg

SEQ ID NO: 52486 - DNA, 180 bp, Zea mays
  unsure (1)..(180): unsure at all n locations
  Clone ID: MRT4577_147867C.1
gctcgttcccccgtacgtacgtgacctgttttaattttatcatcaggcgtctagagcgtgttctttctttgattccgtatattgattaatatataatgacctgcaattatgcacatacatactgttctaatcatttatttagacccttgagcttactagctttnaaaaaaagcctgttgc

SEQ ID NO: 52487 - DNA, 564 bp, Zea mays
  Clone ID: MRT4577_147868C.1
tccaccgcggtggcggccgcccttttttttttttgtttggcaggagcaggcacaggcgttccattctgcatgaggcacccatgatctgcgggtccgtgaattgagtacacagatgctatccctatccattaacaaaccttgacaatcacctttgaaggctgaggcttgagtctgccaaaattaacgaggcggaactgatagggttgtcaattttgtgctggtggtataagaacatgggccccaaaaaaagctacatcacaagtttgcatggcaagcggtgcattatcttcctactttttatcatcaaggaaagcaccgctgtaaaaccacacagtgcacaggcgcactggaataattgatgagcatctatagggccccgaattccatcatgagtagcctggttactgaagagcgcactgtactctttggggtgggccaggaatttcttgatcctcctcgtaagcctcctgagcagcatgagcctgcttcctgcgcatctattcctagatgttagggacatcatgcatgagtcgcctcgcctgcattcatcgtatctacatggct

SEQ ID NO: 52488 - DNA, 391 bp, Zea mays
  Clone ID: MRT4577_147869C.1
atattagcgcctatagcaagcgggataggaaataacgagactgatgcgctgctctcatgtgatttcttgctcctatgagccgtattgccaagcaggagatgcttgctactggcatcggagacctgattcgtgcgttgtcaaggaggagatactacaaccacgagtgtctctgtctctgttcgaggacatcgaccagacagactacctagacgtcgaccggcggaaccccggcatcggtgccggcctcatcacttatgttcttaccatgactggttcgacgaggtttgagacacctcggtgctgtagaatcatacgccgggcagcatgtgtcgttacaagatcggaccgaccaacggcccctagctccggcgatttcaggttattgatgccg

SEQ ID NO: 52489 - DNA, 828 bp, Zea mays
  unsure (1)..(828): unsure at all n locations
  Clone ID: MRT4577_14786C.1
catttcccttccccatctccgcatcttcctcgcctccgtccccgatggctcgcctgctcgcgcaaagcctagcccgcccctctccggccaccgcctccctcctcccgctgcgcgggctctccaccaaggtcgagctcatcgagatcgacctcgccgaggaggacccgtcttcggtcgaggtcgtggggatccggcgcatggaggaggccatccacggcgtgatggtgcggcgggccacgcccgagtggctccccttcgtgccgggcgggtccttctgggtgccccctgtgcgtcgcccccgcggggtcgccgagctcgtcggccggatcgcggcgtccggggtcggcgaggtgtcgtacgaggcggacccctacgtccccatgacggaggaggaggtgctctccctttcgaccgcccgggggtggccatcggcggcctacttcgtcgaaggtgagcgggacgagtgaaccgagatcagatctcgtggttgcgtggattattcgatcaaacgcaacgtactccatccgtttccagatttccttgtggaattagacgatgggctgtcagatttatgctgtatctgctcaacttggtaatcgcattcaggctgacagcatcggtgaagcgcaccggaaagcggttgagccattgcgcatctcgcatggtgttgccgttgaatgtgttcagtttattggctatatgtttgttatgagatgattattcaccttcagccgtctctggttgaagattattattaagtgaaatganaggtggtaattaacggntggtggtctggaggatattctgaatctatatatatagcaccag

SEQ ID NO: 52490 - DNA, 664 bp, Zea mays
  unsure (1)..(664): unsure at all n locations
  Clone ID: MRT4577_147870C.1
gttgagnaacttgcaactatacacaatagaatgttcttcgaacctcaagctgcagctcttgctccaactattacttgcctactttgtttttcctatcagtaatgcttgctgactcattgaaacaaaccagtctttcctttgtttggttttacattttgagagcttttcttaaaaacaaccggaggctggattggttatgtgcaaaactattatagaggccggaataaaatttctattttctaagaaaatagaaataaaccaaatacgagtccgagtccgactatgtgcaatgtacaagaatatcttaaaataagggagatactatcctacaagtgtttggttttcattttttcatgtttattatctatatgatcatgactcatatggctcaggtcatgttatctattgtagcgtcttcttgtctccctcgacattgcccgtctgcttccttgcgccttgcttgtgctgtgggctcccttgtctcgcctcttttccagccgtggccaattgtgtccattgctgggtttgccaccaccttcccgtgtcaaggcaaacccctccatttcgagcacgttccaaacccaaacttcacattgccttcttttgagagctacgtaaggatccaaatttgaaactgaccaggtcctagccgtgctgttctgct

SEQ ID NO: 52491 - DNA, 432 bp, Zea mays
  Clone ID: MRT4577_147871C.1
gtgctcttacctttggtgtgggggggggggggggggggggcacctcctatttttaacttgttttttttttttcctcttgtgcccggaaaaaaaaacaacacccttcttcgtggtgggggggttccccccgatgctaactaaaaaaaaaaaacaacgcccctgcccctctttttctctttagggggggtgttaggaaggtttttttagggaaagaggggaataccttccctgtgcccccccgaaaaaacacccctacccccgagggggggtgggggtttctaccaaaactcccaacaagggggggggggggggggagtgctttttcgaggttttcaatccctggcccaggaggaccccgaacacggttattgccctctgtggcccaatccccccctgtggaaccccgacggggaaaaccggccctttttttcc

SEQ ID NO: 52492 - DNA, 284 bp, Zea mays
  Clone ID: MRT4577_147872C.1
agcacggaataacggctcgagagaccgtaaccgaagttcggttttggcaagcagaacgggaaactacgggggggagaaaaaccacacgggggggcgaacacacccacacacacaaagaacaggagcaggatcaggacagaagggacccgaaaacgggagcaacaaccctcagtaaaccgaaatggaaggccacaacggggagacaactggggcgcacaatggaaaccgggacaaaacagacggaggaagacggagacggcaaccagcagcgtagggaaccacca

SEQ ID NO: 52493 - DNA, 374 bp, Zea mays
  unsure (1)..(374): unsure at all n locations
  Clone ID: MRT4577_147873C.1
atanttttttgaaacatgatcaactaccaagaacatgtgcatgagcttatgcaaagatagtcgagggccacaagcgggtccccccacgttgcgtcacaacagagcatttagtggtacgaaaacccaatcctatggccaaactgctaccagtcattccaaagcataagcttactcaaatcataaacacgcatgggaccggcccgattaggggttgaaatgacaaaacgcgcacgcttattggccatgttccgccaaatgggaaccgaggtctaaaaataaggtctcaagaggcagcaggatatgaggaatatcccataacgatcaggactaaccctaccggctcatgtcagggacgccatggaacagattgaaac

SEQ ID NO: 52494 - DNA, 201 bp, Zea mays
  Clone ID: MRT4577_147874C.1
aaaaaatgtcagcgtggttgaccttaagaagcataacaagcatgaaggatacctgaaactaggtcacaaactgacatcacacagtccattgaaagggttactggcttagggtcccgttaagttggctgtagtgctttgcagacgaacttccaacaggaaatgctctggtcgtgagaaaaaaacttagggacctgggaaatc

SEQ ID NO: 52495 - DNA, 383 bp, Zea mays
  Clone ID: MRT4577_147875C.1
attcaaaaacacaccaagcttatttttctagcaacaacctaacaacaatggggggcaagatattatccctccttgcgcttcttgcgctttttgcgagcgcaacatatgcgtccattattccacaatgctcacttgctcctagtttcattattccacagttttttcccaccagttactttaatgtccttcgaacacttatctgtgcaagcctataggctacaacttgcgattgctgcgagcgtctttcaacaaccaatttcctaattgcaacaacaattcttggctcatttaataattctaactattgcttcgctacattttaactttctttactatctctgatttacttagccttgtttaactctttctttctactttcttca

SEQ ID NO: 52496 - DNA, 414 bp, Zea mays
  Clone ID: MRT4577_147876C.1
cccacgcgtccgcggactcgtgggctcgaccagctcaaccctagtatggtctagccaccaggctatgctgacgtggaggagaagctgacgctctcccatcgctccgatcagaccgaggcttatattacaggccactgcatggtgatatataatctatctgctgccctgctttggaatggcatccttgtaggctgctaccgagatgttcacgacatgagttgggctggagactgcacggttcagactatagggactggtgaaatcggttagatgacgcgacgactgattgcaacgccacgccgtagccgaactgccatatgacggtactgccgtgctatctgattgatccattgttgtatacgctcgcatgggatctgaattgtcttgtatagtgacacgtcaatagactacact

SEQ ID NO: 52497 - DNA, 436 bp, Zea mays
  Clone ID: MRT4577_147877C.1
ccggttcggattcgacccacgcgtacgcaacaagcgacatagaaagtggaatacagaagcaacaatagagcaacaatggcggtcgagaagttaccatccttatgctgcttgctctatatgcatagtgttgctaacgccaccatttttactgattactgacaagctattatagctgtccttattcaccaaaacgttgcatgaatgaccgctgcagttcagatgaaaacccagaccttcaaccctacaggcttcatcaagcactcgcaacaagcaacttacctgtatcaccactgtacattcaacaattatcagccatatctttgcagcaaacattgctacaaacgatgactacactgcagttggatcaacttgtgctagcactgatcagacgcatatgtttggcacagcttaatgcctactatcagcagcaacggtc

SEQ ID NO: 52498 - DNA, 826 bp, Zea mays
  Clone ID: MRT4577_147878C.1
tgggtagcgtagagagagagagagaaaggaaaaaaaaaaacgcggcgcagaagccagaagaaccagcgagccaactcccaacctctcgcccgatctcgatctcgatctcacgggcgccgccgccgccagcgacgatggatccagagatgctgcggctggcgcaggagcagatgcgccgcatgtccccggacgacatcgcccggatgcagcagcagctgatgtctaaccctaacctaatgaggatggcgtctgagagtatgaagaacatgaagcctgaggacttaaggcgagctgcagagcaactgaatcaaacaagaccggaggatatgcgtgatatgaccgagaaaatcgccaacactactccggaggagtttgctgctatgaaggcgcaagcagatgctcaaatgtcctatgcgatgtctggtgctaagatgttaaagaagcagggaaacggacttcataaccagggaaagtattcagatgctgctagtaaatataagcttgctaaggataacttaaaaagcataccatcgtctacggcgcatactctgcagttgcaatgtacacttaatttaatggcttgttacttgaagacaggccagtttgatgaatgcataagtgaaggtacagaggttctaagttatgattcaaacaatgtcaaagcatattatcggaggggtcaggcatataaaggactcgggaagttggaggcggctgttgctgatttgagtaaagcccatgaaatttgcccagaggacgaaactattgctgaggttctaagagatgctgaagaaaaacttgcacgggaaaggggggaggagagcca

SEQ ID NO: 52499 - DNA, 1199 bp, Zea mays
  unsure (1)..(1199): unsure at all n locations
  Clone ID: MRT4577_147879C.1
gnagggattagcttaactagctttatatatatttaaccttttttggtaggttctacttttggtcgaccctatggatgaattggctatccagaatctgagctcctacaaggataagaaatttgtggacattagcaaggaagatttggatttaggtgataacaatgaggaaagagagaaggagataaagcaggagttcagccaagcctgtgactggataaagaatcgcttgggtgacaaggttgcacgtgttgacatatctaatcgtctcaggtcatcgccatgtgttcttgttgcagcgaagtttggttggtcagccaatatggaaaggctaatgagagcacagtctatgggtgatacaaccactttggatttcatgcggtcaaggaaggtttttgaaataaatccagaacatgagataatcaaggccttgaatgcggcatgcaggaataaccccgatgatcctgaagccctaaaggctctggatgttctctttgaaactgctatgatttcaagtggcttgtcgcctgacaaccccgccgagctcagcgggaagatctacgagatgataaccactgccatcgcaggcaagtggtcctcacagtcgcaggcgcaacctgacaacacaactctgcagcacgcggcacctgggaggtcggatgagccgcttgaaggtgaagtggtggagccagagcccgttgaggctgatcagcataagtaaggggaaccccctttcgctttctcgtgctagctttgaaccgttgtgcacgtggcggagaattttgagtatttgttttgacggcctttagctttatcatgagctgtgacggacctaatgtttagaatttagaagattagggataagtggcggttgaactacttgaactggttatgtgatcctaggatcgtctctggactcattgtagattaattataacagttagaagcgcaggtgaggtgtctatcacggacacccaaacgcatcagagttgctaaatttggagctgaggcctgcggtgaatgagatcgtctcttttgtctcgacttcaaaaaaaaaaaaaaaaaaaaaaaaaaaaaaaaaaaaaaaaaaaaaaaaaaaaaaactcgagggaaaaaaaaaaaaaaaaaaaaaaaaaaaaaaaaaaaaggcaggccggccgcagatcaagtaagcgcgtcgacccggaaatcaggaccggaca

SEQ ID NO: 52500 - DNA, 1149 bp, Zea mays
  Clone ID: MRT4577_14787C.1
atggaggatcacctatttactccctctaggtgctctcaagaaggcatacacaagagcagtcaacccccaacgccccaacaagacaaggtgcaccgcaacaggcaacaggcggtcgtggccagacatataactgtgggaagacccttgacaaccccaatgcaaattaattcagttgatgggaaggttcagacatataacatatgtttgaatgtaggagtggaaataagggggatagagttccccgctaacctaatagtaatgggtacgtatgggatggatgtcatcctatggatgaatatattgatgaggtatcaagcggacataagttgtgataagaggaccatgaggttgatatccccatttagagaggagattattaacgatagcaaggaggccaacccgcttgagaccatcaaggttgtgtcagaatttccatatgtgttccctaaggagctaccaggcatgccacttgataggaaggtcgagttcgctatagagcttatccatatcctgttcgtagagaagaaggatgtgaccaagaggatgtgcatagattacagagccttaaatgaggttaccatcaataacaagtactccctaccaaggatagaaaatttgtttggccaacttagaggtgccagcgtattcttaaagatagattttgagatcaggacaacattcatcaccaagtatggtttatatgagtacacaatgatgtcttttggactagcaaatgcgtcgacctttttcatgtacttgatgaacaatgtgatcatggattacatggacaagtttgtgatagtgttcatcgatgacatcctcatatattctcagagtgaggaagagcatgtggaacacttgaagatggtattgcaaaggctacgagagcatcaattgtatgccaagctaagtaaatatgctctgagcaggaagagtcaagtcaacatgatggtcgctcacccaatgtcatatgaattagccaagaagttcgatagaccaggtctcgattttctgaacagtacgcaaggagtgacaatggagttggaacccaccttagagcgagagatcaaagaagggcaaaaggatgatgagaatttcaacaagatacaagagatgatcttagaaggaagatgcaaagactttcgatag

SEQ ID NO: 52501 - DNA, 230 bp, Zea mays
  Clone ID: MRT4577_147880C.1
aagaaatccaccgccaaactccaagactccacgtcggtgaggaagatagtgaatctggacgaccacattgcgctggcctgcgcggggctgaagtgcgacgcacgcgtgctcataaacagggcacgtgtggagtgccagagtcacaggctcaccgtggaggatcccgtcacggttgagtacataacgcggtacattgcggggctccagcagaagtacacgcagagcggcgg

SEQ ID NO: 52502 - DNA, 3007 bp, Zea mays
  Clone ID: MRT4577_147881C.1
ctgtgctgcgctcgaaaccccggccggccaaaaaaaaaaacctaccacgtctcaaaaccctcgcgaatcgtcatttccgctctctgacacgccggagcccccactgcccaccacccgttcccgcggcctcgccctttgcgtggttgaagaagcgaaaggtgctcggggcctctagggccgcccctcagtgccgccgccgccgcccgcagccgcgtggctgccggcgctgcttcccgccgtctccgccgccgccgccgcctcaatcccgcccacacccgcgagcacaggagcgccaggggttcatcaacagcagaagaggctgctctctgtgcttgtagcgcccaaggttgcaggaaccagcaatgattgtgtccctcaagctgatgggtggtgcccttactgggagacgctatgaatcgagtgcggcagcagttgactccacggacccgccagctgagaagcatgagtaccaggctgaggtcaacaggctcatggatttggatcgtacacagcttgtatagtaacaaggaagttttccttcgagaactggtcagcaatgctagtgatgctcttgataagttgcgttacctgagtgttacggattctgagcttctgaaggatggtccccaacttgatattcgcatccaaactgacaaggataatggaataataacaattactgattctgggattggtatgacgaaacaagagcttattgattctcttgggactattgcaagcagtggaactgccaagttcctgaaggcattgaaggagagtcaagaagcgggcatggacaacaacttgattggccaatttggtgttggtttctattccgcatttcttgtttcagagaaggttgttgtatcaacaaagagcccaaaatctgacaaacaatatgtttgggaaggacaagcagattctggttcttataccattagagaggaaaaagacccggagcagctcattcctaggggaactcgccttactctctatctcaagtgtgatgataagggttttgctcaccctgagaggattcaaaaacttctaaagacttactctcagtttgtttcctttcccatttacacatgggaagagaaaggcttcacaaaagaggtcgaggttgatgaagatccagcggaagcccaaaaaaaaggtgatgattcagcggaaaccaaaactgagcctaagaaaaagaccaaaactgttattgagaagtattgggattgggagctttcaaatgagacacaacctatttggcttcggaaccccaaagaggtttcaactgaggaatacaatgattttttcaagaaaaccttcaatgagtacttgggccctttggcatcatcacacttcactacagagggtgaggtagaatttaggtcaattctttttgttcctgctacaaggaaggaagatgtaactgctgatagtaggaagaccaagaatatcagactatatgttaagcgtgtattcatatcagatgactttgatggagaattgttcccaagatatttgagctttgtgaagggtgttgttgactcaaatgaccttccattgaatgtttctcgtgagattcttcaagaaagtcgaattgttcgtataatgagaaaaaggctggtgcggaaagcctttgatatgatacttggcatttcttgcagtgaaaatagagatgattatgaaaggttctgggagaactttggaaaatttttaaagctgggtgccatggaagataaggaaaatcacaagagaattgctcctttgttgcgcttcttctcttctcaaagcaacaatgaattaattagcttggatgaatatgtggaaaacatgaaacctgagcagaaggacatttacttcattgctgcagatagtatgagcagtgccataaatgctcctttcttagagagactaacagaaaaagactatgaggttctacttttggtcgaccctatggatgaattggctatccagaatctgagctcctacaaggataagaaatttgtggacattagcaaggaagatttggatttaggtgataacaatgaggaaagagagaaggagataaagcaggagttcagccaagcctgtgactggataaagaatcgcttgggtgacaaggttgcacgtgttgacatatctaatcgtctcaggtcatcgccatgtgttcttgttgcagcgaagtttggttggtcagccaatatggaaaggctgatgagagcacagtctatgggtgatacagcctctttggatttcatgcgttcgaggaaagtttttgaaataaacccagagcatgagataatcaaggccttgaatgtggcatgcaggaataaccctgatgatcctgaagccctaaaggctctggatgttctctttgaaactgctatgatttcaagtggcttttcgcctgacaacccggcggagctcagtgggaagatttacgagatgatgacctctgccatcgctggcaaatggtcctcacagccacaggcgcaggcgcaacctgccgacccaatcccacagcacgacgcacctgtgaggtcagacgagccgcttgaagctcaagtggtggaggcagagcccgttgaggctggtcagcagaagtgagggcctgttcgtgcagaatctttgtacggagtagttttgaaccgttgtgcacaacatggctgagaatttcgagtatttgttttgacggcctgtatctgtgtcatgagctgttactggtaatgtaagacgtattggttagaaattaggagattaggaataatcgggtagctggactacttgaactggttcctgaaccatcaggagggttatggactcatggttagcttctactgcgtccttgggggcagtagtaattttgaagccaattcgttgttttgtaggctctatttctgtttggctttaatacatattggtttctactgtttctaaaaaaaaaaaaaaaaaaaaaataaaaaactaaagaaaaaaaaaaaaaagacggtgtgattgaagcggtacctta

SEQ ID NO: 52503 - DNA, 312 bp, Zea mays
  Clone ID: MRT4577_147882C.1
aacgggcgggcagactcgaggggtgctatatacacaagatccacaccacagctgcgatagtgcatgttgaactaaacagcacaagccccatgcatgaactgaatgtcctaatgttatctggaaacacaactcagtggactcacaaaaagtgatccccgctacttaactacaacaggactaggcgcggcataagagacaccaatagacacagttgctaatatactatggagcatagtattacatggggtgagctcaccttaagccaccgaatgtttatgaataaactgaacctgtattcacgccatacttgct

SEQ ID NO: 52504 - DNA, 561 bp, Zea mays
  Clone ID: MRT4577_147883C.1
aatacaccaaaacctccccacacccttccctccgccgcacgcccgcctcccgtccgccgccgctgctgccgccatggacgccgacacgtcgcgccaggtgcgcgtgcgcttcgtcacgaagctgccgcctccgctccgcgcgccgcccaccgccatcgcggtccccgccgagctctcccgcatgggcctctccgagatcgtcaacagcctcctcctctccgccgacccggaccaccaggcgcagcccttcgacttcatcgtggatggcgagctcgtgcggatgccgctccatcagttcctgctcgccaagggcatctcggcggagcgggtgcttgagctcgagtacataaaggccgtggcgccgaggaagcaggagccaccattgccacacgatgactgggttagcgcggttgatgggtccaacccaagcttcatattaacaggttgctatgatggtcttgccagaatatggaaagatgcagctgaatgtacacaagtttttggagggacacagtggtgccatcacttctgccaccttcatcaactaaggagttgaaactg

SEQ ID NO: 52505 - DNA, 420 bp, Zea mays
  Clone ID: MRT4577_147884C.1
acttctatggatgagaatgctcaaaaactgaaagaaaactatcttcagaagctgaatgcacttgaatcccaggtccatgagctcaagaaacaaaaaagtgatgaggcagcaaagcgtttacaagaagatattcagcatataaaatctcagaaggatcagcttcaacaaaaggccaagcaagagtctgaaaaatttatgtcttggaaggctgcccctgaaaaggaagtaatacagctcaagaaggaagggagacgaaatgaatatgacatgcacaagctcttggctttaaatcagaggcaaaaaatggtcttacagaggaaaactgaagaagcagcagctgctacaaaaagattcatggagttgctggaagcaaagaactcatcacttgagacatatggcagtggaaatgcttcggggatg

SEQ ID NO: 52506 - DNA, 381 bp, Zea mays
  Clone ID: MRT4577_147885C.1
tgaaggttgtaatgatgatgccgtgctgaatactgttcaaacacatgatgtgttgccaaattgtaccttggtgccatcctcatcacagctaaatactgaagtaccgaagaacaatgcagtgggtctggccagttatactgaagcaggaattgctcaagttattgacaaagcaaagagttacagtggccagataaaacatgctaatcaaactgaaggtgcttatattatttccacatcaaaggcatgtgttgataaatctttaaatgagagtaatatgtcacatgctgtggaggagctacatgcaagtcgagaccatggggttggtgatgatgtttctgataaaaagcaagtcatggtagaggagcaactgctggaagagat

SEQ ID NO: 52507 - DNA, 577 bp, Zea mays
  Clone ID: MRT4577_147886C.1
gggaaatgtgcatcctgcaggtaccagtctaagcatacagatgcgcagatgatttcctcagtatgttaaaaatgaacggagaccatttacgagactgacatagcttaatccagatgcgcagattgatttcctcccccactgttaaacagaaggcttaagcgacacggagtcacggatactgcatgtcagcaatcggattatcgcaactggttctccttctcggtggttgcgttttttctcagctgagacggtgctctcgtggctgcagctccggtgctattcttgctgccggtgctcactgattcgtcgggtttggcagcattgcggtctgtgaggggagggttgctctccgcaggagtcaccgaggacatggctctcggtagcttggggggaatgttggcaatgtcccggggggcagcttcggtggccactggctcggacggcaggagaggtcctgggacgagttgaattgccgacttgcgccggtttttcctgggtcttctttgtctcgcgcagtttggttacccacattatcaccaatgttagtcaaaggctttcttggctttgcatcttgggc

SEQ ID NO: 52508 - DNA, 2419 bp, Zea mays
  Clone ID: MRT4577_147887C.1
atcaatatgaacggagaccatttacgagactgacatagcttaatccagcatgttacttttccattatacacaaggtagcattccagccaaagcagagctaaggctttccacagaacacgtcattccccacagcgccagcccttccagagtctacatgccactccaaaggacgccgaggcagcctcccccactgaccactgttaaacagaaggcttaggccttgttcgtttgtgtcggacttgttcgtttgtgtcggattgcacctggaatcgttccagctaatcaaagtttatataaattagagaagcaatccgattacgaatcgttccgacccaccaatccggcacaaacgaacaaggccttaagcgacacggatactgcatgtcagcaatcggattatcgcaactggttctccttctcggtggttgcgttttttctcagctgagacggtgccctcgtgactgcagctccggtgctattcttgctgccggtgctcactgattcgtccggtttggcagcattgcggtctgtgaggggaggagggttgctctccacaggagtcaccgaggacatggctctcggtagcttgaggggaatgtcggctctgtcccgaggggcagcttcggtggccactggctcggacggcaggagaggtcctgggacgagttgaattgtcgacttgcgccagtttttcctgggcttctttgtctcggcagtttggttaaccatattattaccaatgttaatcaaaggcttccttggctttgcatcttgggaatccttctcagaaaacgcgttctgaagaagcatggctccctgattggctttttctatagtagaagaatccctgtttgaacatttggaatccttacaaccacagcctgcaccgcattgtgcacctgagcctctgcactcgcatttgttggtcttgcatgaggaggattttgagcatgaacagccgtctgatgaaatatatttgggcaaaatgcacttttcatctgagggcttctctggttctgcattgccttgtgtattttgacaatccaggttaggatttgaatggctagacactcttctctggtgttttttggctttcctggtcgactgtacccagtctgaatcggatccatcactcatattctctaactcatccgagtgctcactgtctgaaatgtccatatcatccacccaattgaagttgtccttactataaccaaaatgctgggaagatcgaacgctcttacgctgagcaaatccagtgccattcgacctagcagatttctttgcattgttcaatgcagtgaaaagctgtgtattttggctccttagatccctcacttgtgtttctaactgcctaattccaccattaagcacaaccaccttttccttcaattcagtaatggtgtgttctttttcattacaaattacttctttatccagtacttgagaccttgcagatgatgctaactggaaaaggtaattcattatattctttgcctctgggagggacctgacattgtaccatctacctttaccattgaatacacgctcccgctcctctgcttctgacagttgagaagccatagataccatagcactagatgaggaggacaacatattctctaatgctgatatcctggaacttctagcactaggtgacatagcttgaggacaatcactgatcttgtgctttgattcctcctttagttttgctatttccttggatattgctgctctctcttgcatttgtcgctcgtaatatgagcgtaattcgtgtgctcttacagtgacttctagttcatcgtcaatagctcgtattaaggcctgcatccccgaaccatttgcactgccatatgtttcacgtgatgacttctttgcttccagcaactccttcaatctttttgtagcagcagctgcttcctcagttttcctctgtaagaccatcttctgcctctgatttaaggccaagagcttgtgcatctcatattcatttcgtctcccttccttcttgagctgaagtacttccttttcacgggcagccttccaagacctaaactgttcagactcttgcttgatcttttgttgaagttgaaccttctgagattttatacgctgaatatcttcttgtaagcgctttgctgcctcatcactcctctgtttctgccttagaagctgttgttgagcttcctgctttttcttgagctcatggacctgggactcaagtgcattcagcttctgaagatagttttctttcactttttgagcattatcatccatagaagaagatatgttggttaatgcatggcgaagattctctatttctttctgaagagctttcttttcttgctccaagtcggttaacttcttttcataatgttgcttgagaacagaagtatcactcttggcaaattgtttcatc

SEQ ID NO: 52509 - DNA, 385 bp, Zea mays
  unsure (1)..(385): unsure at all n locations
  Clone ID: MRT4577_147888C.1
acgcaagcgaccccagtaatggcgaccaaggcgctatccgtctcctcgctcacctccacggcctttgcctccttttccttgccgcggccccgcaggccttcaccttcgcctcccctcctccgccttctcggccctcgcccccgcgcctccactctctccgccgccgctcccggcgacgaggacggcgtcgacaccgtggagcagctcctccacccacgcccgcctgagacctcagcccccgccggatcccgcggccggatcgaccgcctcatgaagctccagcgccgcgccgacggcgacgccgtgcccgggggccggaggaggtggttcccttacctggacgcgttccggcccgcggncgggggcgcggagctgtccagcgggg

SEQ ID NO: 52510 - DNA, 1228 bp, Zea mays
  Clone ID: MRT4577_147889C.1
accagtctaagcatacagatgcgcagattgatttcctcagtttgttcaaaatgaacggagaccatttacgagactgacatagcttaatccagcatgttacttttccattatacaagaaggtcgcattccagccaaagcagagctaaggctttccacagaacacgccatttcccacaggaacccgagagcgccagcccttccagagtctacctgcctctccaaaggacgccgaggcagcctcccccactgttaaacagaaggcttaagcgacacggagtcacggatactgcatgtcagcaatcggattatcgcaactggttctccttctcggtggttgcgttttttctcagctgagacggtgctctcgtggctgcagctccggtgctattcttgctgccggtgctcactgattcgtcgggtttggcagcattgcggtctgtgaggggagggttgctctccgcaggagtcaccgaggacatggctctcggtagcttgaggggaatgttggcaatgtcccgaggggcagcttcggtggccactggctcggacggcaggagaggtcctgggacgagttgaattgccgacttgcgccggtttttcctgggcttctttgtctcggcagtttggttaaccacattattaccaatgttagtcaaaggctttcttggctttgcatcttgggcttccttctcagaaaacgcggtctgaagaagcatggctccctgattggctttttctatagtagaagaatccctgttagaacatttggaatccttacaaccacagcctgcaccgcattgtgcacctgaccctctgcactcgcatttgttggtcttgcatgaggaggattttgagcatgaacagccgtctgatgaaatgtatttgggcaaaatgcacttttcatctgagggcttctctggttctgcactgccttgtgtattttgacaatccaggttaggatttgaatggctagacactcttctctggtgttttttggctttcctcgtcgactgtacccagtctgaatcggatccatcactcatattctctaactcatccgagtgctcactgtctgaaatgtccatatcatccacccaattgaagttgtccttactataaccaaaatgctgggaagatcgaacactcttacgcccagcaaatccagtgccattcgacctagcagatttctttgcattgttcaatgcagtgaaaagctgtgtattttggc

SEQ ID NO: 52511 - DNA, 460 bp, Zea mays
  Clone ID: MRT4577_14788C.1
cccagcgtccggtccgctcccgcgccgctgccgccaccgacgacgacgcggtcctcaggcgcgccatgtcggccgccgaccccgggagctcaagagggccgggaacgaccagtacagaagggctgcttcgaggaggccctcaggctctacgaccgcgccctcgccctctgccccgacaatgccgcgtgccggggcaaccgcgccgccgctctcattggcctccaccgccttggcgaggccgtcaaggagtgcgaggaggcgctccggattgatccgtcctacggacgcgcgcaccaccggctcgcgtccctgcatataagggtaggacacattgaggatgctctgaagcacctgtgacttgcaatcccacagcctgacctcctaaagttggacaaattggaaacagtggagaagcactttggggggatgtctggatgcgcgaaaaggctgggactggaag

SEQ ID NO: 52512 - DNA, 509 bp, Zea mays
  Clone ID: MRT4577_147890C.1
ccctcttcttacgtcattacaccatcagctcgatcgctctgtgctgcgataatggccgctcgctcctcctccacgctaatgataccgtcggcggcggcgtcgctcctgtgagaggcactgctgctgctcgggacttcgtgcggacacgccgtacgtagaactgagctgcagcgatgcgactcctgcggaggagccgtgcctcgtagtcacactgatgggcagctcggcgtcgccatccgaggcgtgcttaagagcgtggcactcgctcagcagtcgagagtcgacgacggattaccagcatacctgctgcaactgcctttagagcatgacgggccggctcgcatgagccgtaagaatgaacaaaggcatgaacatctcccgaagactgcataactccgtaggattgcacatcagtaccaccgtatgacttgacacctattgactgagctatggactctgaagcacgtataaaagcactctgcatgctcattatgtagtctgcatgtgca

SEQ ID NO: 52513 - DNA, 362 bp, Zea mays
  Clone ID: MRT4577_147891C.1
ggacccaagcgttctggatacagaggatcataatgagtgccgggaacatgccgatcggcctgaacagatagttgagctagggaaggatatatactgcatgccactacatcctgtgcaaaaattaactgaatctctcagacatcatagtgccatgaatggatactacagatcacttatcctgaagcaatagatatgcatgatcaatatgaaagaggtagctatcgaaggtgcagcaagatccacatcgaatctgaatggtaccgatgcaaccttttatacccattgtggtcatacgatgagtaccttagtgaaacatgcataggccgacaccgcagttaatgaggccgcagctgcaacacaac

SEQ ID NO: 52514 - DNA, 286 bp, Zea mays
  Clone ID: MRT4577_147892C.1
agcagagatgatgttaaggaacgattggatgattgcaggaagctgcaaacagaagaggtagctacaggtttgtgcatgccttctgaaggagtgattcaagaaatctgcattccattgacaaacatatatgaaatatttggggactttgaggctattacctgtgaaaaaataggaacatctgtgctgaggtttgtaagtcttcattctatactttgctattaacgcaataggaggttgaaacagaaattgatttagtagttcggatacagacatgcagttcagtgag

SEQ ID NO: 52515 - DNA, 780 bp, Zea mays
  Clone ID: MRT4577_147893C.1
ctcatgaaaggctcagaccaatacaagctgttttaacagccatggcttcagcgaagcagagcgagaaaatgcgcatacttctgatcccattcttcgccaccagccacatcgggccctacaccgacttcgccgtccgtctcgcagcggccaggccaggagccgtcgagcccaccgtcgccgtgaccccggccaacgtcgcggtggcccggtcggcgctcgagcgccacggccccgcggcgagcggcacggtcaggatcgtcacgtacccgttcccgcgcgtggatggcctcgctccgggcgtggagaacctctccaccgccggagacgacgcgtggcgcatcgacgccgccgccatcgacgaggccctctcgcggccggcgcaggaggcgctcctcagggagcggtcccccgacgccgtcgtgtcggactaccacttcttctggaccagcagcatcgccgccgagctgggcctgccgtgcgtcgttttcagtgtcatcgcccccttctcgggtctcgtcatgcgcatcctcgccggcgccgtcgtctctgggtcgcgtgacgttaccgttcccgggttgccagggccggagatacggatccccgtcagcgagctgccggagttcctgagacgcccggcgaaggaccaaggcacgttcagcccctgcaacgcggcgcaggccaggtgtttgggcgtcgcctacaacacgttcgcaggcatggagcaggagtaccgcgaggcgaacgtgcgcgccaaatccttgaagcgctgctacttcgtcg

SEQ ID NO: 52516 - DNA, 411 bp, Zea mays
  Clone ID: MRT4577_147894C.1
acccacgtacaaaacttgttttgcattggaagttttgaaaaaaaaacaagatttttgttggccctttgttggtggactaccaacctgccacgtacaagttgggataggattttactggtacctttttttgattcccactaacacattaagggcttgatcacatactggacatgttttctgaagaagcccatttaaacaaaaccaaattcttgaattccaaaaagcattgttggaagggctttaaaggccttttcctccttttattacttcgccttttggcacgctcataagggcttgattttgactcaaactcaaaactggaccctgaactagagctttccgaaccaaattcggatccacttgaatctgactttgaagattctggcttctgctgctgcattattagacggg

SEQ ID NO: 52517 - DNA, 1681 bp, Zea mays
  Clone ID: MRT4577_147895C.1
ttgggtacctcgaggacggccgggaaagaagaccgcccttgcagagcaatctcaaaaaggctcagatcaacacaacctgtaccaacagcaatggcttcagctaagcagagcaagaagacgcgcatacttgtgattccattcttcgccagcagccacatcggcccccacaccgacttcgccgtccgcctcgcagcggcccggccaggagtcgtcgagcccacggtcgccgtgaccccggctaacgtcacggtggttcggtcggccctcgagcgccacggccccgcggcgagcggcacggtcaagatcgtcacgtacccgttcccgtgcgtggacggcctcgctccgggcgtggagaacctctccactgccggagccgacgcgtggcgcatcaacgccgccgccatcgacgaggccctctcgcggccggcacaggaggcgctcctcagggagcagtcccccgacgccgtcgtgacggacttccacttcttctggaacagcatcatcgccgccgagctgggcctgccgtgcgtcgcggacgcgtgggcggacgcgtgggcggggctcatcatgcatctcctcagcggcgccgccgtcgtcggtgacggcggctctgagtctgagtcccgtgaagttgccgttcccgggttgccggagccggagatacggatccccgtcagcgagctgccggagttcttgagacgcccagcgaagggccaaggcacgttgaacccttgcaacgcggcgatggccaggtgcctgggcgtcgcctacaacacgttcgcgggcctggagcaggagtaccgcgaggcgagcatgcgcgtcgcgtccttgaagcgcagctacttcgtcggccccgtctcactgccgctgccgccggccgcggcaggcgtcactgagcctccatgcatccggtggctccactccaagccgagctgctcggtggtgtatgtgtgcttcggcacctacgccgccatctcgggcgagcagctccgggagctggcgctcgggctggaagcctcggggaagccgttcctgtgggtggtcagggctggcgacgggtgggcgccgccggacggctgggatgagcgggttggggagcgtgggatgctagtcagaggatgggcgccgcagacggcgatactgtcccacccagcggtgggcgcgttcctgacgcactgcgggtcgagctcgctgctggaggcggcggcggccggcgtgccgatgctgacgtggccgctggtgttcgaccagttcatcgaggagagactggtgacggaggtcctcaagatcggggagcgggtgtggagcgggacacggagcacgagatacgaggagcaaaaggtcgtggcatggcagcagaggtagtggcgcgagcggtggcaaggttcttggagccgggtggcaccggcgaggcggcgaggagcaaggcgggggtgctcgctgcgaaggcgcgctcggctgtggcggagggtggctcgtcattctgtgatctgcgccgtctcgtcaatgacctgatcgaagcaagaacggctgccggaccccccgcctgagttacaaaaatcacgagtacgtgttgaattgctcgatgtgttttcctttttttttccaggtggtttgtcctttcttgggaaaatgtcgaaggattttcactcctgttattttgcatacttcgctattctgc

SEQ ID NO: 52518 - DNA, 428 bp, Zea mays
  Clone ID: MRT4577_147896C.1
cagacgcctctgccgacttatgatccgactcataccctaaaactatcaagcacacttggagtagctacaagtatgttagactatcagaactactgcaacctatgttcataactcctactgctcaagcaacaacacactattccaacttgactaatactgcaagaccaacgatactaactgactcactgtctgttaccacaactgggatctcgattgctctaatactttccactagtaccagcaatggttctaactcattcacttgagacccaaggtcatatacgagatacggcaatcataggatacacctgatcatactgtcactgagctcgtacatctagcactctgtcgtatatgattattcggccaatctaatgacgatcaacacgcacatccaggacaagtagctctttttgacttagagcatt

SEQ ID NO: 52519 - DNA, 416 bp, Zea mays
  unsure (1)..(416): unsure at all n locations
  Clone ID: MRT4577_147897C.1
ccatgggggtaactttggggggtgatatgttgtttgaatcttctggtggcttgacggacgactgataaaacatcaacacacttaaaggggggggccaaaaaaggggggatatttggaccatcaactggagcccccatttttggattttttaanaaagaaaataactttggggggggggggaattttttttctaaagcaagatggactaacaaatgtggggggtgcctttccacaggtggcgaagaggaattttgcatcgtggaggggcttatgacaactgtgcttgcaacaacaggtacccagaaaagaaccgatggtccttcttttaaaaatttgagagaaggacgaagtgctgcccaaaacataatttctagctacactgttgcgagcaaagatgttgggaaaaaacatgcctg

SEQ ID NO: 52520 - DNA, 1821 bp, Zea mays
  unsure (1)..(1821): unsure at all n locations
  Clone ID: MRT4577_147898C.1
gtccgctccgntctgaaatgtgtacaataatcctgatgaactactaaaacacttgccttaatctgaaatgagtacaataaaacatatataaggaaactcaaataagtaaagtcttgcttgtccctcacaccataacatgactgatgaactactaaaacacctgcgaggtctgtcagcgtagcctcctcgacaccttctgcttctgctaactccggtgcaaggtagatccttgctatacttgacaaactaaaggaggaaagggagcaacaagaaggaaaatatggggaggaagatgtggatggttcatgtatatcagaagaagaagatggtgactgggatgtagatgagccagatgaggaggacatcatttacgtaaaatagcccattgtcttctaggaacttggtcatcattcatccagaacacagcaggttgcgttctgcatacataatattgcctatcaaggtagatttgccagagcagacttcgatcttcttaatctacctgacagtttcttaccatcatttgattttattgatggacatgttaagcctgttctagggagaaagattaactggatgaagacagggatcgttgagagtgatctggttctaacagttagtccacattatgttaaggaactcacttatggcccagataaaggtgttgagttggatggtgtccttcgcacaaagcctcttgaaattggaattgtaaatggcatggatgtttatgaatgggatccttcaacagataagtacaccagcgtgaaatatgatgcaacaacggtaactgaagcaaaggctctcaataaagagaggttgcaagctgaagttggattgcctgtggactcgagcatccctgttatagtttttgtcgggcgtcttgaagaacagaaagggtctgacatactcattgcagccattccagagttcgtgggcgagaatgttcagataatcgttcttggcacgggaaagaagaaaatggaggaggaattaatgcagctggaagtgaaatatccaaacattgctagaggcatagcgaaattcaatgttccattggcacatatgatgtttgctgggtctgacttcattattgtcccaaattcccatctgttcatcacctggaggacttgttgacacggttgaggaggggtgtcaccggattccacatgggttctttcaatgtcgagtgtgaaactgtatacctagctgacgtgacggcagtagcgtcaaccatcacacgggcctagaacagtacggcaccccggcgttccaagaaatggttcagaactgcatggcgcaaaacctatcctggaaggggcctgcgaagaagtgggaggaggtgcttctgggccttggagtcgaggggagtcaagctggcatcgacgacgcagaggagatcgctccacttgccaaggaaaacgtagctactccatgacgcttggtgcctcggaaacacgcgttggtgataggaagcatcttctaggatcctcctggccttgtggctggagtgagttgttcagtcagacacagtttcgcctctacaacatcttcctcctcctggtggtggtccgaactccgaagcaaattccagtgataaaggatgaactaagaggtccatgtttctattgctagaccttttgcctcctaaatagacgatgtactgcgcttgtaacaagaacctcactttcgtgtcaagtaatatcaacaggtttcataaaaaataaaaaataatattgataaaaaaaaaaaggaaaaaatatataaaataatcaaaaatattaaactaaattaaacaannnnnnnnnnnnnnnnnnnnnn

SEQ ID NO: 52521 - DNA, 373 bp, Zea mays
  Clone ID: MRT4577_147899C.1
aaaagggcacgccctcaaggccttaactttttttttcaaataatgcccccaaatgctgatgacattcccagttttggagacaaatgcccccaatagctgatgacattaccagttttgcaggtaactggccaaactgacaataaaataaacgggcctccattaatttaacattagccgttttggaaataactgtcctaactaacatgccccctaaaaaaacatatatgtctagcttttcctagggggaattaaacaaaaaacctttttcacgcgttttttggaggaaagattggttttgtaggcacaaccttttttggaggaaacattggttgccctttttgggaagacgcaagcccattcttttttggggggg

SEQ ID NO: 52522 - DNA, 318 bp, Zea mays
  unsure (1)..(318): unsure at all n locations
  Clone ID: MRT4577_14789C.1
ctgccggaaataactgccgggacgagcagatnatacgtcggccgccctccttttttttttttggtggttttatttgttttttttttcattcatcattttttaactttttcccacaaacacacaacatgacaattgatcggggtaaccgcagattatgacaaggcagcgaaagagccccccaaactttattgttgtgtgacccagacttggaaccacaggaaagattaccttgtgcgccattatttaaagaactcaaccacaggttttacaacaaatttgccctgattgagaacacaaaaagcgccattcgccttcaaa

SEQ ID NO: 52523 - DNA, 1935 bp, Zea mays
  Clone ID: MRT4577_1478C.1
cgacgatcttttagtcgtaaaggtagtcagttttgcttgctccacgaatatgctacttagagaaaatgaagaatacaactttaagatattgtgctcatctagaggggcattcatcgcagccatggcggtttctatgattcttcaccttagatcatctctactagccactgaaataaatacgttatgtcctcagaggttattgaatttgcctaacaaggttgatgtgcataagttaaattgagaaagctaaatctctacagtctactgctattgatgcgaatacattatccccatctcttttatcaaagaaggatagctgtgattatgatagagtttatagtaatcatgctacttcaactcctccaaggactccgttgcatccattagctgagagttactgggaagagcagtggagaaacctgcataatgacggaactgctcttaaggagagtgataataagggtctttcttataagagatcattaaagcaatctttgagtcagaggcttggtttatctaggacagagtcagatccttctccagttaaggtagtcagtgtgaacaatgacgcgaagaattcagtgagacggtgtcttctaaactcttattcagataaagtagtacaatccaatgaagttattgggaaatttgagcaagataaatttcctatcgtgtcaattcacaaggagactattctgagttctgaaaggtcttcacagctaaagctaaaggcggctagtgagaatttaacagtaagtccaccaccaagtgtggcgaagttcaatccacttatagattcaccggtgaagcctgctgacgagagttcagcgaaaaggacagaagattgttccagtggtgaaaattctccagtgttttatacagctagggctggtaatgaacatgataattgtcatgataatgattccgagaagagcagtattacttcaaattcatgcgccggtgatgattatagagacgaagtcttgccagacgagtcgtccagctgtaactgtgaggataaaaccgtctcagaagcaatagagtctggagcaaatgtaggtcaagctagacccttggagaaaaccatggtacctaatgaaagaaagccatttattaacaagctgcagtggctgttgaggtttggcagaccatcagctgaaggcaatgtggtggagaagggcagtgctcaggcatcatcggatgataaacatgacgtggttcctccctgcccttcacctgctgatgcgagttcagataactcctgcagcggcataaatttggcttatggcgataataagaaggtgatgggcactctgaagaatatcgggcagaacatgctcgaaaacatccaggtgatcgaaacggcgttccagcaggaccgcgcgcagcccagcgccatggagaacttgtcgaacaacatcctgggaggcaaagggcaggtcaccgcgatggctgccctgacagagctccgcaagatcagcaacctgctgcgcgagatgtgacccatccaaggcgtgtgcaggctcttcctcctcccccattctttccccccgatttattagctcctcagaatcagataagcaaggcctccgtagttgaagcccaggcacctagccaccccccaaacccccctgtatatatagacccccattcgattattccattgagcctctgctcggcaggtatgctaaggctctcgttctttttctttctttctttctttcttgtaactaaggattggtcagctgctgtcaactgagttgcgggaggtgagggagtaaaaaactctcttgtctcctgcgttaggagcaactttttgatggaacaattttggacgcgaaaatgtctctcgaggttcagtaaataaatggaataagctatgtcaaaaaaaaaaaaaaaaaaaaaaacaaaaaaaaaaaaaaaaaaggggcggcc

SEQ ID NO: 52524 - DNA, 596 bp, Zea mays
  unsure (1)..(596): unsure at all n locations
  Clone ID: MRT4577_147900C.1
ccggccgggacgcccgcgagggcgcgcacgcggaggtcgcacggcggccaccacagcttcggctccgaggctgcgctgcaccagctgcagatggagcactacaccccagtccgctgaacgtttgctctttttctgatgatgcgatgcaacgagcaacgatgccgtccgtcggtcctttgtgaagatacaattcttttgtttgttcgacttccttaccataaattggtgggttcaaatgttggatgcaagacgatggaactttcaatcgcactgtaggtgacaatgcaccgtggatccatgatgtaagagcgcaaactatatgaattgtgatctgggcctagccaaaaaaaaaaaaaaaaaaggtcccctttcccactgtctagggaataagagtcgccaacaggagtatgtaaactccttgattgcacgctaaaaaaaaaaaaaaaaaaaaaaaaaaaaaaaaaanaacacaagctcgaccaccaacccagctcgttcgtcccagctgatcaggtcgagcacctagtagcgacctggtcgatcattagtgtagagtgtcggtaggggtctgtctcttttgggggctggttgcaacg

SEQ ID NO: 52525 - DNA, 220 bp, Zea mays
  Clone ID: MRT4577_147901C.1
ctcatcctagccctgcgcctatccggctggaacttctaccatcaggacaagcaagagcggctgcatctatcatatccaacaggccctagacctagatgtctaagtatctgtagcgtcatgcctcccgatcgagcggctggacatagactacaagacactggacgcggccaagacgatactggaaaggagagattagcagagccccagccccagccggcca

SEQ ID NO: 52526 - DNA, 851 bp, Zea mays
  unsure (1)..(851): unsure at all n locations
  Clone ID: MRT4577_147902C.1
tttcaatgcaggtatgatcttatacgagtggagattggcaacaaagatataaagcttgaatacttagtggaggcatttacaacttcaaatgagtaacattccttgatctgaaatgtgtacaataatcctgatgaactactaaaacacttgccttaatctgaaatgagtacaataaaacatatataaggacactcaaataagtaaagtcttgcttgtccctcacaccataacatgactgatgaactactaaaacacctgcgaggtctgtcagcgtagcctcctcgacaccttctgcttctgctaactccggtgcaagatccttgctatacttgacaaactaaaggaggaaagggagcaacaagaaggaaaatatggggaggaagatgtggatggttcatgtatatcagaagaagaagatggtgactgggatgtagatgagccagatgaggaggacatcatttacgtaaaatagcccattgtcttctaggaacttggtcatcattcatccagaacacagcaggtgtgcttctactgatcgaaaatacatcttccaaataactatgaggacttaaccaagcaccattcaatcttcatttgcttctatagtttgggttgcgttctgcatacataatattgcctatcaaggtagatttgccagagcagacttcgatcttcttaatctacctgacagtttcttaccatcatttgattttattgatggacatgttaagcctgttctagggagaaagattaactggatgaagacagggatcgttgagagtgatctggttctaacagttagtccacattatgttaaggaactcacttatggcccanataaaggtgttgag

SEQ ID NO: 52527 - DNA, 1939 bp, Zea mays
  Clone ID: MRT4577_147903C.1
atgtggcgaggctacgctagtgacgccgagatccagggatgccaagatctagagctacgccagggacgcggagatctattatgtgttcttggccgtcagccaacgccgccgatctccagcttccccaaggctgctccagtcagtctacattatttcaagaaactcacatctgacccagataagggtgttgagttggatggtgtccttcgcgcaaagcttctggaaattggaatcgtaaatggcatggatgtttatgaatgggatccttcaacatataagtacatcagcgtgaaatatgatgcaacaacggtaactgaagcaagggctctcaataaagagaggttgcaagccgaagatggattgcgtgtggactcgagcatccctgttatagtttttgtggggtgtctcgaagaacagaaagggtcctacatactcattgcaacaattccagagtttgtgggcgagaatgtccagataatcgttcttgtatgtttcaatttacaagtggtttctattctttcgcatggcacggttcacgatctgatagtcgctgagaaaaaaaattgttcttcagggcacgagaaagaagaagatggaggcatagcgaaattcaatgttccattggcacacatgatgtttgccgaggctgacttcattatcgtcccgagtaggtttgagccatgtggtctcattcagctgcaagggatgagatatggagtgattcccatctgttcatccactggaggacttgttgacacggttgaggaggggtgtcaccggattccacatgggttctttcaatgtcgagtgtgaaactgtatacctagctgacgtgacggcagtagcgtcaaccatcacacgggcctagaacagtacggcaccccggcgttccaagaaatggttcagaactgcatggcgcaaaacctatcctggaaggggcctgcgaagaagtgggaggaggtgcttctgggccttggagtcgaggggagtcaagctggcatcgacgacgcagaggagatcgctccacttgccaaggaaaacgtagctactccatgacgcttggtgcctcggaaacacgcgttggtgataggaagcatcttctaggatcctcctggccttgtggctggagtgagttgttcagtcagacacagtttcgcctctacaacatcttcctcctcctggtggtggtccgaactccgaagcaaattccagtgataaaggatgaactaagaggtccatgtttctattgctagaccttttgcctcctaaatagacgatgtactgcgcttgtaacaagaacctcactttcgtgtcaagtaatatcaacaggtttcattaggtttgagccatgtggtctcattcagttgcaagggatgagatatggagtgattcccatctgttcatcacctggaggacttgttgacacggttgaggaggggtgtcaccggattccacatgggttctttcaatgtcgagtgtgaaactgtatacctagctgacgtgacggcagtagcgtcaaccatcacacgggcctagaacagtacggcaccccggcgttccaagaaatggttcagaactgcatggcgcaaaacctatcctggaaggggcctgcgaaaaagtgggaggaggtgcttctgggccttggagtcgaggggagtcaagctggcatcgacgacgcagaggagatcgctccccttgccaaggaaaacgtagctactccatgacgcttggtgcctcggaaacacgcgttggtgataggaagcatcttttaggatcctcctggccttgtggctggagtgagttgttcagtcagacacagtttcgcctctacaacatcttcctcctcctgggggtggtccgaactccgaagcaaattccagtgataaaaaaaaaaaaaaaaaaaaaaaaaaaaaaaaaaaaaaaaaactcgaggaggggg

SEQ ID NO: 52528 - DNA, 451 bp, Zea mays
  Clone ID: MRT4577_147904C.1
ctttaaaatcaatttaaggaaaaagaatgcatgtctctatcaaaaacaagtgctttgattaccaagcacttgcttgatcttcttaaaagttaaatacataatgcagtgcatgtataagtagtagaaagaatagaaatgcaacagacttgctcatacttaggtctaagtagtagaaagacaatgtatacttttggtaggatgcagagcataaaaatagttgcaagttttgtgaaattgaaaggtcgaagaattaccagtagatcatatgaacaaaggtcatatttcagtaaatgtagcaaaaaaacagtgaagaatagaacttgcacactttctttatagacatgaaaagggaacttcctgcttagtgatgcaataacaacatgcccgccaggcagtacacagatatccctaatagctttagaatcaggagggggtagatcttctccattcc

SEQ ID NO: 52529 - DNA, 628 bp, Zea mays
  Clone ID: MRT4577_147905C.1
ggccgggcccggaaattacaagtaacactagtaataatagcgcggaagtattaagaagatattctcgcgtacttcaaccgccgatgcctgtgtgaacgccacgccacccaacagggaagccacatgcactccagacgaagctaacactcatcgtgaagaccccctgggtaggggctctctgcgtccaatgtgaaagctttcttgtgcgttgtaaccggaatgcacgatctcgtcaccatccgattcatcatacaataccatgacctcctctgcaacaatgacgatgctgcacacgtacctcaaacatacgcgtcctcatctacaatctcatcaaagataagacatgcgactgactatccctcaggtctcaggagtaaactgattcatctctaactggtagaatatactgaagcttatgaatgcagaatgacatccatacaattctggaccgcgctacacttgaaaccacactgcatgatatctatgttatacagttcaaactgagatcctcttatatgcatgacaaggattacttatggttgtacatatgaggggctaccactgagaatgaactgacactacttgtgcatccatcaccatctcagaacattgtgaaacggaactgctg

SEQ ID NO: 52530 - DNA, 201 bp, Zea mays
  Clone ID: MRT4577_147906C.1
tcatttgatacttccatcaaccctccaattccacacggggacctcctagcttgccagcggtccctatatacagtcttattatactcaagctcaaacattgacataactccttcctatgtaaaatgattatcctgtcacaaattaacacatcattctaaccgaaaataaaaagttttaagactgatccaactaatacgacct

SEQ ID NO: 52531 - DNA, 112 bp, Zea mays
  Clone ID: MRT4577_147907C.1
taccctgcccactgctcgcttagacttttggcgagctttgcatcaccaggaacgtcgctctgctggtgaggaagatatcccagacgcgcgagcttcctagcaactccacacg

SEQ ID NO: 52532 - DNA, 386 bp, Zea mays
  unsure (1)..(386): unsure at all n locations
  Clone ID: MRT4577_147908C.1
ctataccaacggtcncacatccaccaccgccttttttctctcgccacacgcaaccccctcttccgccagcgttactacaaaaccagcacacacaacccatactacatcaacagcacggaacccccctgcgcagcgctcgacaacatcatgttacccctattctcgcacacgacgatctctttcccataatcacaagacctcataacgacctcatctacacacttatacattgactacaaccatcaactaccgcgcgaaaagctacacatatcctcaacccaaaaaataccagaaaacaagaacaccctccaccagatcatatattactcacatatacaagcatgatccgacaaataatgctaaaccgtgcctacaacgttaaccgt

SEQ ID NO: 52533 - DNA, 404 bp, Zea mays
  Clone ID: MRT4577_147909C.1
cattgggtacctcgagccggccggggtcgtcgtgcctcgacatgttgaataatactatgcccgccgtggtctactaatctagcgatctcttgctgctactcgcaatataggagatgtctctgttctctgatacacgctcgaacggacggcctcaatgtccctcgagggtacatcgcgccgcctatacctattgggtcatgttgactacgttactatggatagtacttaaaggcttcaccatgttcccgccaagatctgggaatgagttacacacagacagacgatgcaccttgaccctgtaatcgatgctgacgtcgtacttgaccaggagggccgtcatctcggtcacatgtgtggagatgaatttctcccagttctgctgtccgatgtgacgcgcctgcctc

SEQ ID NO: 52534 - DNA, 382 bp, Zea mays
  Clone ID: MRT4577_14790C.1
agcgactcagcgagcgagagcagcacacacacagctagataggaacagcggtaggggcagcagcaatggcggcctccatgatctcctcgatagctctggcggtggctcttgagggcctgcctcacctcgtgcggcgcgcctgctgcttcgccttcttctgctccaagaagaagatcaagaccgacatgccctacggcattgggtgcggcctgaccggcgacctgaccgccaacgtgagaaaggacaagggcaagggcatgtaccagttcgtctacaagtacggcgcgaacttcgacggatacatcccaatctacaaccaggattactggtcttccaccggggacgtctacgtcggtggatccactgggcttacgatctgggc

SEQ ID NO: 52535 - DNA, 441 bp, Zea mays
  Clone ID: MRT4577_147910C.1
ctttctttttttttattttttttaccctcttttttttttcttttcttcttgggggtgctccagttcaagcttgcacggggaacatttaagcgaatatcattttttgtgcccgcttttagcatttttttaacttcataacttccggctgatgacaactgtctgaaaagggtaatataaagcatgatggactgaaacattcaaaaactggaattacattttcagtagaggtgcaaagtccaaggcttttgctatctcaaggacacaacggacttcttctagaatggctaacagttacacaatagggtcttgtgattatacggaagctttttcaccatggaacttggcttcctttgttctgtagaagaccttcctcaactattttgaaagctctatgatcgaaagattttccacaggtaatgctggttaatgcctttttcatat

SEQ ID NO: 52536 - DNA, 1487 bp, Zea mays
  Clone ID: MRT4577_147911C.1
cctcgaggccggccgggaccggtcggtcccgagcgacacaacagacagaggaggaaggagaaggatatgggaggcgaggcgggaatggggctccgcgtccgcgcctcctccctcctgctgtcactggtcctcgagctcgccgtcgcgctcgtctcagtgtcggcgcagcacaagttcgggatcaactacgggcagatcgcgaacgacctcccggacccggcgcaggtggcgaccctcctgcagtcgatgggcgtgaacaaggtgaagctgtacgacgcggacccccgggtgctgacggcgttcgccaacacgggcgtcggcttcaccatcgccgtgggcaacgagaacctgcagaccatggccggcagcccggacgcggcgcgccagtgggtggcggcgaacgtgcggccctacatcccggccacgcgcatcacctgcgtcaccgtgggcaacgaggtcttctccggcaacgacacggccacgatggccagcctcctccccgccatgaaggccgtccacgcggcgctcgcggacctgggcctcggcggccaggccaccgtctcgtcggcgcactccgtgaacgtgctcgccgccagcttcccgccgtcgtcgggcgcgttccgggaggacctggcggagtacatgaagcccatcctggacttccacgcccagacggggtcgccgttcctcatcaacgcctacccgttcttcgcgtacaaggcgagcccgggcagcgtgtcgctgccgtacgtgctgttcgagcccaacccgggggtgcgcgaccccagcaccgggctcagctacgacaacatgctgtacgcccagatcgacgccgtgtacgccgccatgaaggccatggggcacacggacgtgggcgtccggatctcggagaccgggtggccgtccaggggcgacgaggacgagaccggggccacggtgcagaacgccgccgcgtacaacggcaacctcatgcagagggtcgccatgagccaggggacgccgctcaagcccaacgtgcccgtcgacgtctacgtgttcgcgctcttcaacgagaacatgaagccagggcccacgtcggagcgcaactacgggctgttctaccccaacggctcgccggtgtacgcgctcagcgccggctccggcggcggttcaggtccgggcgggtcgctcaacccgtactacacatccatgttctcctcctcgtccagatccgcggtgagcgcgaccttcttgacagagagagtgatgctgttactgctgctgcaagcaactgtaatactccgacactactgctagtcagtgaataccttgtaatcttgtatacgaaaaaaaaaatgcatctcaattcaacccatagggtaggccttagattcggaaatttggcacgacagtgtggctgctcgaaaaggtctcatcttttttttttctcttttattcccccgcagcaatgaccttaaagttcttaaaaaaaaaaaaaaaaagcggcc

SEQ ID NO: 52537 - DNA, 906 bp, Zea mays
  Clone ID: MRT4577_147912C.1
tcgccacgcgtccgcgcgctcctatgctccgatcgcgcgtctcgcccatggccaccgtccgtcgtcaagcccctgcgtgcgcggtcctctgccggagctccctgctcgccttctgcgctctgctggcggccagtccctgctcctcgcggcccgcgcgtttctctgttcagccatggccgcgcgccggcgctcttcctttgccgcgtcccgcttcctgcccgccggccacagctcgaagtccctcccattgtgagttcgccgttcctcccacgccgcggtcaccctggtattccagctcgtcgtcgcgttgtttgaggtcaacctcactaaatcgcctcttgctcgacgccggtgatggccgttgtggagcaccgctgcgaactcccagcgttcttgctctgctccaagaaatatcaagcgctgaacagtcatcgttttgttgcgacgtgcgtgtgcgctactcgccccacgtcgtcgtctttgtgtgtctttgtgtctggccagtcccgtcgaggcatctgcaaatcttgcctcttgtcgtcatgttttcttgatctgccaaatcatcgcgcccgtgctgagttctctggccatcacgtttttcttacagacgctcagcctcgccgcgcgtcctgttttctgctcgccagcgcgccctctcggctcgctcgactttaattcccaatcgcgtcgtcgattccgccagttagcgtcgttcgtcgtcgcgtcgcgtgtgtagctctatatacgtcaccctcctgtgtcgtcgtcgttccgcgtgtcagcaagaaatcgcaagaatcgggtgaagacaaagccagcagcgtggtattcaccaagtgcgcaataaaagctcggacatcctgcgcgactcaagttcggttcgtcaaaattattcagtcgagg

SEQ ID NO: 52538 - DNA, 1325 bp, Zea mays
  unsure (1)..(1325): unsure at all n locations
  Clone ID: MRT4577_147913C.1
gcgacagaacagacagaggaggaaggagaaggatatgggaggcgaggcgggaatggggctccgcgtccgcgcctcctccctcctcctgtccctggctctccagctcgccgtcgcgctcgtctcagtgtcggcgcagcacaagttcgggatcaactacgggcagatcgcgaacgacctcccggagccggcgcaggtggcgacgctcctgcagtcgatgggcgtgaacaaggtgaagctgtacgacgcggacccccgggtgctgacggcgttcgccagcacgggcgtcggcttcaccatcgccgtgggcaacgaggacctgcaggcgatggcggccagcccggacgcggcgcgccgttgggtggcggcgaacgtgcagccctacgtcccggccacgcgcatcacctgcgtcaccgtcggcaacgaggtcctctcgggcaacgacacggcggcgatggccagcctgctcccggccatgagggccgtgcacgccgcgctcggcgacgcgggcctcggccagccggtcgccgtatcgtccggccgggaccggtcccgagggctatcgaacgtaactaccatcctctgtctcggcgtcggcgagcaacagaacagacagaggaggcgaggcgaggcggaaatggggctccgcatccgcgcctcctcgcttctgctatccctggccatcgaactcgcggccgtgctcgtctcagtgtcggcgcagcagaaattcgggatcaactacgggcagatcgcgaacaatctcccggacccgacgcaggtggcgaccctcctccggtcgatgaacgtgaacaaggtgaagctctacgacgcggacccccgggtgctgacggcgttcgccaacacgggcgtggagtttatcatcgccgtgggcgacgaggacgagaccggggccacggtgcagaacgccgccgcgtacaacggcaacctcatgcagagggtcgccatgagccaggggacgccgctcaagcccaacgtgcccgtcgacgtctacgtgttcgcgctcttcaacgagaacatgaagccagggcccacgtcggagcgcaactacgggctgttctaccccaacggctcgccggtgtacgcgctcagcgccggctccggcggcggttcaggtccgggcgggtcgctcaacccgtactacacatccatggtctcctcctcgtccagatccgcggtgagcgcgacctttttgacagagagagtgatgctgntactgctgctgcaagcactgtaatactccgaactactgctagtcagtgaatacttgtaatcntgnatacgaaaaaaatgcatctcattccacccct

SEQ ID NO: 52539 - DNA, 1930 bp, Zea mays
  Clone ID: MRT4577_147914C.1
cgggaataacgaaagcgacttcgtacctagagcagttccgtgcgactctatatattccggaagactgaaatatagtatgtttttatggagtgattttatgctgagatttgccttatatactaccaattgaatcacgacgtggatatagtatcttttagtgctactttaggaactctatttttttaaggaatttatattttttaagaaaaaatgaactaattttatttgagaaaatatgaataatataaatctttgaaaaaatgggttttcaaaatggcccttaaagagaagataaaaatccgagacctctgatcattagcgaccatagaaaaagtgagaagatataaatctttgaaagttccggattttaccgagcgctaaccatgagcgcctcgcgtgcgttaaattggcagtgtcggcgcagcagaaattcgggatcaactacgggcagatcgcgaacaatctcccggacccgacgcaggtggcgaccctcctccggtcgatgaacgtgaacaaggtgaagctctacgacgcggacccccgggtgctgacggcgttcgccaacacgggcgtggagtttatcatcgccgtgggcaacgagaacctgcagaccatggccggcagccccgccgcggcgcggcagtgggtggcggcgaacgtgcggccctacatcccgggcacgcgcatcacctgcgtcaccgtgggcaacgaggtcttctccggcaacgacacggccacgatggccagcctcctccccgccatgaaggccgtccacgcggcgctcgcggacctgggcctcggcggccaggccaccgtctcgtcggcgcactccgtgaacgtgctcgccgccagcttcccgccgtcgtcgggcgcgttccgggaggacctggcggagtacatgaagcccatcctggacttccacgcccagacggggtcgccgttcctcatcaacgcctaccccttcttcgcgtacaaggcgagcccgggcagcgtgtcgctgccgtacgtgctgttcgagcccaacccgggggtgcgcgaccccagcaccggcctcagctacgacaacatgctgtacgcccagatcgacgccgtgtacgccgccatgaaggccatggggcacacggacgtgggcgtccggatctcggagaccgggtggccgtccaggggcgacgaggacgagaccggggccacggtgcagaacgccgccgcgtacaacggcaacctcatgcagagggtcgccatgagccaggggacgccgctcaagcccaacgtgcccgtcgacgtctacgtgttcgcgctcttcaacgagaacatgaagccagggcccacgtcggagcgcaactacgggctgttctaccccaacggctcgccggtgtacgcgctcagcgccggctccggcggcggttcaggtccgggcgggtcgctcaacccgtactacacatccatgttctcctcctcgtccagatccgcggtgagcgcgaccttcttgacagagagagtgatgctgttactgctgctgcaagcaactgtaatactccgacactactgctagtcagtgaataccttgtaatcttgtcgatcagagaattcagatgacgggggtggttgtcctgctcgccgcattattcacctgaggcatgttcttcagtgcctcagggtggcgctggcgcctcattcgctgaggcatgtgctgtgcatctgttgcagatggccccttccgttcgtccggtcagggcgcggcggcccaaacggaccagcagatcaccgagagccgtcgaagcattttagcgtcatgcgcaaggtcccatcacgattcacgcatgaggacgtttcagatggggctcagtgcctcagtcttgtcgatgtccgcacagtcgttgctgtgttgttcggcatgttgcatcgaagcatagaattaggactgctgtag

SEQ ID NO: 52540 - DNA, 429 bp, Zea mays
  Clone ID: MRT4577_147915C.1
tttttttttttttttttgaagctcaaaaatgttaatattataaataaataaataaatagaataattaaagagtgagatgagattaatatgggggaagggaagggggaatcattggacagcaaaactccctacaagcgaccaaacatgcggcgggggagttttgggcatggattatttatttggctttattttattttgacttatgctgcttcaacaacgttttttctacagattgcagtataaataatcggctttaatcttaagcgaacaactgtgtggtgctttttgacttttcaaagtcagcaagatcgacgacgcctgatcgaccagccacttgtgtcttggaacgatacaaaactgaacacctggagctgggatctcgtcggcccgccccacgcccagatcatgtgatgccagcgctggatccag

SEQ ID NO: 52541 - DNA, 360 bp, Zea mays
  unsure (1)..(360): unsure at all n locations
  Clone ID: MRT4577_147916C.1
cctctgctgccgtgccggcttcggctatagtgtgttgattgaactcacggagcatgcggactctttgaagacagaaatggatgattaacataaacgcttggatgctgtgaataaatcacttatattcgtggggagggggggatggcgacctcaccccgaggatcgatcgggccttcaaggtgtctgacctgttggtgaagcgaatagatcgcttcaagatgcttcctgctgccggccnggattccttaacccaggcggggctggagttcatatcacagcttgctcggttcgcagatgtggagctggttgctttgcgttcctcctttgccgccctgtgtgctgggctgaaacgttttgctc

SEQ ID NO: 52542 - DNA, 375 bp, Zea mays
  unsure (1)..(375): unsure at all n locations
  Clone ID: MRT4577_147917C.1
gctatgcgctcgggcgtccgactcaaggacatcaatactatatgtctcttgctgagctcagtggatgcgtgggcgtgcacactatactgtagacaactacctgctgcatgaatctctgtcattgttgtccgatgataccggtggtcgtgtacaaccacatggttacctaacacgattagaacagcatggggcaccagaaccgcgggggccacgcggagtaggcgttcgcgcggacggcgaacgatggcgcgctggccgctcatgnggacacgatgagcatccgggcagcgcgcttcaatatcagcgacagactgtactcgcgcgaccacgagaccgtgctgccgctggcgcacggtagacccctcggtgttcccg

SEQ ID NO: 52543 - DNA, 190 bp, Zea mays
  Clone ID: MRT4577_147918C.1
tttttcgcgtgggcaaagagctgagcgggacggggcagctagcgctagggataacgcacacccaccaccatggtgacgcccgtagagcattcggtggaggtcgtgttcgttgagatgctccgaccccgtctggtggaccaagaagtttactcccttgagaggggggagattctcccataatttttttttt

SEQ ID NO: 52544 - DNA, 1225 bp, Zea mays
  unsure (1)..(1225): unsure at all n locations
  Clone ID: MRT4577_147919C.1
cctggccggggccggccggcaagggagctgcagcttatcaccaccgcctcaggctcaggattgcacggctccgccgcgctcgaattccccccaccttccaccaggccagcaccatggccactaccgccctcctcctccgcactcaccaccatccctgcaagccgccggcgccgcgcgcgtccgtactctgccgcgccacggcggggatggctgggccggcgtcggccgcggcgctgcggtccctggccccgcccacgcggccggagctgctgtcgctcgacctgccccgctacgacccagcgcccgcccgccccgtggacctcgccgtggtgggcggcgggcccgcgggcctcgctgtggcgcagcgcgtcgcggaggcgggcctgtcggtgtgcgccatcgacccgtcccccgcggtcgtgtggcccaacaactacggcgtgtgggtggacgagttcgaggccatgggcctctcccactgcctcgacaccgtctggccctccgcctccgtcttcatcgacgatggcggcgccaagtcgctcgaccgcccctacgcccgcgtcgcgcgccgcaagctcaagtccaccatgatggaccgctgcgtcgcccacggcgtcgtcttccaccaggccaaggtcgccaaggtggtccacaacgaggcctcctccctcctcatctgcgacgacggcgtcgccgtcccggccaccgtcgtcctcgacgccaccggcttctcccgctgcctcgtgcagtacgacaagccctacaacccgggataccaggtcgcctacggcatcctcgccgaggtcgacgagcaccccttcgacatcgacaagatgctcttcatggactggcgcgactcccacctccccgaggggtccgcgatcaaggaacgcaacagccgcgtgcccaccttcctctacgccatgcccttctcgcccaccaggatcttcctcgaggagacgtcgctggtcgcgcgcccggggctctccatggacgacatccaggagcgcatggccgcgcggctgaggcacctgngaattcgcatcaggagcgtcgaggaggacgagcgctgcgtgatccccatgggcgggccgctgcccgtgctgccgcagagggtggtaggcatcggcggcacggccgggatggtgcatccctccacaggntacatggtggcgcgcacattggcgaccgcgcccatcgtggcagactccatcgtgcggtttct

SEQ ID NO: 52545 - DNA, 520 bp, Zea mays
  Clone ID: MRT4577_14791C.1
gccgaccgtgcggtgacacaggccatccgcttccatcatctgggctcgagcagcacaacgtacagccaacagacctaattggacgcgaccgacggacctggggccgaggtcccaggccgccacaggggccggaaggatccggtccaggtccgggccaagactgacccaaaggtgctgggcgactaacggccggggatcacgacagccggcaatccgacggccagacaaggaagggggggcctaagcgtatctcccgcctgatataccaggagacccgccgggggctcagcatcttgtatccgagaatgcgatgcagacacctgggacctacacgaagcacgcccgacacaaaaacgcgctcggtatgaacattcattccaccctaaaacgccagcgcctgactatctatagattgagaagatctgataagtgtaggtaataacattgccaggacctttgcatcatgggcgactcacttaaaactaacaaccttggtgcgcatggaagtaccctgggcacc

SEQ ID NO: 52546 - DNA, 502 bp, Zea mays
  Clone ID: MRT4577_147920C.1
tcatttgccacctgctggaccactggttctgcatgaggaaggggaacggggaggggaacaactataatagcatctacccagctccctagcacctgtcgaagctctacctgtcagcttacattgacaccctgatggggacaggctgggggatatgcgcaggtataggcaatttccccaacgagtgccctatggaaaccgatagctctaacggatgctgtcaatggtttacccatggtgacacccggaggataacaggctgctgtacccagttgcaaacaccacctactgcacaagctcaagaccctgtacttgctgaacaaccagaagggatgactgaaagggacatgatcgcagaccagaacgaagaggctgatcagaatgctgctatagctgccagcttgatggacactgtggttgcatctgccagctattccgcaacttgagaacatagtgattcacatgattatcctgatcatgaagcagctccgagcacagataataa

SEQ ID NO: 52547 - DNA, 251 bp, Zea mays
  unsure (1)..(251): unsure at all n locations
  Clone ID: MRT4577_147921C.1
ttgtgcgttcgtccttgngcgcttcgttccctgngtgtcccctgcngtggngttcttgtnggcgttcggttgcccccngtcccttttcctgntcccngccctgcttcttgcctccngnnccgnctngtccctcccttctggtcggcgccgtgttccttcnngttttccctgttcccnggngnttcttctggccttcgtgcnccntgntntcnccngnnngtgggctttgttttncttcnngctgcttttgc

SEQ ID NO: 52548 - DNA, 762 bp, Zea mays
  Clone ID: MRT4577_147922C.1
tcggccgtttagacagccgccgtcccagcgccgtgagtgctctgctgctttcccgtcttctcccttctcactcttctccttctctcaaacgcaccagagagctctctcccaacctcccgtcttctcccttctcgctcttctccttctctcaaacgcaccagagagctctcccccaaccagagaactccgcctcgcccgtgagtttctccacccccaccctgctgctttccccccaccgacgttgtctaggaccggattgaagtgcgccgtgagtttctccacccccacacaatctgttttctgggtgttaatgttctattaaaagttttgttttctgggtgttgaacaatctgtggctgttttcagaaagttctgttttctgggaaaaaaagttctgttttctaggaaaaacaggttcaatgtttaactgtgaactgcggctgatttctgggaacaactggaggctgttttcagaccagcggctgttttctgggaaaatggccagcagcttcacagcgtcctaaaactggagctgggaacctggagctgggaacatgtgcaaatatgtgctgctcgtccaaaaaaactgggaacctgggaagctggtgcaaaaaattgggaggcgcctagggtgcggcgagatctcaggtgcggctagggtgaaaagaacggcggctgctggttgctggtaaagaggagacagagagaagggaaacgagatgtagacgccgtgagattcactgctttaatcagagaagttac

SEQ ID NO: 52549 - DNA, 1345 bp, Zea mays
  unsure (1)..(1345): unsure at all n locations
  Clone ID: MRT4577_147923C.1
ggttttggttctcttccagccagccaccgtatatcgcgcagcaaagctggcgtcagtcccgtcactccctctccgatcgcgcagctttcaaagcgttgggagagatggcagaggagacgcaaccagaggccgccgcagccgccgccgcgcccgccgcggccgaggtagtcgtgaccgaaggcgcgccggcggaggcggaggtgcctgcggcggcggaagctgaagccgaggccaaggatgagaagaaaggtgacgaggcggagctcaccgccgatgacgcgggggtggggaccggctcgttcaaggaggaaagcaacctggtggaagagtgccgtggtggtatctagccgccaacaagatgatgagcccgttcctcacacagcgcaccaagagcaagttcgtctttgctagcccagccaaatcagcagcgactctattcagatacatcgcaccggaacaagttcctgtccaatttggaggcctcttcaaggaggatgatcctgagttcaccacctctgacactgtctccgagctcactatcaaaccatcctcaaaagaaaccgttgagatccctgtcaccgagaactccacaattgtatgggaactccgggtgctgagttgggaagtgagctatggcgccgagttcacccccgacgcggagggtgggtacaccgtcattgtacagaagacaaggaaggtgcctgctaacgaggaaccgatcatgaagggaagcttcaaggcaggcgagcctggcaaacttgtgctaactgtgaacaaccctgcatccaagaagaagacgctcctttacagatcgaaggtgaagagcaccagcgagtgagtgtgaggtcacgccgctagctgcctgggccctacagttaaaacgatctacagcatgatagaagagagaaggaaccttttggtttggttcgttaatttactgggttttttttttgggttcgcattctacattttgtttggttgaaaccaaagtgagcttgtttttgtgacagtagatgggagaagtataatggcattgtgtgatggatggttgttgatgagggcagggaggacgaaaatgtgggggaatgaaaggttggagaatgtctgttcctctgtagatgtgttctgtacattgcatctcttggattctcattgatatgttaaaatttaggagtacttggtcacatcattattcaatccatgttactctgcnnnnnnccgaaatnnnnnnnnnnnnnnnnnnnnnnnnnntggaacactgtctgctgccgctcccaccatttatatatatatgctcatttgcagcaacaaggggatgtactcagaagtgacaaataatggccgt

SEQ ID NO: 52550 - DNA, 1313 bp, Zea mays
  Clone ID: MRT4577_147924C.1
gaacaccctacaggaagcacaaatggctgcgagtaaagcattgaaatggctcatggggagtggtacgagcactgtataagagaacatgctgcaattcatgcactggagctggagaaatcatcatcttcgacagatgctcaaactcgggctacattcagtttaatcattggctaccttgctgatcattgcaacttgcccacgagggagctgctgtcacgaaggttttgccagaatattaagaagcataggcttaggcagcttatagatgatactattggttctgttcctgcagattcttctctgataaactctgtccttgaagtgtgctttggcccatccctccttccaaaaagcattagcgatgtgaagtacctggttgattttgttgaaacagtcatggaggctcttcctgcaaactatcgcctgggcttggctgttggtggattcgtagctaagcacttcacaggttatggcgcagcctccactgggaccaggttctgggcaagctctgttctgatcaatgccatctttcgagctgtacctgtcgcaccggaatcagtatggctagaaggtgcaggcctcctggagaaactgcatgccacagagattttgaagaggttctatcagcaggcggcatcggtctatcccttctccttcaagctgtggcacgcccatctgaattactgcaaagccagtgggagcaacactgagagcatcctggagagtgcgaggcagcgtggcatcgagctgaatctgtcaccaacatagtgtatcccttggatccaagctgcatgatgttttgccagtcggagatgttggtagtgctgtgttaactggagatggcgtgtagatatatcggtgatcatggtggtgtgagatcatttttgttctttaggtgcaggtttagtgggacatagtcgtcggtatcttacagcatgtgtttctgatggagtgatatggttagtaagcagtggtgaaggatacaggcatacgggcactggggcatataccatacttttggactagaccggctagagactgattttggagtccgttatgtttccgttttccgttctcttggttttctctgtcgtcaatgtattataatcatgatgatgaatggatgagaaatgagatgagttttttttgagttcactcatgcagtttcggttattatatttttgtgctgtcttcgaatctaatttggtcgacgggtcccaaagctgctgtgcgtgatttggtcgacggcatgtttgggcatgtatgtttgggcatgtttggaagtaaagtattttaaaaccaggttttggaat

SEQ ID NO: 52551 - DNA, 279 bp, Zea mays
  unsure (1)..(279): unsure at all n locations
  Clone ID: MRT4577_147925C.1
gacccacgacgtccgcaagtcgcgtccgacaccattctctttttatggccaaggcaccgcaatcgggcgcgggtgggtgtggcctcagatcactggtaggcccctgggctctcttactacgtggactagagcnnagttgctaaccttctgccaacgacgtcgcaccatatcaacaagcacaacttccgcttcccctatcgtctgctgttgtcgcgaccttggcgaggcgctcctcagggtgcgcgagggcgccgtcttgatcctcaccaaggtggaggt

SEQ ID NO: 52552 - DNA, 335 bp, Zea mays
  Clone ID: MRT4577_147926C.1
aaaaaattaaacctaactcatgggggcactcgggtcagttcacttccactaaaactaaaaagcacgcactttgcactactgaatgctgtacttgatgcccaacctacataaaatactacttgggcacaacccagacctcacctgatatatatacatgctaccacaccgaaacgtcactatttaggacatataacccatattcttgccctgcataaagacgagattcttcctcacaaacatattgatcttgcacaaagccgagctgatcatgctcccagcgaagtaccgcgcttgatgcataaccattgtcttaacaggttttttcgaaaaatgaa

SEQ ID NO: 52553 - DNA, 392 bp, Zea mays
  unsure (1)..(392): unsure at all n locations
  Clone ID: MRT4577_147927C.1
agcttggatcctctaatttgcncgccgtgttaaggtttcttaaatatcttggtgtggagggaatcctagattacacagacctacacagatctagagacagatagagagcccagcagcagcagctagctagcgcgtttcttcaactaccacaacccaaccaacccttaggntttgctcatttaaggggggggggncncgccgggctcattacacaggcaaaaaaaagctgccccgggggggggaggggggcgctactattcaaggacccgggtacttccatcccatcccttctctacgggtcgagtgaacgggagggactgcatgcctgcaggcagtacatctggccgctggtggcgcgtaacagcagaaagaggccccttccttgactcgac

SEQ ID NO: 52554 - DNA, 267 bp, Zea mays
  Clone ID: MRT4577_147928C.1
atgaactgttgggggacttcttcaacgggggggtgcgttcttcgaaaaaattcacaccgctgtagtggacattttactttacttacctggtctatgatccaaccagttgtagcgaaaaatcaccatatcaattgcggtctagaaaatgggcggcacaaaacatctgggcccattttttttcgcttgcataactaactatctatatattcgagttgcattggatattcccttgcttatcacgtagtgcatgaatgggaatatgggcgt

SEQ ID NO: 52555 - DNA, 691 bp, Zea mays
  Clone ID: MRT4577_147929C.1
ctcacaccaccatcagcactgcacgcaccacccacgaaaaaaaggaaaaactagaaaaacaaaataataagagcgcccaaaaaacaacacaaattgaatcacaaaaaacctgaagaaacatgttgcaaactagagacttgtcttcagtgttcttctcactaaaatagagatccttggccaaggtgattcgaatttgagggatgtcctcagtgcggatcttgagcatcatatcaacaaatatatcccaatattccatgtattgaagtgtgaaaataccgcagtcatgcctatgataattaaagaaggcaaaattactacaagaaataatttgttgtggctgtttttaaaccatataaaatatgtagaaaaaattaagatagcaactgaatttggattctaataaaaagaaatgatagagttgaaacttacgtattttcctactttggtactgtaggatataaaattttgaatgatgatacataagcatgaccaactaaactaggcagagcaactctaactaaggtctaaactaggctaaaaaatgacgatacactacacatggaaaaggcaatgaaaacaaaccaacaaaattgctgaaaatctcggacagatcagacaagagcatttataagacagtagaagtgagcaacacactgggaataagaatacaaacaacttaggaaaaaaagac

SEQ ID NO: 52556 - DNA, 2075 bp, Zea mays
  unsure (1)..(2075): unsure at all n locations
  Clone ID: MRT4577_14792C.1
cggtgcctgccacgcctgtcgcgccgccccccaggcgcacctacagcgccaacacggggcgcacccggagcatcaactccgacgacatgtcctactcctactcggtgttctcgcacaacccgagctgctccctcacgcacaactccaccgacatctacgccgccggggagggcaccaacggctccgtccacagccggttcaacttccgccccatgggggacggcagcgtcgccttcgccccggcgcagctcaaggagggcacctcgtccttcttccccacggagctccccgccaggatggcagccgcgctcagcgctggcgccagctttgacgccagccatggagggatgcactcgtcacggcctcataggatcctgcgggagatcgtgtcggaccctgtgccagccatggctcaggccctgcaggattttccgagtgaaaccctggaggtgctgcgggagacagtgcggggtatggttgatgctccggagaagagggatgaactgtcgagcctgcagcggaagctggagcgtcgctcggacctgactgccgaggtgttggggcgggcaaacaagacgcagctggagatcctggtggccatcaaaaccggcatggccacttttgtcactggtaagggccgagtctccagcagcgagcttgtggagatgtttctgatgacacggtgccgcaacctgaactgcaagagtgccgtccctgtggacgactgcgagtgtaagatttgctccaccaagaagggcttctgcagtgcgtgtatgtgcccggtgtgccagaagtttgattgtgctgcgaatacatgcagctgggttggatgtgatgtctgctcccattggtgccatgctgcatgcgcgctagagaagaacttgataaggccaggtccgacattgaagggggcgatgggcacgaccgagatgcagttccagtgcctcggctgcaaccatgcttctgagatgtttgggtttgttaaggaggtgttcaattgctgtgctcagaactggagtgctgagacacagattaaagagctggactttgttaggaagatatttgctgctagtgaggatttcgaggggaaggggctccatgccaaggcagaagaggtcctcagcatgcttgtaaagaaactcatttctccttctgatgcgacgaacaccatgctacaattctttaaatatggtgtaacagactgttctgttactggtagcaagtcaaaaggaatactggcggctcagacgagcaaatctacagatatgctccatcttcagaccccaaccatcactccgccaaaatccccgttcaacttcaagcccagcacctccattcttgattcacagatcgatgtgctcaaggccagcccaaaaccactccctatagaaccccatttcagctccagctcaaaggacgacgactcctccagccttgagaccatcgtgaagtgcaaggaagctgaggcgaaactgttccagaaactggccgatgatgccaggaaggaggtagacagctaccggcagatcgtccgcaccaagacccagaaactagaggaggagtacgccacgaaggtggcaaagctgtgcttccaggagacggaggagaagaggaggaagaaagttgaagagctgaagacgctcgagaactcgcactacgactaccacaagatgaagctgcggatgcagaccgaaatccagggcttgctcgagcggatggaagccacaaagaagatgtgggtataggctcctgttaacaatttcatgttgctgctgcttaatgtttcgggtatagactccagctaacaactgcctgatgctgctgctgctgctgaatacctgagatttggtgttgttcgttaggagagtgtccattgttgtattttttttcaccatcttgtgttataatctaaatgctgttgtaacttgcaagtggatgcctagccttgcgcttgctgatataacttggcagcattcactcagttaatcacttcagggttgttccgagttcaaagtaaaaaatggccaaagaaaaaaaaaaaaaaaaaaaaaaagnntcgacgcggccgcgattcc

SEQ ID NO: 52557 - DNA, 752 bp, Zea mays
  unsure (1)..(752): unsure at all n locations
  Clone ID: MRT4577_147930C.1
cctcgaggccggccgggcagcgtctacatcaacctcacgacaccaaggagagtacgtggaggagcagccatggtttcatctgtggccgccgcgacaagcacattcctgggcacccgtctggcggatcctgcgcctcagaacgggcgcatcgcgccccggttcgtcatcagattgggtgcctaaggcgaaactgctccgaaaaagggcgaacacatcgacctcctctgatcgtccgctgagagttccccgggagccgctggcgacccgacatacctgctacggagtcactagctacctgactacatgttctatccgatcggtctcaggaaccccgtgaacgtacctgcagatcgagttggactctatggatacgaacctgttcaacagtgaggccggcgacatcatctgcacccggactcgagtctcatccagaatgatacgtcaccccggtgccatgctacagggaggtgttcctgctctaccggatccgcgagagcagagctcatcctcagtggctgggccatgctcgccaccctcagacgccctctccgtctagtggatcaccgccgtctcctgtaatgacgccacaaatgcgcatctggcggacggtcctaaaatccgtgggaagagccgctgcgttctccatctcgacgctcatctgggatcgaggtgctcgtgatcgcctacatcgagttccagcgcaacgccgagctcgnaccccggagaagaagctgtaccccggcggctcctac

SEQ ID NO: 52558 - DNA, 318 bp, Zea mays
  Clone ID: MRT4577_147931C.1
aaccttaaggcacccaataaatcgatagaagggcgcaggctaacatagctcaactgttgacacaataacactgacgaccacaaacaacacttgtaacgatgaaaactatgtattgataaagccagcgcgggaccttatgatctcttgttggcatcagcctaggtcaccgtggcgcaggctgggtccttattctgcacactgtcgataactccagcaggaaccgcgtgcctcatgtcacggacagcaaacctaccatggggagagaacgctgagaatgactccaccaccatgggctagacgggtatcatcttcaccata

SEQ ID NO: 52559 - DNA, 1495 bp, Zea mays
  Clone ID: MRT4577_147932C.1
acactgtatggccccgccagatccaagccgcgacccagacggcaagatagagcgagcgacctctcgattctccccatcccgccgtgcttcccgtcttcaccaaatccttcgccacgatggcgcgcctgctcatccccctccccttcgccgccgcctctgcctcatcgctccacctcgccgtctcccgccttcctctcgccgcggtctccgccgcgcgtcgcgagtgtctctttgggggaagggtggtaggaggagtggtgagggcgcccgcgaggctttctaagcgcgggttgtgcgccggcgcagaggctggcgactcggccgtcacggtggaggccatggaatgggtcaagaaggacaggaggcgcctgctccacgtcgtctaccgcgtcggggacctcgacaagacgatcaagttctacacggagtgcctgggcatgaaactgttgaggaagagggacattcccgaggagaggtacaccaatgcctttctggggtacgggcctgaggattcacattttgttgtggagctcacttacaattatggtgtggagagctataacatcgggactggttttggccactttggaattgctgttgaggatgttgcaaaaacagtggaacttattaaagcaaaaggaggaacagtcacaagggagccaggtcctgtcaaaggtgggaaatcagtaattgcctttattgaggatcctgatggttacaagtttgagcttatagaaagagggcctactcccgagcctttgtgccaggtaatgcttcgagtgggagatcttgatcgtgctataaatttctatgagaaggcatttggcatggaacttcttcgcaagcgagacaattctgagtacaagtatacgattgcgatgatgggatatggtccagaagacaaaaatgctgtattggagttgacctacaactatggggtgaaggaatatgataagggaaatgcttatgcacagattgctattagtactgatgatgtctacaaaactgcggaagcaattagagtaaatggtggacaaattactcgtgaacctggcccattacctggcatcaccaccaagataactgcatgcacagatccagatggctggaaaacagtgtttgtcgataacatagattttctgaaggagttggaagaatgagctttgctagagatctcaacttggtacatcaagctccatacggttgcaccccgtgagttccatgcatgacctgcaaaatctttgtaaagccacagcctcaaactgaggattgtagataggtcgtccaatctacggcatcatcgcaattgatagttgatagagcattagattttccttgcagatctatatagatgcgcaaccgtttttgtattatgcattttaatgcataagttcaatggaaatgattcatgggtaagaaaatcgtcttctttcaagcggcaatataagggctggtttggtgacttgaaaaactaaaaaaaaaaaaaaaaggccct

SEQ ID NO: 52560 - DNA, 345 bp, Zea mays
  Clone ID: MRT4577_147933C.1
gttataaaaccgcttcaccattttataccgtgtcgggctctatttaaaagctggcttgccttctcaaacttgtacattgcaatgtccttctgcggcatgaaattaacatcatcgttatattttgaatggaaatatacatccacactattagaaatgaataaaaaagttcgcagattgccagatgcctaaaaaaagactggctagagtgataaagatagaggtgactaatagtgagtgatggatgcaagaaggttcatacgcatgcgatcttcttcatcattccaatggacttgccgatggcgttcttgcaaaccgacatggtcttgttgtctgacctcttgtact

SEQ ID NO: 52561 - DNA, 259 bp, Zea mays
  Clone ID: MRT4577_147934C.1
attcggctcgagattgctaacaaggtcattttttttcaagtggccaaaatctgcggcaaaagctggtgtactttgcagattgtgcaggcagtgattcatcagtgagactgcactgcaggctcactcgaaggcgaagcatgggggcaagtgaatcgaatgttcaatggagtcaacaacagatgctaaacatgggagaggagggttagcgagagacttgaaagagtgtctggggaagtagcactaaccttatttggcttag

SEQ ID NO: 52562 - DNA, 2005 bp, Zea mays
  Clone ID: MRT4577_147935C.1
ccccgcggctgccgcgcgatgcggggtagcggtggtgctgtcgcgcaggaggagtcggcggcgggaggcggaggacgagaggaagaggaaggcggccgcggtaatcgaggaggtggagcagcggctctccacgcccaccgcgctgctccggggcatcgcggacgccatggtcgaggagatggagcgcggccttcgcgctgagccccacgcgccgctcaagatgctcatcagctacgtcgacaacagaagttcagtgcctgcctagaggcgacgctcacagacctgctcggcgaggaggttctttcgtgtcatccgggtccaacttggcggaagggacagacgtgtcgtgctgcaacagtatgaagaggtctccattccgcctcatcttatggttggaacttggagggcgggggttgatttcattccctttttttttaagtttcccaccatttcccccttcaatcgagaagcccccctcgtgcgattcgcatctctctattttcttccctttcctgcgcgatatagctaggatcgagccattgagcttggagtacattatcactagcaacaagcattagcagcggcaggaaagaagtggaagcggaggcctgaataagccgtgccatggaaaggcagggtcttgatatgaaagttgcagctctggttaatgatactcgaggcacattggctggtgggagatatgctgataatgatgttgttgctgctgtaatattgggcactggcacaaatgcagcttatgtggaacatgcaaatgtgattcctaaatggaccgggctgctacctagatcagggaacatggtaatcaacatggagtggggaaacttcagatcagataaacttccaaggtcggagtatgataaatccttagacttcgaaagtttgaaccctggtgagcagatatatgaaaagatgatttctggaatgtatcttggagaaattgtccggaggatcctgctgaaactggctcatgatgcttcattgtttggggatgttgttcctccgaaactggaacagctatttatactgaggacgccagatatgtcagccatgcaccatgacacctcacatgatctcaaacacctgggagctaagctgaaggacattcttggggttcctgatacttctctggaagcaagatacatcactcttcatgtgtgcgaccttgtcgcagagagaggtgcacgcctggctgctgctggtatatatggtattctgaagaagctgggtaaagacaaattgctaggtgactttagccaacaaaggactgtagttgctattgacggtggcctatacgagcactacaagaagttcagtgcctgcctagaggcgacgctcacagacctgctcggcgaggaggttgcctcatcggttgttgtcaagttggccaacgacggctcaggaattggagctgcacttcttgctgcctcgcactcccagtatgctgaagctgcatagttctaggagctcgggggtcctagtgtaacctttttttttgtttcccaccatttcccccttcaatcgagaagcccccctcgtgcgattcgcatctctctattttctttcctcagcagcgggatatagctaggatggtgccattgagcttggagtacattatcactagcaacaagcattagcagcggcaggaaagaagtggaagcggaggcctgaataagccgttccattcctgccgattctttttcttcccaatcccttgaagtttgtattatgaggcgatatcacaaaacagccagttcttatctgtgtgatctcgtctttcaaaataaggagagaggtgggggaccaaatcatacagtctttactcattttttattgaatcgtgcagtgcttctgcctttatttcagaaacaactgcaatggcaatatttgcttgttcttaaaaaaaaaaaaaaaaaaaaaaaaaaaaaaaaaaaaaaaaaaaaaaaaaataaaaaaactcgagggggggcccggtacctaattcgcc

SEQ ID NO: 52563 - DNA, 560 bp, Zea mays
  unsure (1)..(560): unsure at all n locations
  Clone ID: MRT4577_147936C.1
gtaccctcgagctcggcccgggngtggcacctcggcaaagaagtgaaaagcagtctttgccgagtgtcccgggatggcactcggcaaagaaggcgcctttgccgagtgccgccgatctggcactcggcaaaccatattttaaaaataaaaaaaaaatctttgccgagtgccggatcgcgggcactcggcaaagaacataaacttagccaatccgaccggttctccttcttctctctctcactcacgctcactcgctgcacgccgccgacgcccgcgctcgcccgaccccgactacgacccggcccttgacatcgaacgcatcgagtacgtctcgcctctcgcgtgccttatatttgatatttacatatataacatgtatccgtcgttgcaaatctatactattaactgctgccgtggtcgcctgatttccggccttgctacaagcatatgatgctaccgtacgctggaggaggaggtacctgggacccaaccccgtctcgatgccgcccttgcttctaacgcttagagtacgcctcgcctctcgcgcgccttacattttt

SEQ ID NO: 52564 - DNA, 392 bp, Zea mays
  Clone ID: MRT4577_147937C.1
agctaactgactgaatacctgctcacacacaggtgtgcctgctgcccgttacgcatgccaaactcaataactaccacaggggctcgatggtcatgaacactgcgcaacgttgcttacggtaccgtagcttcaaccaacgtcaacggctgctcctagcagtgggtcttccctggcctacctgttcactggcaactgatgcccctgctggtgcgctcaccaaaaatatccttccctgcctgctgggcgctatgtctgaatcgtgaacaaccgatgtcatttcatgtttgtaccccgtgccatgctttatgcgccaggttgcttactctgtggcaatcttccctaccaccatgacttcgacagctgcctctaaatttcaccgtacgtggcgtgcc

SEQ ID NO: 52565 - DNA, 803 bp, Zea mays
  Clone ID: MRT4577_147938C.1
tagaagccgttcccgacatacgtgctgtacctcgtcgtcatcatagcaatgacagagctgatcggcatggtggagatcaagtgggcaggcctcacgctgctggactggatccgcaacgagcagttctacatcatcggggcgacagccgtgtacccgttagcgacgctgcacatcgtgctgaagctagtccttcgcgggaacggcgtttcgttcaagctgacggcgaagcaggctaagagcaccgtgaacgagaagtacgctgagatgtacgtggtgcagtggacgccactgctgatccccacaatagcggtgatcgccgtgaacgtcggagccatcggggcggcgatcggcaaggcggtcgtcggggggtggtcgctcctgcagatggccgacgcgttcccttggactggtgttcaacgcgtggatcctgctgctgatctacccgttcgcgctcggggtcatggggcggtggagcaagaggccctatatcctgttcgtcctgttcgtgattgggttcgctgtagtggcggcggtggttgttgccatccatgctgcgcgcactggctctgttcggttccattccggacattcaggcggtgctagcttccctacaagctgggggttttagatcgcgttcatcattggttagtggcattggttgcaggttgttccattagctgagagcttcttcgctgtggagttcctacttgatgtaaatcgtgcattgattgtacatgtttgttcagtgaatggtttgtaaggaacaaaaaatggtggtaaagtgaaagcacatttctgccttg

SEQ ID NO: 52566 - DNA, 831 bp, Zea mays
  unsure (1)..(831): unsure at all n locations
  Clone ID: MRT4577_147939C.1
atcctcccacagcttagcatttaaccaccagtgccttacgcactctcgatcaacaaactctagcccatcagttgcatagcaagcaatggggtgctctaaaaccctagtagctggcttgttcgccatgctgttcctagctctgaccgtcctagccaccgaccctgatcctctccaggacttctgcgtcgccgacctcgacggcaaggcggtgtcgttgaatgggcacacgtgcaagcccatgtcggaggccggcgacgacttcctcttctcatccaagctggccaaggccggcaacacgtccaccccaaatggctcggccgtgacggagctcgacgtggccgagtggcccggtacgaacacgctgggtgtgtccatgaaccgtgtggacttcgcaccagggggcaccaacccgccgcacatccacccacgcgccaccgagattggcatcgtgatgaaaggtgagctcctcgtgggaatcctcggcagccttgactctggaaacaagctctactcgagggtggtgcgcgccggagagaccttcctcatcccgcggggcctcatgcacttccagttcaacgtcggtaagacggaggcgtccatggtcgtctccttcaacagccagaaccccggcatcgtcttcgtgccactcacactcttcggctccaacccacccatccccacaccggtgctcaccaaggcactccgggtggaagccggggtcgtggaacttctcaagtccaagtttgccgctgggttttaattcctggnagncttccctgaaatgatncacatatggntccatatatgcatgctatcaaaatttataattct

SEQ ID NO: 52567 - DNA, 407 bp, Zea mays
  Clone ID: MRT4577_14793C.1
ctgagacattacacaatcaacctagatgtccgctaccggggtcttggactcgtagatcatcaacgacccaccgaacgagactggccacgttccgtgggaagcttaccggtgctcctcgctcgtgccatagacaagccggagatttctgcgcgcagacttggtgctcggctagttgctgcagaacctgacagccgtgctattgagcatgctggaaccacgacaaacaacggtactgcgtgcaagcgcagccacagcaggcggaggccggaacgccgaatcacgcaggaggctatgactccactgactggatagactcgcgcttgactcggccttccggaatccgtgctgtgctggtgtgctcgcacttactggccgtgagtctctggttccagctgctcaatacacgc

SEQ ID NO: 52568 - DNA, 234 bp, Zea mays
  Clone ID: MRT4577_147940C.1
atctatagttcctttcagcgctgaaaccagaagtttttacagcagcttgaaacaaagtattcatcggcgccatattattaactctgcagccgggatccatagaggctaaacataatatcgtatagcactctgctatctgaggaaatatcaattatcccttaggaaacttctaacttaagaaatataaagagacacttaggccaatattcagccgtcccccacaacaaaacctta

SEQ ID NO: 52569 - DNA, 356 bp, Zea mays
  Clone ID: MRT4577_147941C.1
caccttggcaaggtgaggaacgcaacgcaacccgaccctccttgaaaagcgggacgtgcatgcatgcatgtatatgtccacgcatcggcaaccgccgcaaccggcagcttaccagtcccagcccaatccggcacgtttgtcgcgagcaccagccactgaacccccgaaggaaaacctttaccaaggccttgttaagcttaaagaaaaacttatgcttgttggctttgtcttgcttgttcttggtctcttccaagaattggttcaaaaaaacttgattgaccaccagcttattgaacacttgattccctgcccgggttccaaccccaaccgcttcggttaataccggggcttcttct

SEQ ID NO: 52570 - DNA, 282 bp, Zea mays
  Clone ID: MRT4577_147942C.1
ggaagctacaacagcattttgattataacacacgatggtgaaagaaaacacaacaagggacactctggttacgaacaacaccaaatgtgaggtattgagctgcagcagccgtgtcaggcagctgttagctggagtctatacccggaacattaagttgcagccacatgaacttgatcacaggagcctatgcccacatattctttggggctatcatccgttggagcaagcactggattgcggtctgaatacggagcacaatcttgtggtagtcagtggtgcgag

SEQ ID NO: 52571 - DNA, 353 bp, Zea mays
  Clone ID: MRT4577_147943C.1
aaatacataataattatgatttttttaataagacgagccggcaaactttataaaaaaaagtcaaacgacatcctttgtgggacggagtatgttgtaccagaagtaaaacgtcaaggcagcaatgttttggcacggtagaaaattggttttctttacctcaagcatccacctcacgtatttgacattgttgacgtggtggttcatgtccagatcacttcgcttgggctacaaataagtgccagtgccacattcatatcaacttataaatcactttaattttattccaagtaaaacaacttagctaaccttactgcgttaaattatagtcgttacatgtgagacagttatatgag

SEQ ID NO: 52572 - DNA, 113 bp, Zea mays
  Clone ID: MRT4577_147944C.1
gtttgatagcctgttacacgactcctcaataatcaagtagtgtgatggactacaaacccaaccgcggccatattgggtttgctgaaaaatgctgaaaagtaacgctaaatatg

SEQ ID NO: 52573 - DNA, 281 bp, Zea mays
  Clone ID: MRT4577_147945C.1
gggcgccccccccaaccggcggatgtccaaagccggccgagttcgtggtctctaaggtggacgacctgatgaactgggcgcgtaagggctcgatctggcccatgaccttcgggctcgcctgctgcgcggtggagatgatgcacgccggcgcgttccgctacgacttcgaccggttcggcgtcatcttccgttcgtcgccgcgccagtccgattgcatgattcgcgccggcacgctcaccaacaagatgggttcggccctttcgaaggtttatgaccaaatg

SEQ ID NO: 52574 - DNA, 491 bp, Zea mays
  Clone ID: MRT4577_147946C.1
gtctccatcttaaaaccaccttttgttaatccaaggagatagaagggccaaccacaaaactcccagaatttagggcaggggaaaaacgagggctcccctggcccaacgctaaacagaaccaaaagggagggggcggaaaaggccaaccaacgccccaaccccaggcccagcccatcagctattcaaacatcacagctacagcaaaatccttcagcggccccggagaaggaactttcaaacccagagaaaccaccaaagaccggcctgagccacttaagggcccaaaaaggcgacgggcccaagcaaggaggaggggctcatctcttttcccaaaaaaaacaaacacattggggggtggggcggaaaaaacactttcatctttcttggcaggtagtaggggccccaagcagccgatttgggtcacaatcaccgaaccgtaaaacaggaagggaaaaggctgggcccctgcctgagcttggggcaggtgttcg

SEQ ID NO: 52575 - DNA, 298 bp, Zea mays
  Clone ID: MRT4577_147947C.1
ggacctttgacgcatgctcgtatgagagccaggatgtggcggcggcggcggttaacaacctcaccgtgtatcttggcggatcaggcctgggatctaggaaatgcagtagttatcctcctctcccctggtcgtggtctctctctggttcactcagcacacgggtgttctagcaatcccctgctcctctatcgttccagttcctgtttgcctgagtagatttctctgttggtgattgctcacgggagttggaggagacgctgtgttcttgcagcaaggtcctttgtgtgcctcactgctc

SEQ ID NO: 52576 - DNA, 143 bp, Zea mays
  Clone ID: MRT4577_147948C.1
ccagttgtggatgcattatgccaagttggccgggttgatgaagctttagctgtgtttgatgacatgaacgaaaagggtatgtcgcctgagcagtattcctatgactccttaatatctgggcttctgaaagctgatatgtttga

SEQ ID NO: 52577 - DNA, 340 bp, Zea mays
  Clone ID: MRT4577_147949C.1
cggacgcgtgggtgctgaccgcgtggtccgcgcatgtctacactgtgtgtcggggcttgccctaggtggcgcgcgagctttcctccgacactcatcggtcggacgtgaggggaacaacccgtgcggggcttgcgataacggagccggtggtgctggactatgtacagtcgcatggagtctgtgttcatagacctctacgtgcgatacaagtccgtggcggagcacctggcacgttgctcctgttgctcgctgaacggcctgccggagttcccgcacgtgggaaaaatcgttgtgctcaacagacggcactggaccgacaagtacaacatggcggtcgcag

SEQ ID NO: 52578 - DNA, 562 bp, Zea mays
  Clone ID: MRT4577_14794C.1
gaagtcgcaaggcacgccgtaccgtaggctaggaagcctctgaggggccgccccccccccccccccccccccccccccccccccccccccccccccccccccccctcccctttttttttttcttttttttttttttggggtttttgtttttttatggtgggggtttccaattttaaagtcaataattaaaagggatggggaaaagggggggggaggaaaaaaaaaaaaaaaaaaaaggaaggaaggaaaaaaaagagaaagggaaaggcaaagcctgcccacagcgaccttaaaaaaaatcttaaacgcttactaaaaagggccgaaaaaaaaaatgaaaaaaatttttttatttatctaaaaaagggcaccaaaaatttttttaaacagcggccggtggacctttgaaagggggaaaaggccaaaaaagaaggggaaaaaaagggggaaaaaaaaaacgggaaaaggggaaggaaaaggggaagaaaaaagggccccaaaaacggcccaccccggaaaggaaaagcgggacaggaaaagggcaaaaaaaaacaatccaagg

SEQ ID NO: 52579 - DNA, 479 bp, Zea mays
  Clone ID: MRT4577_147950C.1
ggtgttttttttttttttttttttttttttttgtgtgttttttttttttttttttttttttttctctcttttttatttttatcaacgctgctgggggtcattggtgtccccggggcttacatttttccaccattatccccccggtgagggggccgaaggggcgaaagaaaaagctgccgtttcttgtcctccaacgtatttggttcccgggggagggcgcgcaaagaagaatttccaggggaaaaaaaacttctttagctagctgggggttaaattcatgcctaactcaggagtcaacctaaaatatcctccccatcatcgtcgtcggtctcccccccctttctgtcgtcgcccggtttgttttgcctccttaatctgcccggcaagccgtgcttgggcccggggaacgggctgttctcgtcctcggccctggtccccccggtttgccccccgcgcttttttttttcgggcttgcgggg

SEQ ID NO: 52580 - DNA, 940 bp, Zea mays
  Clone ID: MRT4577_147951C.1
attacaggcggccgggccgggatccatccctgtctcccccctccctcgaccctcttaactgcaagcaagcaatgggggctccgaaatgggtggttgcgccattggcgctgctgctcctcctgcagctcgccggcgcgtcccatgacgtccgccggagcctcgaggccgaggcggcgtcgccgtccgtgccggcctccattctcagccccctgctccggacgggctaccacttccaaccccccatgaactggatcaacgatccgaatgggccactctactacaagggatggtaccacctcttctaccagtacaaccccaagggcgcggtgtggggcaacatcatctgggcgcactcggtgtcgcgcgacctcatcaactggatcgccctcgacccggccatcaagccctccatccccaccgaccagttcggcgtctggtccggctcggcgacgatcctgcccaacggcacggtggcgatgctctacaccggcatcgaccgcccgggcaccaactaccagatccagaacatcgccttccccaaggacccctccgacccgctgctccgcgagtgggtcaagcccggctacaaccccatcgccgtccccgaggccggcatgaacgccacccagttccgcgacccgaccaccgcctggcacgccggcgacgggctctggcgcatgctcgtgggcggcctcaagcccggcacgctccgcggcatggccatcctgtaccggagccgggacttcaagcactgggtccgcgccaagcacccgctccactcggccctcaccggcatgtgggagtgccccgacttcttccccgtgcgcgagccgggcgacccggacggcctcgacacgtcggagtttggcccgcactacaagtacgtgctcaagaacagcctcgacctcacccgctacgactactacacggtcggcaccta

SEQ ID NO: 52581 - DNA, 764 bp, Zea mays
  Clone ID: MRT4577_147952C.1
acctcgcccccgcctgccgagatgcctcgtgcgtcttctttccttggctgtcgagatgccgcgcgacgcccttcctccccaaatgctgctgagtccccccaccaatggcgcccttccttctccggctgccgagatgtcgtacggccttcaacgcgggatctcgccccatggccaccaacgacgctcttccttccccggctgcaaggatgcgactaccccaccaacggcaacggcaccgttcctcccccacatgctgcgcgcggccttcaacgccggatctcaccccatgtccaccaacggcgtcgttccttttccggctgcaaggatgcgactaccccaccaacggcaacgctgcccttcctcccccacatgctgtgcgcggtcgagatcccgcgcaactctcccaccaacggcgtccctcctccaccaacggcgcccttccttcccgcggctgccgaggtgccgcgcagcctacaacaccagatctcgccccatggccaccaacgacacccttccttccccggctgccgagatgcgaccaccgccgctcctcgaggaggtggtgccgatgtacctgcgacctgctccttccacctcctctcctttctctgagaacaccgccaacctgctcaacctggcaccgccgcctccatatcaaccgtctcccgcatggtgtctcgacgtcatccctcgctgagcaccccctcgtacttggccatgagcgatggcatgctgaactcgcgttcgttcgggtcatcgcttgg

SEQ ID NO: 52582 - DNA, 252 bp, Zea mays
  Clone ID: MRT4577_147953C.1
gggggggtcctaatatatatagtgtggtacaaaacctcggtacttcagctaaaaacctcgcattgaacttatgtaaattctgctaaagacgccactactagcataccccagcaaaaggctcccaactgggttgggacgagctgcgatgccaaacatgcacaatcaacattaccaagttttggctgatgccttagtcgattaggttcccgttggggacttcttatacacactcttgagctcacgcggaggaat

SEQ ID NO: 52583 - DNA, 349 bp, Zea mays
  Clone ID: MRT4577_147954C.1
ccattagtgtgcaagacgaaatgtgacagcacattgatcgttaacgcctgcaacgagtcatatgccctaacacaacaaccatacttagggcatatgtgtttccaaagaatgaaaacacaacaactacaacaacattggctaccaacaatcaatcacttatgtgcagcgaacattgctgattatttccagcaacaacaattaattgcattcaatcaactagctggggtgaaccctgctgtctacttgcaggcacaacaactactaccataaaaccaacttgtcgggagcactgatgcctttttactgcaacaacagattgtgccatggcatctgcaagctgtggaaaaca

SEQ ID NO: 52584 - DNA, 338 bp, Zea mays
  unsure (1)..(338): unsure at all n locations
  Clone ID: MRT4577_147955C.1
aaaaaacaaaataaaacccttgagttagcacggacacccttgccaaataaattcaggggaacaaaaccattccacatggactttcgggaacacaaagcnntttaatttggccactaccagctttctaaaaaaaaaaaaaaagggaatggaaacaaaaatagtttcaataatggcccataaaaattttcccagcataaaacttttaaaatattggggtttaaaaaaattttcacccccctcaaaaattacttgaccttcccttgatataatttaggggtttatttttccttaaaagaacaatctctttttggggctgatgttaaaaaggtcaaattttt

SEQ ID NO: 52585 - DNA, 1121 bp, Zea mays
  Clone ID: MRT4577_147956C.1
ccgcgtcgacttttttttgtttcgccaacagagggaaggtactgctagtgcatatggacaacggccgtgacgtcatacagcgcaacaaaccagagcgggtcggatggttccactccgtgcatgcaccgtcacgaacacggaacaccatgagcgagcgagagagccaacgccgccccgatgcttacagtccactccccaccgcatctgcatgacgccatgcgcgcgcggctggtggcactgccgcactggcaccaccccaccctcctagctaggcgcttacagtataaatccagcaacagacgcgaaggaacgtacgccgcaggctgtgtacctggccgtgcatctagtaagtagccatggaagagttccaggaagccgacatgctgtggccggacgttgcccttgcccacaaccacggctaccaccgccaccaccgcccggccgactcccacggccgctgccgccagcacctcacagtcacagatcagccgcaacaaccacgtccaggcgccgcggtcgtccacccactacagtcctcgcctgtgcgcatcccctcgatgccgccgacggggccgcgcccgacgagcaggggttcgtggacgcgcagctacaaggaggaggaggacgacgacgacgatggcgcggaagaagtgggggtcgtgccgccgcacgtcctggcggcgaggcggtgcggggaggagcggagagtggcctcgtcggtgtgcgtggggcacggccgcacgctcaagggccgcgacctccgagccgtccgcaacgccgtgctccacatgaccggcccggccggcagctccgacaagtagattattaaacatctcgctatattccggcaatattaaatcaggaatgacggccggatgatagtctatatttaagttcatcaagtcatctagtagtaacaaaatacgttcttttttaaaaacgtttttttaattaggagacctgcttctgatttcttccaggaatgggccgagccggccccgtggccctaagtccctttttaagctttttagagtaaatagttttattagtttaatatatagtatagatcgatctattttttatatctataaacagttaacccttgatggtaaaaaaaaaaa

SEQ ID NO: 52586 - DNA, 322 bp, Zea mays
  Clone ID: MRT4577_147957C.1
aaaccgggggggtttcatccttataaaacccactttcactttaaaaaaaccccggcacgtcattaaatttgtttacatcatcaacattgtttttttgaaaacttattacatgtaaatggaactttaatgaaaggtccgatgggtctggccttatataaaacacccctcggggcatggagggggctttagccttttggtttacactgccaattggtttatttccaaaaacgatttgtttttcaatgtaaagaaaactggaaggaatgcttctaactactggaggacagaaacaaaccacctgggcccttaaatgttgtttggg

SEQ ID NO: 52587 - DNA, 1014 bp, Zea mays
  unsure (1)..(1014): unsure at all n locations
  Clone ID: MRT4577_147958C.1
ccggccgannnanaaaaactcctaaaaaaaataaaaaaactcgacgccggccggggtgcttcctgcgtccccgtcctggtgatcacgcccagatcaaatcctattcaaatttggagcgcaatatggctgaagagaagagccgtccgcggctgaacgagcggatcatgtcgtccctctcaaagcggtcggtcgctgcgcattcctggcatgaccttgagataggacctggagcccctgctgttttcaattgtgttgttgagatcacaaagggcagtaaagtgaaatatgagctagacaagaagaccggaatgatcaaggttgacagggtgctatactcatcagtggtctacccacacaactacggtttcattccacgaacattgtgtgaagacggagatccaatggatgtgctggtgttgatgcaggaaccggtgatacctggctgttttcttcgggcaagggccatcggccttatgcccatgattgatcagggtgagaaagatgataagataattgcagtttgtgttgacgatcctgagtaccgccacttaaccgatctcaaggagctttctccgcaccgccttaatgaaatccgtcgcttctttgaagactacaagaagaacgagaacaaggaggttgctgtgaacgatttcttgccaccaactacttccctggaggccattcaacactcaatggacctgtacgctgaatacatcctgcacagtttgaggcgctagatctggtttccagatggaacagtccctctcctggtctcagggggaaaaaaaataagcaataaccgatcagcctcctggctttgtttcaggagccgttttgcggtatatataacttgatcaagggataatgtgattcttctgcaagttactgcatataatatgctaaccatgagatatatattgtctacttctgtacatttttgtggaatatttgagtcaacgattggagtctcttcttgctttctgtaaaaaaaaaaaaaaaaaaggcgcggccgcg

SEQ ID NO: 52588 - DNA, 432 bp, Zea mays
  Clone ID: MRT4577_147959C.1
ccggtaccggaaccccgggctagttctagcacgcgggcggcgccctttttttttttttttttttttttttttttttttttttttttttttttttttttttttttttttttttttagcccaaagcaaaaaattttcaaaaaaaaaaaccccccaaaaatcaccagagcaaaacaggggggcatttgcaaaaccacggggccaaggttcaaaaggaaggggggcaaaaccgagaaataagggcaaagcagccaaaacttcttccccgcccccggtctcagcaagggggaaggaccccagcccaaaaaccccgggggccctggggggggcaatcacacggggccaaacccgcacccggggcgtcttcaaggacccccggggcaagccccccagaaaccccttggggaagggccccgccccggggacggggacccc

SEQ ID NO: 52589 - DNA, 904 bp, Zea mays
  unsure (1)..(904): unsure at all n locations
  Clone ID: MRT4577_14795C.1
cgaagagagcattccttgaatgtaattacaatgtatgccctttgcccttcataaggtgtgataactccgatctgtgtgaaaaatgcatgagacacaccatcagggattttgacttcatataaagtaaagaatagcaggtcacgagatgataagacacacaatgagtgaacaaatacctggcttggtacaataccacttcttaaaaaagttgttacaattttttccacatttgcagcttcagttctattgagatacgatgtcccactagcactgatttcttcttgtcccatctgcagatattagtatggatatgcagcacatccagataagagtttgtgtttgaaacacatcaatatttccattagttgtcaaagaagctacctgcacatagaagaacattgggcgatttggaacaggccaaggaaaatcaattccagacgaatgcctctcattaacagtcactccattttgcagtgtgccttcataaaagcagttggatggaaactctgagaggcatggatgcattctatactggacctgtagcctgaatggcttcactccaaggataacaaggcgttcaaagagagattgtgctaatcctgcacgggctgcttttttgcacatgatgacaggacccaattggcaatgatctccgacaaggacaacctgcttgacaccaagcaccaaaggaataagacattcaggctctgttgcctgtgtggactcatcaataagaacttgtcggaaacggaagtttgaaagacgaggatctccagcaccgacacaggtgcaacaaatgacatcagcactctgcagtatctctctttcagtnggcacgctttagtgccttgtacttcttctcatcnactgctggacaattcaccttgttctctttcagttgctg

SEQ ID NO: 52590 - DNA, 156 bp, Zea mays
  Clone ID: MRT4577_147960C.1
atgggacacgatggtgccttgctgatgcctaaggggaaacgcaccccaaagggtcctgggtcactaggtccgacccacaggcttaaggatggttcaatgcgcacggggaaggtcttggtggtgacagggattggccaaaagggtggcgcaccatga

SEQ ID NO: 52591 - DNA, 412 bp, Zea mays
  unsure (1)..(412): unsure at all n locations
  Clone ID: MRT4577_147961C.1
ccgggncgacccacgcccccgggcaggcaagcagaagaagggacgccctggaagcaagaccaccagcggactccacctccgaagccggagggatggcccccggagggagcgatccgcaggagccacctgcaggggggcgcgaaggccgaagaggaaccgaccagcaaggagaagctcggcgagcaggggccagagccagctcgggccaccatgatcgagaaggagaacaaggagggctgcgccaaagtgaggaaggaggacctgcagccgcactgaagatatgcgcagcccccaagcgccccgcaggccatgttccatggataccagtcagatacacagagcagagacgaacccagagaacaagagacaagtacaacaataagcagacggagacaacaaagaagggagagaa

SEQ ID NO: 52592 - DNA, 175 bp, Zea mays
  Clone ID: MRT4577_147962C.1
cctgccgggagccgtcgttgacccgagacctcctacgtccggcgtatggagagggaatctgatcctacctcgatccataactgagatgcggtccgacgttgttgctgccacgatggaaagacgccgagagctaagcgttgacggcagatttgggtgggaatgaatgcgcagtctg

SEQ ID NO: 52593 - DNA, 495 bp, Zea mays
  Clone ID: MRT4577_147963C.1
ataaaaaaaaaaaaaaaaaaaaaaaaaaaaaaaaaaaaaaaaaaaaaaaattttaaacctaacacgaaaacactataagggaattttttccttttttctctcccactgggggccgctttggggggtttttcgtggcccttttgccccttggggcgtgttttttcagggccctttgggcccttttttccctctttttccgtggaaatcccctggctttcccccttttataacctggggaaaaccttggcctttcccggcttgttcccttttagagaagtgcccctttcccccctttttttaaaaggggtgaggccccaaaggggcgcctttcccccctttttcgcaccctttttggcccggggggtggcgttgtcccccccctttagccccttacttttggggggtttctggcgcgggcccctttccttttgcccccttcttttcgccccttttttccgcttttttcccttatttttttaaacggggggccccttt

SEQ ID NO: 52594 - DNA, 254 bp, Zea mays
  Clone ID: MRT4577_147964C.1
gggagagaaaatgggcttaacctattttattgcgtagtgggcttttgggctgatttgtaggctgggggctaagtttttatttttcttttatcttttcctcgtttttatcctaaatactttctcaaatatcaatattttttatattttaactatatttaaggcgtcgcctcatcatacgccttatcgcttaaaaggtaaaaagggggtcagtcgccttacctcgccttgccgccttgacaactatgcttgggtgt

SEQ ID NO: 52595 - DNA, 418 bp, Zea mays
  unsure (1)..(418): unsure at all n locations
  Clone ID: MRT4577_147965C.1
gtctttttttttttttttatttnnnncngaagcattttttttttttgttttgggttttttttttttttaaaccaaaccgnntgttttaatagacaggttgtccgaaaaccgggccaaaaccttggggggaaggacggaagtttgaatttaccaccatggggggtttttgaggggggggacgcccgcctttgcctgggggtagctggggggggcgtaaattccctttttccggccgacgccgtttattttggaacccccgaacgggaggggggggccaaacacgtggaaaaagttcacccccacggggcccccccgcagcgccccggaaagggtgttggccgcgtccaggctccgggtgaacccccccccccccagcccgaagggggttgtgtttgcgcgccggatcacctcctccacg

SEQ ID NO: 52596 - DNA, 245 bp, Zea mays
  Clone ID: MRT4577_147966C.1
gtctagtataatcaagggcttatggagtgatgggatgttttaaagggtatattactttttttatatcgtttcgaacgttttagtgttaaaaagtgaagagaagacttttatattgtaaaaaccaagttaacggtttgtccaacggcctagagactaatgcattctaatcgacgtagcccaaaaacgattagacacaacatgaacttaatatacgtgacgcgcgccattaaaaattatgtattgat

SEQ ID NO: 52597 - DNA, 158 bp, Zea mays
  Clone ID: MRT4577_147967C.1
tttgtgtgcaagtcgatgtaaaagcaatataaatggctttttcccatttgcatccaaaatctcgaaagttacatgggtcactactgaatccaaaaggactcccaacaaataagtgctcttttcggcggcggagctactgattgcctctcatgccgaat

SEQ ID NO: 52598 - DNA, 676 bp, Zea mays
  Clone ID: MRT4577_147968C.1
aattcggcacgaggctgcggtccatgctgggagtaaaaccctgcttttttggcctgcggagagatcttgcgcttgctagcgggacccggccaccgtcatgttcgttagggatgatgccaaccgcaactagagcaagggtctctgtgtgccgatccatacatagggtgctacatgtccgatttaaagatgtagtataacatgctcaggctggtcgacggcactttagactgttatattctctagtatattaaaacgccatgggccacactactcacggccatattaggtagttacctaccccgaacaccatattatcacatgaagtggtctttaggcttacatctaccgagcagccacttacttctgcagattatgcacttctagcagcaaaatgaacatgcttgaattattggtaggatatccgggtgcgccacagaatacagaggtggttgaactctacacagatcaatttaacaagaaggagctatgctcagcattgtacaagatgatgcacacccaagttgacaaagctctacattctataattgcagaccaatgactattggtacatcctcatgacatgcatgacagaatttgattatgagtatctgtggagggctaagtgacttatgaatgagaaatttctatgtacatataaataacttggtgaagcctt

SEQ ID NO: 52599 - DNA, 638 bp, Zea mays
  Clone ID: MRT4577_147969C.1
gccacacagctttcgcctccggcgctagggtttcgcctccctcctagttcggtccgcgagtgtaccaggaccaggtgatttcttcccctttgatctgctgtgacgtgggagatgccgccgaagtctaagaggggtggcgctgccgccgcgaggaaggcgccggtgacgaggggccggatggggagggcgcaggctgcggcggaagcggcgccggttgtggaggagatggaggcgcctgctgaggaggtgaaggccgccgaggaggtcccgaaggtggtggaggcaccgaaggtggtggaggactcgaacgtggtggaggagccgaaaccctcgcctctgctgccgcaacagccggtggtggtggtggagaaagactccgatatcgcagccaacggtgccaaccagggtgaagatgacagagctgcaaaagaaatatatgaagaagaggacaaaggtgaacggctggagtttgaggatgaaccagaatatgaagaggaggctgctgtagactatgatgagaaagatttggagcagtatgaagagcaattgaggatggtgatgaagaggtggagttactgaagacgtgtttgaagtggagacgatatggtggatgaggaacttgatgaagtggtgatgat

SEQ ID NO: 52600 - DNA, 335 bp, Zea mays
  Clone ID: MRT4577_14796C.1
ggaaaaccttggatctggctgcccttctgcgggagagggcgctgatcctatcggtggtagaggggctgacgaccgtgtgaactcgtgccgctgagcttggtacttgcgctatgggtaaatgcaaagagtacgctggcacacaatacaatcctggagcacagaactgtgggtgcatattgctctaacaccatcgatgagctcgtcccatccgacatattcgatggggtgaggcccatcattattgactttaacacattgggggatcatgctgttgaacgcgctgctgactctgtcgggcttcaagtaacatacagtgttgtaataaactaggtgta

SEQ ID NO: 52601 - DNA, 154 bp, Zea mays
  Clone ID: MRT4577_147970C.1
ttcaaggtgttcttcatctaacaacgcagaacgagctgttcacgtcgctggcggtggtggtggtaccagataacgctggtccgggggagaccaaggacggagggcgggtggtggagatcatcaacaagctactgtggctggcgtcggtgtgcac

SEQ ID NO: 52602 - DNA, 379 bp, Zea mays
  Clone ID: MRT4577_147971C.1
cagatctcagagggttggtgtcaggtggcgtcgccggccggccgtcgtggaacagggaaccgcgtgtggaggacgaggattccctctgtagcactgcactgcactgcactgcaagttgttgtacacaagtgcatgtgtatgtgtagtagtccggcctccgggcgggaggcgccgaccccatccgatggcgacggttggcatgctattcggatgctggattcgcccacactgagcctgagcgtcagcccatgtgaatgaaggagagctgtggccaacgattagcccaccacacaatggagaccggagaggtgaccaaccgtgtccaatccgtgaacggccggcacgggattgaagtgaacgggcgggcgggcgaaaaagc

SEQ ID NO: 52603 - DNA, 482 bp, Zea mays
  unsure (1)..(482): unsure at all n locations
  Clone ID: MRT4577_147972C.1
ttnnnntctatgggtctctctaggcggggcggagaccccatatacacaataataagcataggcgctagcagaggtgcaggcattaacaagactattgctagtaagaggcatagactaccgaggaagaagttaagcaaagcataggacacagacatggagtaccatcctactggtacgttgcacttgatttagcgctgagtgcgtgcgtgcgtcgggtgctagcatgttcgagctctcaagcgggcgtcactcacagggtgggagagctaggttctatgtacacgtccctgccccagccgctagtgtcacaccatcagcagcggtgagaactccgacgtgccgcagcatgctcgcgtggtcgcggcgctggtcctgttaccgcttccacgactgcttggtccaaggctgcgacgccatcattctgctcaaccacaagtccgagggagcagagcaagccgcctaacctaagtcctgaagccgag

SEQ ID NO: 52604 - DNA, 398 bp, Zea mays
  Clone ID: MRT4577_147973C.1
attcggatcgagctggttggcgaaactttgtttgccatggcccaccgtttgctccatgggcgggcctacgcagagagcagctgccagatactcgtcgtgccctacatatgcatggacgtgctcatcaagtagtagctaggagaacccgcgccactattcatggagatagcacaccatgggaacagaggggcggctggcgcctgaggacagtaaattagcacggttgccaaaatggattgttatcatatacggatacggtgaaaatggttatggattcaatgggatcctgcacacaggaattaaaccttatatatttgtcgagatagtagatgttgagttggttcttaataagaagtgtgctgactgctgattcatgaaaagacaatcgaggggcaaca

SEQ ID NO: 52605 - DNA, 911 bp, Zea mays
  Clone ID: MRT4577_147974C.1
gaggaggagcacaggttgttcctcctaggcctgaagaaatacggcaagggggactggaggaacatatcgcgcaactttgtccagaccagaacgcctactcaggtggccagccacgcgcagaagtacttcatcaggctcaactccggcggcaaggacaagaggaggtccagcatccacgacatcaccacggtcaacctgacggacgaccagccgccctcgccgtcccagtcctccctgatcaccagccagtcgaacgcaccagctccatctccagctccggctccagccgcggggatatgccaggtcccattggcggccgacgtcaagcgacacggtgccggaactctgcccttcagctcaccgaaccggacctctgcggtaccggcctacaggatggagtttcatgaccaacaaggcctgcagtgtggccctctgcatgatcagttgctcgccagccagagcgtcctgttctaggcgcggtggcagcccaccctgcgccatggatcgaccaggtgcctattgtataatacttgtggtatcgctgtagcttcagcgcctgtattgaagggattagcctttcgggagcataacagaaaggagatcttcatttcatggtggtccataatttgttggagaatgtaacaaaaagaacgccgagaattcgatgccatggtattttcagactgttgctcgagtggtacggctggaaatgtatcatgcatcctatgaagtggacttgcattcaatcatggatgatcctatgaagtgtcagttaaccttggttgtgaccatctgattctgctgctgtctctgaagatggtgccttatattgaggccttcagagttcaaaccattatgtagtgtccagacatatttatccgtagtaatcagtttgcctattggtgcctgcc

SEQ ID NO: 52606 - DNA, 234 bp, Zea mays
  Clone ID: MRT4577_147975C.1
gccgcgtcgcgctcttcgtcgagccgtctccgttcgcatacatctctgggtataagaaccggttccagaacttcatcaaacatttgcgagaaatgggggacgaggtcattgttgtgaccaatcatgagggagttccccaagagttccatggcgccaaggttataggttcatggagcttcccatgccccatgtatggaaaagtacctctttcgctggcactcagtcctaggatca

SEQ ID NO: 52607 - DNA, 1893 bp, Zea mays
  Clone ID: MRT4577_147976C.1
cattgggtacctcgaggccggccgggaagcccggcccaatcgccggccgacactcacaagaacctgcctccctctggatcgctatctcttttctagtgcccagggaaagctagctagctcacagtcacagctgagctgagggaagaaagcaaggagagggagccagggaggaaggggaaaaacacgcggagagggtgagcaagaaagaaccgaggcggatcgccttctgttcctcctgccggctccgcgagaggaggcactgctcaggggggaagaaagaggtggaacaacgccccggggcagagcagagatgatgcgggagacgtacatggacgtgctgccgccggtggaccacatagccgcacggagcaactggttcccggcggcggcgcgtctgtggacggcggcggagaacaagcagttcgagcgggcgctcgccgggctcgacctctgccgcccggactgggaggaggtggcgcgggccatccccggccggacggtgcgcgaggtcgtcagccacttcaagcacctcgaggtcgacgtccagcagatcgagagcgggcaggtgcccttgccggcctacggcggcggggccagctcgttcaccctgcagtgggacggctacggccccggtccgggggacttcaggcacgggtaccgcttcgccggaggctgcgggaggcggcaccacggccgcacgccggagcaggagcggaagaagggcgtgccatggacggaggaggagcacaggttgttcctcctaggcctgaagaaatacggcaagggtgactggaggaacatttcgcgcaacttcgtccagaccaggacgcccacccaggtggccagccacgcgcagaagtacttcatcaggctcaactccggcggcaaggacaagaggaggtccagcatccacgacatcaccacggtcaacctgacggacgaccagccgccctcgccgtcccagtcctccctaatcaccagccaatcgaacgcaccagctccagctccggccgcggggatatgccaggtcccattggcggccgacgccaagcgacacggtgccggaactctgcccttcagctcaccgaaccggacctctgcggcgccggcctacaggatggagtttcatgaccaacaaggcctgcagtgtggccctctgcatgatcagttgctcgccagccagagcgtcctgttctaggcgcggtggcagcccaccctgcggcatggatcgaccaggtgcctagtgtataatacttgtggtatcgctctagcttcagcgcctgtattgaagggattagccttttgggagcataacagaaaggaggtcttcatttcatggtggtccataatttgttggagaatgtaacaaaaggaacgccgagaattcgatgccatggtattttcagactgttgctcgagtggtatggctggaaacgtatcatgcatcctatgaagtggacttgcattcaatcatggatgatcctatgaagtgtcggttaaccttggttgtgaccatctgattctgctgctgtctctgaagatggtgccttatattgaggccttccgagttcaaaccattctgtagtgtccagacatatttatccgtagtaatcagtttgcctattggtggtggtgcctgcctcaatctatgtttggagtttggacaagtttaattttctcgtatgaacgaatttcggtgaagagaagataaacgaagctgagtttgcaatgagtcactcagcattgctgctacttgtcaatatctctcatatagtcaactttttgctttggttcatcattttcttatagaaaataacagctttcttaaacccgctccactgttaagtgctcatatgtggcgtttttctgtcgatgatgctagctccaccgaat

SEQ ID NO: 52608 - DNA, 279 bp, Zea mays
  Clone ID: MRT4577_147977C.1
tttttctgttagttcctgcctgcacttccaaaacaaatctgcatgtggaatttggctggaagcttttgatgatggacttgtatagattgttcaccagatctctttcagcaaattgctcaatacagacctcaataatgcataacacatgccaatgccatcggggaccccttattgttcttgtacaaccagtttgaaattttgcgcaccttataaaaaactcattgggttctgtcacctactgaacttgcgatcacagaaattgcaatgccttcttataaa

SEQ ID NO: 52609 - DNA, 1613 bp, Zea mays
  Clone ID: MRT4577_147978C.1
aagcccggccaatcgccggccgacactcacaagaacctgcctccctctggatcgctatctcttttctagtgcccagggaaagctagctagctcacagtcacagctgagctgagggaagaaagcaaggagagggagccagggaggaaggggaaaaacacgcggagagggtgagcaagaaagaaccgaggcggatcgccttctgttcctcctgccggctccgcgagaggaggcactgctcagtcccgtgattcctacagggggggaagaaagaggtggaacaacgccccggggcagagcagagatgatgcgggagacgtacatggacgtgctgccgccggtggaccacatagccgcacggagcaactggttcccggcggcggcgcgtctgtggacggcggcggagaacaagcagttcgagcgggcgctcgccgggctcgacctctgccgcccggactgggaggaggtggcgcgggccatccccggccggacggtgcgcgaggtcgtcagccacttcaagcacctcgaggtcgacgtccagcagatcgagagcgggcaggtgcccttgccggcctacggcggcggggccagctcgttcaccctgcagtgggacggctacggccccggtccgggggacttcaggcacgggtaccgcttcgccggaggctgcgggaggcggcaccacggccgcacgccggagcaggagcggaagaagggcgtgccatggacggaggaggagcacaggttgttcctcctaggcctgaagaaatacggcaagggtgactggaggaacatttcgcgcaacttcgtccagaccaggacgcccacccaggtggccagccacgcgcagaagtacttcatcaggctcaactccggcggcaaggacaagaggaggtccagcatccacgacatcaccacggtcaacctgacggacgaccagccgccctcgccgtcccagtcctccctaatcaccagccaatcgaacgcaccagctacagctccggccgcggggatatgccaggtcccattggcggccgacgccaagcgacacggtgccggaactctgcccttcagctcaccgaaccggacctctgcggcgccggcctacaggatggagtttcatgaccaacaaggcctgcagtgtggccctctgcatgatcagttgctcgccagccagagcgtcctgttctaggcgcggtggcagcccaccctgcggcatggatcgaccaggtgcctagtgtataatacttgtggtatcgctctagcttcagcgcctgtattgaagggattagccttttgggagcataacagaaaggaggtcttcatttcatggtggtccataatttgttggagaatgtaacaaaaggaacgccgagaattcgatgccatggtattttcagactgttgctcgagtggtatggctggaaacgtatcatgcatcctatgaagtggacttgcattcaatcatggatgatcctatgaagtgtcggttaaccttggttgtgaccatctgattctgctgctgtctctgaagatggtgccttatattgaggccttccgagttcaaaccattctgtagtgtccagacatatttatccgtagtaatcagtttgcct

SEQ ID NO: 52610 - DNA, 1388 bp, Zea mays
  Clone ID: MRT4577_147979C.1
aagcacggcccaatcgccggccgacactcacaagaacctgcctccctctggatcgctatctcttttctagtgcccagggaaagctagctagctcacagctgagctgagggaagaaagcaaggagagggagccagggaggaaggggaaaaacacgcggagagggtgagcaagaaagaaccgaggcggatcgccttctgttcctcctgccggctccgcgagaggaggcactgctcaggggggaagaaagaggtggaacaacgcccggggcagagcagagatgatgcgggagacgtacatggacgtgctgccgccggtggaccacatagccgcacggagcaactggttcccggcggcggcgcgtctgtggacggcggcggagaacaagcagttcgagcgggcgctcgccgggctcgacctctgccgcccggactgggaggaggtggcgcgggccatccccggccggacggtccgcgaggtcgtcagccacttcaagcacctcgaggtcgacgtccagcagatcgagagcgggcaggtgcccttgccggcctacggcggcggggccagctcgttcaccctgcagtgggacggctacggccccggtccgggggacttcaggcacgggtaccgcttcgctggaggctgcgggaggcggcaccacggccgcacgccggagcaggagcggaagaagggcgtgccgtggacggaggaggagcacaggttgttcctcctaggcctgaagaaatacggcaagggggactggaggaacatatcgcgcaacttcgtccagaccagaacgcctactcaggtggccagccacgcgcagaagtacttcatcaggctcaactccggcggcaaggacaagaggaggtccagcatccacgacatcaccacggtcaacctgacggacgaccagccgccctcgccgtcccagtcctccctgatcaccagccagtcgaacgcaccagctccagctccaggtccggctccggccgcagggatatgccaggtcccattggcggccgacgccaagcgacacggtgccagaactctgcccttcagctcaccgaacaggacctctgcggcgccggcctacaggatggagtttcatgaccaacagggcctgcagtgtggccctctgcatgatcagttgctcgccagccagagcgttctgttctaggcgcggtggcagcccaccctgcggcatggatcgaccaggtcaggtgcctagtgtataatacttgtggtatcgctgtagcttcagcgcctgtattgaagggattagccttttgggagcataacagaaaggaggtcttcatttcatggtggtccataatttgttggagaatgtaacaaaaggaacgccgagaattcgatgccatggtattttc

SEQ ID NO: 52611 - DNA, 884 bp, Zea mays
  Clone ID: MRT4577_14797C.1
caaatagcgaaaccctagcccaaactcgaccgcctctgctataagtagctccactctctctcctccaagcctaccccagccgccgccgccgccaccgccaccgccaccgccacctgccccagcgcgccgccgccgcagccaccatgggtcgcgtccgcaccaagaccgtgaagaagacctccaggcaggtgatcgagaagtactactcccgcatgaccctcgacttccacaccaacaagaaggtgctggaggaggtctcgattctgccctcgaagcgcctccgcaacaaggtggctggcttcagtacccacctgatgcgccgcatccagcgcggcccagtccgcggcatctcgctcaagctgcaggaggaggagcgcgagcgccgcatggacttcgtgccggagaagtccgcgctcgaggtcgaagagatccgcgtcgacaaggagaccatggagatgctcgctgccctcggcatggccgacctgcccggcgttgagcgccaggctgaggtctccaacgcccccgcctacggccgcccgcagtacggtggtccccgccgtgaccgcgtttagacttcgcggtggttgcctcttgatcgcactgctattcgtagttgttgtcctactatgctaaacttcttttagatctttggttgcatctgtggcggttaagttttgaacttgcctgttatggtataaattctgaagtgtttgggtctgcgtgtgatgaacatgataatttatattcttgcgctttataagttactatgagatgctcatatttttttatttgactgctagttatcttgaatatgtgcatgcgacatagggatttgtatctatgctgcatgcttttaaatgtaattcaaatttggtgttgctgtt

SEQ ID NO: 52612 - DNA, 503 bp, Zea mays
  Clone ID: MRT4577_147980C.1
attgggtacctcgaggccggccgggatccgccgcggctcgtctccgtgtcccgggtcttcagcgcctaagtacgacatggcgcgcgtccgccgccagccgtcctccgacgtccgcgccaccgcactggaataccgaccggcgatccgctgcagttgcacacatgtatatccgagggaagcgcaacaaccacatgtagttaattcaacgggaaacaaaagagacaattttgtagcatgacacataacctgcactggctgataaagcaaccgcctagcatccagtacgtggtcatgtggtgtatgagggatgtgattgaacactccaagactttggaagatctcaaggtggacaacgactccattgttgcattggaactaagacaatatgacgcggagcctgacgaagcctccatcgctaggctcggggatttgatgtgatcatcgtgacagagattagtgcatcatttctacacagacaccactgcgcgttcttgcagtggacc

SEQ ID NO: 52613 - DNA, 318 bp, Zea mays
  Clone ID: MRT4577_147981C.1
ccaaaaccaccaaatagtttttatggcgagaaagactgagtacatgagaggtccatagatcacaatgaaccaggttaaaagcctgttcagcccgagatgaggaagtggtgaatgggagacgagtttgccggcctagttgtcaagcatgacagaggccctaaaaatgtcccctactacatgaaggatctaggctactggtaatcttggacatgacgtcaggtcctgtatgtccgatacgattatgccaagtggtggaggagaccagggcaggaggcggagacgcgccgtaggttgatggccttagcgttttaaggggcc

SEQ ID NO: 52614 - DNA, 465 bp, Zea mays
  Clone ID: MRT4577_147982C.1
ggaacccacaaaaaaattcagccccccaaaaatattttcatccgggccctataacaaataacaaaaccagtttgggaaatccccaaaaaccttttgttaaaagaaggggggggcccctttacttggcccggaaactttaaactacccacagttccccaggtcgattgggggaccgtcaaaaagaaggaaaccttgctttttaaaaaaagggctcgctggcctaaaaatcttccaacaacccgggggaaaggcccaatggcaccctaaggttccagccccaaggccgggtcttttaaaaacccaaaaaaaaaccattgttttttcgaaggtttggaaaccaatcccccaaaaagggctgggggggacccctttcaattcgggaggcttgaatttaaaaagggggggcaggaagcgccctttggaaaaacaagttttaaaatcccgaacctccgaaaaaaagggggg

SEQ ID NO: 52615 - DNA, 353 bp, Zea mays
  unsure (1)..(353): unsure at all n locations
  Clone ID: MRT4577_147983C.1
cctcgnagccggccgggccgggttgttgttgctgttgttcgttaatttgcaaaacgcacaacacaagaaagaaggagaaaaaaacagagtggaaatgtttttttttgaagatctggagaacaacatgattgagaaaaggggagggcaggtgattctgagaacagttttgttggaaaggctgtagttaattctggtggatgtaatatattatatgtatatgcttagattcgttaatatatatgtatatgcacccacatgaatatgatttacagagattatattaaaaaaaaaaaaaaaaaaaaaaaaaaaaaaaaaaaaaaagaaaaaaaaaaaaaaaaaaggcccctagggcc

SEQ ID NO: 52616 - DNA, 332 bp, Zea mays
  Clone ID: MRT4577_147984C.1
tttactctttctttcttttctttttgattttttatgtcttttttaattctaagctttttgcttttaattcaatggtgaatgttattttcaatttttttaagatagaagacacacgcaaggtgttcgatgaaatgataattaagggtctcgcgcaccgatattgtcatttacaacaccttagtgcctgaatattagaaggcatgatgctcacataaaacattgtaagtgtaaaaacacatgacacacaaaagtatcattccatacgttatgacatttacttcattgatccatgtaatgtgcaaagctcctaacttttagcccttactaacatt

SEQ ID NO: 52617 - DNA, 280 bp, Zea mays
  unsure (1)..(280): unsure at all n locations
  Clone ID: MRT4577_147985C.1
gtgcacgccttcctgtatccgtggcaagtgcatcaacatggggcaaccctctctgcgtgccagattagggaatggccatcccataacactgtacaaaatgatgaaatcctgcttggacttgtatgaaatctctatccgacgaaacaaacagaagttctcagttttaccttctcggtaaccttcctcgnaaaaaaaaaaaaaaaaaaaaaaaaaaaaaaaaaaaaaaaaaaaaaaaaaaaaaaaaacataaaaaaaaaaaaaaaaaaaaaaaaataacagg

SEQ ID NO: 52618 - DNA, 714 bp, Zea mays
  Clone ID: MRT4577_147986C.1
ggccgcttttttttttttttttttctagattgcgtttctgttttctaattgtgaaattaagcaaatgaaccagatgaatcctgtcagcaagaagattttagcgtgcaagtgtttagtgggttactcacacctgtttttgcaacacaagttcatttgaaaagaatatagtttcaggaaaaggaaagcacgaaatttaaacaaattgcaaatgtggcacacttgcatagattgcaataatcgcagctgcagtagccatcttgtaaaatcattgcaattatttatttaccagaaaatttgagagaaccaaccataagtagtttccatgagaaaccaacttgagttgcataagatttacaaaatttcccaatttattaggaagcaaatgatccccttcaggtcatttcttcacaaggaattgaagaaactacttattgtgacaccccatatactcatggaccgatgatatttatttctggcaaccctctacgatcatagaccatccgcacaaacaaaaagaatattttgtgcgcactttgtcctcactcacgcacacccgagaggactttctagttaatcacccatctcaagattgctctgggccaagcacacttaatccagagattctttcgagataggctcctgaaaaaaaagatgcacatttttggtatgagtattctatcaaatctattaagctttgaccaggatatcacaatc

SEQ ID NO: 52619 - DNA, 279 bp, Zea mays
  unsure (1)..(279): unsure at all n locations
  Clone ID: MRT4577_147987C.1
gcctccaccctcctcgccgcctcactccctctgaggtcgcagatccgtccggttagacgaagccgnccgcacgcatggcctccagtgagctcgactgcacctacgccgtcctcatcctcagcgacgacggcatcgccatcaccgacgagaagatcgacagcatcgtgaaggcggccaacatcaaggtcgagtcctactggccggcgctcttcgctaaactcctggagaagcgcatgttgacgatctaatccctccgctggatcagtggtggcgtgctcc

SEQ ID NO: 52620 - DNA, 1052 bp, Zea mays
  Clone ID: MRT4577_147988C.1
ggcagtggcagtagttctggtgataagttagagaaaaatgaagccagccaattagaggagacggagaaagatgaaatgggtcggtacaaaccatcattccttcctgaggagccatctacgagaagttcccttggcgcttccaacagcaataatacaatcgatgaaaacaatccacccagggcttctctccaaaatgatgtggctacatgtctccgctgtgtagaaactaccaatctggataagccctctaccccaccgcgctccaaacgacttgcctttgataacgagtttagtgtgtttgagtttgaggactttggtgaggaagatgaaactttatttccaaatttgaaacttacaccgaaggccaagaaagctaaggctgcatctgcatctaaagctgagaagggtccttgcattgatcagaacgcagtacgtttgatgaggggcatgacatcgacacgaagaaaaggtttaatggactgcatagcacagcaaactgcaaagcacgagtctagcagataccctgcaagtgaccctctggacaaaaagaaaagaaagccggttcttcaatactatgtaaacgtgaaaaattgataaaatggtctagaaaaaaaaacccggtgagcgtgggtggtgaatacgccgtggaggtggctcacgctgatgagggtaagccggcatggattaagggcacagcaagcatgtgggtcataggcggagctacgttagggccgtcctcggcccttggcctttgctctgcgtaaccactagaagtctgcatggctgaatgctgcaattaacttgctctccacagtctgcgaccgagaatattttaggtaattttatatttgtgtccctagtttagcaccactcagttttgttcctagtttagcaccactgctccgttttgtttttcgctagcagtagaaatgtctcatccattactatttgagagtaaaattgtgtagtggtgcggaactaaagcctaaaggtacatatttaaaaacccaaatattttagcgaaaaaaaaaaaaaaaaaggcccctagagct

SEQ ID NO: 52621 - DNA, 163 bp, Zea mays
  Clone ID: MRT4577_147989C.1
acactgctcaactatcgtccacctccacttcctatttccatctctccccctttcttcatcctggtctctcctcatacatcgggtgcgccgacccaccatcatcctctcctaatcttaaatgctgcctcctctacctatctccgcatcatattcatatccccct

SEQ ID NO: 52622 - DNA, 520 bp, Zea mays
  unsure (1)..(520): unsure at all n locations
  Clone ID: MRT4577_14798C.1
agcaaataaacaagatacaaaaacaaagtgttcaatacacgacttatacacacaactcaaaatattccttacaacccctcagggcaaatgaagggtctacgcggcaggaggaggcacaacgtcaacctcgggggcgccgggaggccccacggcggagtgagattcgacaggaggggacaacaccggcagaaccacctcatcctcgaagtggcacgccaacgctaagtgtgatatcctagcccctgagatggggatatcctagcccaaggcttaatagaattaatagagtatccataccaacaaggtgcatctttttttttggaagcctatttcgaaagaacctccaagttaangtgtgtttggcttggagcaatttgggatgagtgaccgaccgggaagttatctcgggtgcgcatgagtgaggacaaagcgcacacaaagatttgtgttggtttgtgaggacaatatatgatcctagagagctgccaggagtaagtaccgctggtctagggattggatg

SEQ ID NO: 52623 - DNA, 228 bp, Zea mays
  Clone ID: MRT4577_147990C.1
gaaccaaatagggtttatttaaacatgttttgataaaaaaacaagccttttatgtttgatggggcctcgtaatacaagggttgtcaccacgggaaaaagcatacccccgggggggggcctttttttgtaatagggggaacccccagggggggttctaagccttgtttgaatacacaaccaaaaaaatatgctccaccttaaattttttttttaataaggtggcccttc

SEQ ID NO: 52624 - DNA, 551 bp, Zea mays
  Clone ID: MRT4577_147991C.1
cggccgggtcctctttatcgtatacgcttgctatcacattcctgtacgcccggaggtacctctagatacagagagctcgcagatccacgggcgttttatttatattttttgtcactctgaagcgaaggcgaaatggggctgtccgcatccgcactggagacctccatacaccagttcaccgtcaatgattgtcaacttcaaggaagtgagcctgtcatcctacaaggggaaggtcctccttgttgttagcgtcgcctctgaatgttgcttcacgctccaccagattacacgcatctgacgcagctatatcataagaagagcgacaaaaacttcgagatattgccattcccttgatattagctcttgcgccaggagccaggtactgatcaattcatacaagactttgcttgcaccatatttaaccgtgaatacccagtttttcagaaagagctcgtaaacgcaccagatgccccgccgctctacaagtgtctgaaagatagcaagcctggcttgccttgggtcatcaaggatccccctgcaactttaccaag

SEQ ID NO: 52625 - DNA, 858 bp, Zea mays
  unsure (1)..(858): unsure at all n locations
  Clone ID: MRT4577_147992C.1
cccaatccctcgcctccgctccgtccattccatcctctccgtctccggtcagctcgccagatcctacctccacgcgctagggtttgcgcggccgtccgtccgtccgtcgtcgccagccagccatggcgtccgggaagcacttcaagtacatcgtcctcggcggcggcgtctcgggggggtacgcggcgcgggagttcgccaagcagggcgtgcagccgggggagctcgccatcatctccaaggaggccgtggctccttacgagcgccctgccctcagcaaggcatacctgttccctcagaatcctgcaagattgccaggattccatgtgtgtgtgggaagtggaggcgagaggctcttgcctgaatggtactcagagaaaggcatcgagcttatcctgagcactgaaattgtcaaagctgatcttgcttccaagactctgactagtgcagctggagcaacctttacatatgataccttgctaattgctactggctcctcagtcattaagctctctgattttggcactcaaggagctgattctaacaacattctgtacctaagggaaattgacgacgcggacaatctgtatgcagctatccaagcaaagaagggtgggaaggcagtggttggttggaggaggttacattggccttgaactaagcgcagtattgaagatgaatgatcttgatgnggactatggtggtccctgaaccttggtgcatgcctcgtctcttcactgccgagattgcggctttctacgagagttactatactaccaaaggagtcaagatcgtgaagggtacagttgctattgggtttgatgctgacgccaatggtgatgtgaccgcagttaagct

SEQ ID NO: 52626 - DNA, 234 bp, Zea mays
  Clone ID: MRT4577_147993C.1
atattcacgggtgaggttcttaattatttgtggttttcccttttccatacaaattcttttattataattgggtcagtgtgtcgtatttttggggcaacgaaaaaacccggacccaaaaaaaaagggggcccagagcccgaaccccaataccacgaacattgccgcgggggcgcggagggagggcccaaaaagaagggggggaaatcacacacggttaacacaccccgggggggg

SEQ ID NO: 52627 - DNA, 348 bp, Zea mays
  Clone ID: MRT4577_147994C.1
ggggggggggggacttttagagggtgctacccgtgatgtttgtgtcccactttcaaaagtcgattcagggatacatgtggctctgaaatagacgctgtctagaatgatcacaccaattttttttttagctcactcagtaaagctggctcggggggggttgagctagtcgtactcgaggcctgagatcttggtggtgcggagctgataggctctactgatccttatgtcagggtgcactatgtgcgcatgtagaggcggacctgaggcatttaccgaacgctgtctgctctgtgttaccactacattctagttctttgtatcctgtgagcccctgtttttggctgtgat

SEQ ID NO: 52628 - DNA, 247 bp, Zea mays
  Clone ID: MRT4577_147995C.1
aaacaagatgggagttttttttataggcatttcaccccgcacatataggcggcagcccagtggacaggcagcagcgcgcagctccttcagtggtcttcccagtttaagatccccgcactctgaaacaagatgaggaaagatggctgccaggggtcggaggagagggataccggcacgctcctaagaagccttagtcgggacctgtatggaccttcaagagtctggatgatggcctgcagagagagac

SEQ ID NO: 52629 - DNA, 369 bp, Zea mays
  Clone ID: MRT4577_147996C.1
gccagacaaccagttatgcatgttatggatccggatacttatttggttttgttagattttttggtttctttggtcgcttgtgaataagtagaatgctgaatctactatgaatatttgtattttgtttttagcaaaaaaaaaaaaaaaaaaaaaaaaaaaaaaaaaaaaaaaaaaaaaaaaaaaaaaaaaaaaaaaaaaaagggcggacgatttaaaaggacacaaattttcattcgcgggcatgcaacggatatacatttttattagggacaccataaattcaattaaggggccgctctttttaaaacttaataaatggaaaaacccgggagttaccaaacttatttttttgggagcacttcccctttt

SEQ ID NO: 52630 - DNA, 270 bp, Zea mays
  Clone ID: MRT4577_147997C.1
atgagtctggtcccaaacccacgtgacattgcacgaagtggggcggtcatcgatgttgcaccacctagagctcatcaggcatacgagcctggtctcatcaacgtaatgagtctagacccctcatctttctacaacagcctgaacacttctagtgatggttcctcgttagagccaaaggacacctccaacgagccatccctctacatatgctacgtcattaagggggatggtgcatcaactctgttgagggcatacctcaccaaggagtag

SEQ ID NO: 52631 - DNA, 491 bp, Zea mays
  Clone ID: MRT4577_147998C.1
gacctgcccagccacggcgtgcgggcacagcggcgctggccccacggcccggccccggcgtgggcacggcagcacgcgaccccggcgcgggcgcactatcccggccaggctcgggcgcggcctccccgacggcacgggcgaggccccagcggcgcgggtgcgtgacccccgacacgcgcgttcagccccggtggcgcgcaggccccagcgcatggccacacagtcggcagcgcgcggcctccggcgcaggcgtgcatccggcggccggcccggcatcgcgtcggccacaacgtttgcggccccgtacaagcgagcgatagaccggtaccgtgccgacgcgtgagtgctcgtaaaatgccgttcatcatagaaactagcacccgcacaccgtgaccacatgaatgcactgtcttttcttaaccccatcgtcgagaatgacaacaagaacaagaaaaattaaacaaaaaaaaaaaaaaaaaactcgagcccgg

SEQ ID NO: 52632 - DNA, 437 bp, Zea mays
  Clone ID: MRT4577_147999C.1
aacgctattcgttacccattaccatacaaatgagggaaccaaacggcacctcaggatgcgcataaggattctagccagctcaggctcccgccagttattaattggcttccctgttgcaacaagggagttgactagggctgaactctacaatcaggacaacccagttctaaacgtctttggtcaaatcctgcactctcccagggaacgaatgcggtgatagatggccaagctctcaacgaacctcctgcgctatgtcaagaccattactgaattgttgtgtgctttacttgagaacagcatgttctctcactagtacatttacatgtctataaacgttcaggattacaaaattttgaaattactggccgcataggatcaaaagggacctcccatagaaggtccagttatagactttcacgagcatcattcaactgaac

SEQ ID NO: 52633 - DNA, 202 bp, Zea mays
  Clone ID: MRT4577_14799C.1
gcgcccactcgtgcgcccacgcgtacggacacgcgtatggacacactcgacgactaacacacacgcagaggatcgagttcgttggatcgtgactgtgacgcgcaggaagctatgatctagccaagacaggaataataatggcggagtcgacggaggcgagcctctgtggtccggtggcaacggggacctttgggggggttgt

SEQ ID NO: 52634 - DNA, 429 bp, Zea mays
  unsure (1)..(429): unsure at all n locations
  Clone ID: MRT4577_1479C.1
ggcacccagaaggacgcctgcgccggaaggcaacaacacatctaccgcatatgagtttaaaacatactgaggaggggaggacgcattgatgctaaaagctgcgtgaatagaccttaattaatgaattaattgttatgattatgtcgggcaagccaacgccgaatgcatgcatgcacacggngctaattaaaccatgtggattaactactaggggaaatgtaggatatccgtatacacggagcatggtattcagcaaaaaggaaaaaggaggaaaccagatgctacattctagatagaccaataaaatgcatgcgcgcctacactctactaaagttcttggcacctttggctaccatgcaccataatatgccatgactggacaggttaacactaagagtgatgtcaacagatttggagctgtgctgctgg

SEQ ID NO: 52635 - DNA, 619 bp, Zea mays
  unsure (1)..(619): unsure at all n locations
  Clone ID: MRT4577_147C.1
ccggcccggggtatggtcgcaagggctgaaacttaaaggaattggcaccgtccctcaccgccggcctctgctcctcttccgccgccgcaggatctcgtatcgccggagaccatgtaccgcgccgccgggagccacctccgctccctcaagcatcatggtgcttctaggcttgccagtacaagtgttgcgaagcagtcctcagattttgtagagccatctaagacaaaagtcactactcttccaaatggcgtcaagatcgcctcggagacatcatcgagcccagcagcatctgtgggtctgtacattgactgtggttccatttacgaaacacctgcttcatctggagtatcacatctgttggagagaatggccttcaagagcacagtgaatcggactcacttacggttagttcgtgaggtagaagccattggaggaaatgtctctgcatcagcttcccgtgaacaaatgagctatacctatgatgcattgaagagctatacaccagaaatggntgaagntctcattgacagtgtgaggaatccagcattcctcgattgggaggtcaaagagcagctccagaacatanaatctgaaatagctgatgcgtctgctaatcctc

SEQ ID NO: 52636 - DNA, 187 bp, Zea mays
  Clone ID: MRT4577_148000C.1
gataacagaataacacaaggccgttcttaattcatgaaacctttcaaaggacaacttgcaacagggcaagccccttacaggaacatacgggcgaagagccggctccccttcttttaagaaaggaccaagggtactgcatgtcataagaacactacgtactgtgcgattataacgccttatgggattt

SEQ ID NO: 52637 - DNA, 427 bp, Zea mays
  Clone ID: MRT4577_148001C.1
gagggttcggaaaagcacgcccgggccgccccacgcgttcgcggggtgcgtcccactcggtcgggaccatcttgtatgagattggacgggcttccctgactggtccccctaactttgaacatcctcagcctgctctggacccgcggtctaacgatcaggcaagggctgctatgaagcttaccatgccctcatcatacggctttccacccacaggaggctgtgcagggcacaggaggcctctgtccgggaggctgactgtcatgtactgctgatcccctgaggatacttcgctgatgatggctgatgcagatgcggaccgcctgtgggaagccctagctgaagaactctcttaccttttcagtgctgcggtcctcgttacaggcagtggccctttgactggagagtcttctcctgacgccacagacct

SEQ ID NO: 52638 - DNA, 555 bp, Zea mays
  Clone ID: MRT4577_148002C.1
ctcgaggccggccgggccgggacatcccgtctactgcactgagctagtgctgctgctcggacacggccggattgccaggtcggacgcaacgtcctcatgaggctcctgcatgacccggtctcctaccgtagcgtcgtgatggccgccgatgcctttgccatcgacgacgacaatatattccagtacctcgaggcttctccgcacacattcgatgacctctccaccattttctacaccaaggtttatcgctgctgaacaggagtggtttctctacatattcggggggtctgagaacgaggatgccctctcggtagacactatgagctcctgatccagcgcctgtgtgtgccgcctctattctacccagaggagtaggacaccctggccttataggaggatgccgacacttcttgcctagccgccgagcttgtcgaacgccgtttacactcgcatgcgataagattctggacgcaggctgaaagtactatatggagcatcaacgactaatctgatgtgcttctttaggtgcagtgcttacttccttgtttgtgtaca

SEQ ID NO: 52639 - DNA, 335 bp, Zea mays
  Clone ID: MRT4577_148003C.1
attttatttttttttttttttttttttttttcttttgagaaaacgaaaatgtgcaaggttcactcgttcacagcagattcaataacacaaaattgtttttttacctcatttaacacgtaaaatagaagttttgaatgtaatttctccagcaagtgccttccaacaatggtccggtgttgacttgttttaaccatccaccatgctcatttactttttattaattactcccaggtaggggctgacgcactaacgggggccgcgccttgttcccatccgggggctgcttttggaggtggagccacagtttttttccatacacctttagcaagaggagc

SEQ ID NO: 52640 - DNA, 335 bp, Zea mays
  Clone ID: MRT4577_148004C.1
actcaatccacacaagcacttcgacgtgacacggtctctgcacacagacacaccatgcgtcggcggcaatgggttactaccaggaggtggactactgctcggaggaggtgaggtctgtggccccgtgcggctttgggcgccacggcggcggtgtccaacagcacgtcgttaaggagaagtttgtggaggttgactcggtcgtacgctcttgtgccaaccaccaccacgcattttggtgaccacggggggcacggatttgtggtgcgcgagaccagggtctgagtggacattaacacttggaccgggtaggtgcacgagctcagggggagctttct

SEQ ID NO: 52641 - DNA, 2470 bp, Zea mays
  Clone ID: MRT4577_148005C.1
tcttaatataattgcagatgacagcaaatatttgcactgcatactgtacctattgtttacaaaaatggaagtattctgagtacaggcttctttccttttgaatttgtacgtacactgtaacaactagagctgataacgataaggctaacatgtgctcggactgaacgccagggaattaggagcatactaaggatcttgtctcagattgttgctacgaatttaggaacgaccttatctgaaccaatacaattcttaagagcatgacaatttgatgaaggagaagggagagattgctaaagaaaatcaaagccttgtaaagcagatggaggatcttaaatcaactcagaagacaacatctgaaacaacacttgagcaggctattaaagaaataagaagattaatttaaacttaaagagaaagcatgacaatttgatgaaggagaagggagagattgctaaagaagagcaggaggtaggaaaacacaatgtttgttgcacttcagaaggtacaacaagacatgaaacaagacgtgagctctctataaaagcaaaagaattcaggatacagacattagaaagaactctggaaaaggaaagagatgataacaagaaagagaaggcaaagagtaggaggaatgagaacacaatctttggtgcacttcagaaggtgcaacaggacaagaaacaagtagaggagtctatagataagcataagcaggctgtgagagagttgattgagaattatcctggattatcatctgaagtgccacctatctctgcactagaagagcaacttctttcatacttccgtgcagctaaagatatggaggaatcttctagtcccttccgtgatggtgcagcaactcaaactccagttgttgaaactgcccctgtggatgcacctacttcagctggagttgcaggacgtccagtagatacttcgtcaaggccagctaaagctaaaatgacggaagaaagagcagttcccaaaccaagcagtgaagtacgtaggcctggaggaagaagaccccttgttcgtcctactcttgaacgaactgaagaacctcatgctgatacagatatatcagctgttgatgcctccacagttcaggacaaaggggggccaccagcagagcaagaaacttctggaattttacctgtgttacagcctttgagtcgtaaacggcttatcacatcttcacagacggtagacagtgcctcgcagggtgaggctaatgatgtcaatcctccatctaagaagcccaaggaggaagaatcttcacaagggactagtgaactcaaaagtggtcaaccacctcttggggatgtagcggcacaggttaatgtgcttccagccactgatgacctagatggacaacagcctacagaagagatcgatactgatcaggcacctgagccaatggtagaggttgaggcaacaagggaagaggatgggggtgataaagatgactctggagatgcatcaacggacatcaaaggccaggatgctgatgctaatattgacgcaaatgcaattcctttagaagaagagcatgtagtggcaaagtcagaggcaataattgaatcatttgatgatgaccggaaaacagaagattcgaaggaagatgctcagcgtactactgcaactgatgttgatgatgacatggaggagggagagttggcagaggaacctgaagacaagagtgacgttgatatgtcagagatcgagggtgaggctacagccgaacgtgctgctgtggaaccggaccaaagtcctataacacaacctggtgcagctgatgcctcaccaagcagaactgcagatgcatctcctgctcgtgaaccttcccctagtccggtccaagctggtgcatcttctcgaccccagaatactagcactgcaacagaggcacgtgaaccttcctctaacccagcccaagctggtgcgtcttctgaacagcggaacaccagtactgtagtggaggctgctgaaactcgttccagaacaatcaacttaagtgagagggccagacaaaacaggcaaaccaggtttcaacgcgcacaacaacctggcactgctcggggtcgtggccagcaatctgttacactcaggaaagatgctacgggtcgaggatcaaggggccgcggggggcgtggtcagtcctagtaaagtagattgtcttttctcgtgcagggataattttgtccattgggatagagacccttgtatttttagattgatcgacgaacttcatggggatacagagacccttgtgtttttagattgatcgacgaattttgtctcattggtttttactaaatgttccctgacctgcgtgcgaatccttgtgggttctgagaccgctatatctaatccaaactgttgtgtttgttggtactaaaaaaaaaaaaaaaaaaaaaaaaaaaaaaaaaaaaaaaaaaaagaaaaaaaaataaaaaggcgaccgatc

SEQ ID NO: 52642 - DNA, 328 bp, Zea mays
  Clone ID: MRT4577_148006C.1
cacacaaagctctgcacaagaaatgggtatgtaggtctagccggagccaatctgccgacacctaactaatcgatagctcgcctgcatgcgaccacacgctcttgctgccgggccatggcgactgcgttccaccacacagtcctggtgccgaacatggcgaccagcgttattgacagtgaagccctcgcctgactacgcgcggttgcttgccctcctgcctgctgactttcggatgataggcgcaacaacctgcgcagccgaaacgtggacggtctgagccataaccggtgtttctgcagagaaggagcctggacattaaacgcatggg

SEQ ID NO: 52643 - DNA, 404 bp, Zea mays
  unsure (1)..(404): unsure at all n locations
  Clone ID: MRT4577_148007C.1
ccgtctcgtctcgtggtcacttanncaccattggcaagggagaattgggttgacctggtgccttgactcgcatcanggagagcttggcgagataattgcacctggtgctccagnnggcttcctcnngtcttcaacgcnttgttggtggagggaacccgggctctgggacttggtgtctcttcctcctggagccgcctagtctgttgaccctatggcaagaagtccaagctttcggtttcaccgtgtacccccatccccccaggtggtccaacatccgtggttggagcccatacccaacagtgtcctgtccacccacttctcttcctcgagcacacntgatgnttgctgtccttgctcgacnaatgaggccatctatgacnatctgtccgccgcttcccttgaca

SEQ ID NO: 52644 - DNA, 711 bp, Zea mays
  Clone ID: MRT4577_148008C.1
cggtaatttaaacttaaagagaaagcatgacaatttgatgaaggagaagggagagattgctaaagaaaatcaaagccttgtaaagcagatggaggatcttaaatcaactcagaagacaacatctgaaacaacacttgagcaggctattaaagaaaaggatttcaggatacagacattagaaagaactctggaaaaggaaagagatgataacaagaaagagaaggcaaagagtaggaggaatgagaacacaatctttggtgcacttcagaaggtgcaacaggacaagaaacaagtagaggagtctatagataagcataagcaggctgtgagagagttgattgagaattatcctggattatcatctgaagtgccacctatctctgcactagaagagcaacttctttcatacttccgtgcagctaaagatatggaggaatcttctagtcccttccgtgatggtgcagcaactcaaactccagttgttgaaactgcccctgtggatgcacctacttcagctggaggtgattcagtattaattttgttctgacattgctgccattctattcattttgtaatgattcagtactcataagtcattctgaagcatttgatgttgtttcctatgtgatgacatttgattcattactcttccggtcaatgtgggagctgataagtcgttcagttgcaggacgtccagtagatacttcgtca

SEQ ID NO: 52645 - DNA, 640 bp, Zea mays
  unsure (1)..(640): unsure at all n locations
  Clone ID: MRT4577_148009C.1
aattcggcacgaggagacagcagacagacagcatggtgtggaagagctggggcgctgcgccatcgctgctgctgctgcgcattgctctgctcctcctcggcgctgcggcgccactctgctccggcgccggcgacgtcgccctcagtttcgcagccaccccgcgccgcgtctccaggtccacgtccgccgccttcgccttgcgggtcctgcgcgccaccggagggccttgcgccgactgcgtcgttacctgccagcaacactaaggatcggtcggtcgatgcttgcttgtgtttgcatgtcatgtacgtccatgcagttggacggcgaggcagcgtcgctctgcggtgggacggcggcggcgagctatgcggggctcagggacggcaaccacagcttcacggcgtgcgcgagcacgacgtcagcttcgaactcgtcgtccagccccagccccacccccacctgcgccacctacgcttgggatacactgtccccccgacggcgtccgtgtcgngcgggccggcgttcacgagcgcgtcctccaccgtgtcggcgctcgtctccttctccgagccctgccccggcncgcgggtggattcgtctgcaacgccacctactggcatctcatcgtgtacggctccgg

SEQ ID NO: 52646 - DNA, 1189 bp, Zea mays
  Clone ID: MRT4577_14800C.1
aacctacttaacttcttttataattttagcggaaaccggcgagccgctgcaacatcttaattattacaggctcgtcatgctatccatgatccaagaaaaaaaaaatcctatccgattttgaagatccatggactttaggcactgatgattttcctctctctctctctctctgaataatgtaaaaaaaatggaactaagttcagtagcgcgagctgagcctgaaagtggctcgacgagcttcgggcgggcgcggggcttaccggctgcattgctggcagaagcgctggcggaggccggcgacgagcacgacgggggccttggagtgcgcctcgcacaccttgtgcctccggttgtacggcttctcctcggtcatcaggttcgcgttgcaccgctccgcctggcacctcggcccgccgccgccgccaccgccacctgccccagcgcgccgccgccgcagccaccatgggtcgcgtccgcaccaagaccgtgaagaagacctccaggcaggtgatcgagaagtactactcccgcatgaccctcgacttccacaccaacaagaaggtgctcgaggaggtctcgattctgccctcgaagcgcctccgcaacaaggtggctggcttcagtacccacctgatgcgccgcatccagcgcggcccagtccgcggcatctcgctcaagctgcaggaggaggagcgcgagcgccgcatggacttcgtgccggagaagtccgcgctcgaggtcgaagagatccgcgtcgacaaggagaccatggagatgctcgctgccctcggcatggccgacctgcccggcgttgagcgccaggctgaggtctccaacgcccccgcctacggccgcccgcagtacggtgggtccccgccgtgaccgcgtttagacttcgcggtggttgcctcttgatcgcactgctattcgtagttgttgtcctactatgctaaacttcttttagatctttggttgcatctgtggcggttaagttttgaacttgcctgttatggtataaattctgaagtgtttggttctgcgtgtgatgaacatgataatttatattcttgcgctttataagttaaaaaaaaaaaaaaaaaaaaaagcgaccctcagagccccacctctctccaccctatagtgacgaacaatgagcgcgcctcgccacacccaggctcatacacccttc

SEQ ID NO: 52647 - DNA, 345 bp, Zea mays
  unsure (1)..(345): unsure at all n locations
  Clone ID: MRT4577_148010C.1
cgggtcgacctagcgtccgggcgggtttcctggtgtacatggcgctggtggagctgctcaccgaggacttcatgaaccctagggtgcagagccggggcaagctgcagctcggcatcaacgcctccatgctcgtcggcgccggcctcatgtccatgctggccaagtgggcctagttactattctcttttngctcggtgttgtctcgattccagttttttttttttttgagttaagttgctgtaaaatactactgtcatggagaaacgaacgaatacaacaactgtgacctgacctggcctatctctttttctaannnnnnnnaaaaaaaaaaanannnnnnntnng

SEQ ID NO: 52648 - DNA, 384 bp, Zea mays
  Clone ID: MRT4577_148011C.1
actaattcttgctattcgttgtttttttttagcggatcgtggcagtacggccactctgccatttacaatgccctgtcaatgttataaagtcgactggaaaggattcagtacgccgaaccggtggcaaaggatttttgaggcggaccgactgcgttcctcagtcgttcggactggagccattggaaccgaacccttgtggcgggaacgacaaatacctgaatcttggcgaaccaagaaccgatgcgcctgttgctaacttgaattttgacttagaggcgtgcacccataatcaagctcacggtaactgttggcctttggatttccaacaaagcgcgacttccaattgagggaatcaactgttggctgtagccctaggtacccggg

SEQ ID NO: 52649 - DNA, 390 bp, Zea mays
  Clone ID: MRT4577_148012C.1
cccaccggctaactttcccaccatcggcggcaatcaagaatactagtgccggccttctatttcgcctaaagctaacgtacacgggcgatctcctctagagtagaggcccttattccgaaaccgtaaactccttagacttatcgggagggggaggagaagaacaaccccttggcccacccaacctaagcagccttcccgccatctcggcttaactggtactataacaacggcatatgccctccgactgcccgttttgcaagtgtcgcgtatcctacgtgcttgtacacgaacgtcaacaagcagatcattaaagagcacaatggtagatatggcaaattccacagactcactacttacaaggatatcaaacatgctcatccaaatgaacca

SEQ ID NO: 52650 - DNA, 633 bp, Zea mays
  unsure (1)..(633): unsure at all n locations
  Clone ID: MRT4577_148013C.1
taccgtccgaattcccggggttttgttgttgcaacaaattaattgagaacggcgtcacattagnaatagatgtagttgtagattttgggcttaaggtctcagctgacttagatgttgataatagagcaatattgtataaacgtgtaagtatatcatatggtgaacgcatacaacgattaggtcgcgttgggaggaataaacctggaacagtcattcgcatcggtaaaacaatgaaaggtttgcaggaaatcccagcaatgattgcgacagaagcagccttcatgtgttttgcatatggtctgaaagtcataactcacaacgtttcaacaacccatcttgcaaaatgcactgtcaaacaagcaagaactatgatgcaatttgaattatcaccgtttgtcatggctgaacttgttaagtttgatggttctatgcacccacagatacatgaggccctggtgaaatacaagctcagagattctgttataatgctcagaccgaacgcaattccaagggtgaatttgcacaattggctcacagcccgagactataacaggataggttgttcattagaactcgaagatcatgttaaaattccgtattacatcagaggagtacccgataagttgtatggga

SEQ ID NO: 52651 - DNA, 167 bp, Zea mays
  Clone ID: MRT4577_148014C.1
tctttcacccgcaaccgaaagccctaggagggggggtttttgtgaccgtagcgtccaccacctcaaaggggatgggcaaccccttccagaaggaaagctccgggcagtacacacaaggactgaaatccaacgtggctagtggcgaccgctcaagccgcatgccgaag

SEQ ID NO: 52652 - DNA, 353 bp, Zea mays
  Clone ID: MRT4577_148015C.1
actagaaacaaaaagcgcaggcgaacatttaaagggcgcgtaaccataccatcaaactctactcacatactggtaaataaccataaatcactatttatacaccatccctaaatacaaacaccatctcaaacgcttaaccttcgccctaacacaacctccaacacaacacacctttaacaaccaatcgtttctatctatacaacaatcgcacaacagacccaagcaacaatgaaactatgagaacccccaaacaaactcgtgactaatcctctcatttacactaatccaaacaagcattcttcccttcctcccactcttaaatactccctttccttaccactacttccttttcc

SEQ ID NO: 52653 - DNA, 594 bp, Zea mays
  Clone ID: MRT4577_148016C.1
cagtctcctctttgattctaccaatttcatcccgccagtgccggcattcttattctcacgcggtcccatctcattgccatctctgtccgattcacaacttgtactcagattcggtactttcaccgcgctatcgcctgaatgtcgtctgtaaaaatccatctgcttcaaccagttagaactaactcatgtgacaaaagaaacattgaccagagcccacattgctattatgacaactgttgctcccctagagacttacctaacgcctggtgaaagaaacctgaaaaatgagttgacctatagatccctctgtacctccctttaattatcttcatttgcgacattatagatgtagagattcataaatcaatcgtgggcaaaaatgctctatcttcacaattttgcatcaatttcacaaagataatgctttacatgaatggaccaggatgactacttactccgctaattcacactatattataccatgctcactgtacaaagtcctattggcactcactgcttgccctttgcattcaagcatccagcattcctccttgcaagccgtgataaggattcacgcactggtatgcctctatg

SEQ ID NO: 52654 - DNA, 287 bp, Zea mays
  Clone ID: MRT4577_148017C.1
ggctgagggcaccgtgttcaccgaggaagacttccagaagttccagcaggaatacttcggcagctaggctccctggagggcacggtgaagaggccttcaagccctgcagcctccgactcctgctggctccaggaaccggccgtgccgcgcggccagcagatggcgatgcaggaccagcctggctctaggaagccgcggagctgagccgagtggaggctggaatggagctggtgggccggaagtcctggggaggatttacacacagaccggagctggcttccgcagcc

SEQ ID NO: 52655 - DNA, 679 bp, Zea mays
  Clone ID: MRT4577_148018C.1
cctcgatgccggccgggccggagagactcttctccttacttcctccctccatgaatgcatcaatggccggcccccgttcttccctcctcgacaccctctcatcttccctcttctcctctataaattggacagtggtgcccatgagctctccctccccgaactcgctatctctctctcgctctccttgctctcgccataggtcgcgcccgcgtcgtcgaatgccgtcaccggagctcgtgcccaccacgcgggagctcgtccgcgcagcaccccgacacccgcagcaacgccacgtacccgccgtcgagcccctgctcgcgccgtgcctgctcgccgtcgtgaagcttgttgctggaccgtccacgttccctgccggagcttcgccgtccgcgcagcttgttgctggaccgtccacgttccctgccggagcttcgccgtccgcgcagcaccccgtgactgtgaccacgccgttcgacaatcgcctgccatccgtggagactcgccggagttcattcacgccgctcgccgtcgtacctcgccatcggaacgctcaccgacgaccgtgtccgttcatcccacggttgaaaataaccccaacccgttaatgtattttctaaatcgtgtttgaattacttaattgatgttaggaaaaaaaaaaaaaaaaaaggcccctagggcc

SEQ ID NO: 52656 - DNA, 562 bp, Zea mays
  Clone ID: MRT4577_148019C.1
ccacaagtcctgccactaactccgcgcacgcaacggcgaggtcgacgccgccggtcggcgatcgcgcactctgtctctgccggagtgccgccgtgctggatcttccgcccggcgctcctcagtcgaccttccgctcccgcccatggcacgaccctaagcccgccgctgtcggtggcggcggctggctctcagagtgggggtgggaccttatgctcggatcgatcgccgcgttctacgccgtcatggcgccctacaccaaggtggaggagagcttcaacgtgcaggccatgcatgatattctttatcacacttatcacatcgagatctagactaacattgagttgtgttactttgacgagtttgagacttctcagagctcagatactctaaggaggagcaaattcccgttgaagaatttgagagaaggaatttcacctatctactgaagtgagttttattagtttgttcaaatggaccgtgctgtcatttcggatgcggataccaaacaagttttttaatgcttggagcaacttttgttcattcgataatatttgatgaattg

SEQ ID NO: 52657 - DNA, 668 bp, Zea mays
  unsure (1)..(668): unsure at all n locations
  Clone ID: MRT4577_14801C.1
ctcgaggcggcgggcgggaaatagaccagtaaatgctcattgttcgtctacctccggttcgcctgttcgcaatccgccgcttcccatcccgcgatggccgctccatttgatcaaattcgcgagggcgcccacgggcgatgaagaacgccgcgccataagaaccgacggaggagaacgcgagacaagactaggggggacaacgcgtgccggctctgagggcgcggagaataaggggaagaagaatgccaccaagaccgtctagacgtactagatctacatcttcctcgtgctctagctcgcgctcctggacattgtgtatctcgtccaaggccatgtccatcatgaactccttcatcatcgacatcttcgacaggctgtctgccgaggtcgtctatgctcgtccgctactagcaagaagcccactataacctcccgggatatccacacttcggagcgtctcgttgttcccggcgagctcgccgagcacgccgtctccgagggcacccatgatgatgccaagttcgcttcctcttagatcgccgccggcggtgcgacggctctggttcgtttcctcgtgttnaagcncagtgctactacgttgcccgaggaacaatgtactgctggaaatttctaatatatttccagattgtgccgaaaaaaanatcaat

SEQ ID NO: 52658 - DNA, 1354 bp, Zea mays
  Clone ID: MRT4577_148020C.1
gtgacactatagaagagctatgacgtcgcatgcacgcgtacgtaagctcggaattcggctcgagccgcgttctacgccgtcatggcgccctacaccaaggtggaggagagcttcaacgtgcaggccatgcatgatattctttatcacacttatcacatcgagatgtatgtcatttagaatttcctggagttgttcttcgaacattcataggtaaaattcatgttgtcatgaaacccacccttaatttgtgcagcatgaaacagtattttctcaatggtaaatttttggactaatgattcttatagccttccatctatgcttttagctctaagacaaaacatgatttcttatgtgttttttttaaattttgcagaccttgtagtcttgatgtgaaattatggcagtaacatgatgtaccgactactgtttgcatttttcaggagcatttgttatctctattctctcatcaccggtagtctttttttgcatgtacttcatgttccaaggttctatagtcttcttagaggcgatcgttaaagctctgtatataatcttccatggatgtatattctatctgatctgatgtttaatttctcattgatgcagttttggtaaactgatttttttctgtttccttttgtagctagactaacattgagttgtgttactttgacgagtttgagacttctcagagctcagatactctaaggaggagcaaattcccgttgaagaatttgagagaaggaatttcacctatctactgaactagactaacattgagttgtgttactttgacgagtttgagacttctcagagctcagatactctaaggaggagcaaattcccgttgaagaatttgagagaaggaatttcacctatctactgaagtgaaagaacccaaggtgtttgcacctgggaacttgagagaccctgacattctttcactgaattggcctggttgtccttgaggacaggacagcgagacacccaggttcctgtcgcaagcaggaccacaaaccgccaacggtgaagatgtgcagtcgtctgtgtgatacggagtagtatgggtcttgccatgaagctacctgcaaatctaggatgggggttcggttctcccccagatctcaacgcagaaaccaaaccacagcttttaagagattgccatttttagttgaaaatttatgtaccgttttagacccggaagaaagtacacgcggcctcatcttgaaatggttttcttttttgggtgggtggggggcataacagtcttatataaccaggttgctcaatttaatttttttcctgtttgagacaaaaattcggattttatatataacagaagctgtcagccttt

SEQ ID NO: 52659 - DNA, 249 bp, Zea mays
  Clone ID: MRT4577_148021C.1
caaatattttttttaatattactcaaaactctataataacggggggactacaaaaaaaatgctggggcgccataaaccataaaaaataaaggttcgataggctttcataaaccaacctaagaatcacgttttgaaaaataggaaaatcctgaggtattagaagatctatgatgaaaaggaaattggcctgaataggaaagaatgaggggggccgcattaggatacacaacaactatgacagaggggtaa

SEQ ID NO: 52660 - DNA, 956 bp, Zea mays
  Clone ID: MRT4577_148022C.1
atgcccagcgtcaccaacgctagactggaaagtattttgtatttcataattgcaatgagtgtcattgagtggggctattttatatgtccctctctttttgtcaatgctctttttgttaccgatttatggcattactttttgctttattttttgcatcaattacagcttggacgtttataattgccagattttattcagtaacactatgggcaaaaatatttggctaatcctatctctatgcaccaccatgattactgcttgcagtcaggagcaaatgcaggagatggcctctaatgccatggtcacccagaaccgaactcctgataaaacttggcgggttaagcctgggtctgtgcatgatggagatacctttcgggcagtggcggatgttactaacgaggaaattaaggtgaggatcgcctgtattgatgccccagaaattaagcaagccgggggcattgaatcccgtgattatctccggggaatgctgacggataatcgggaaatcattctgatgggtgccgaaaaagaccaatatgggcgcagtgtggtggaagtttttgcaatgactgacacgccaggacttgaggtgggagttaatggggaaatggttttggcaggtatggcccactactatgaaggccataagaggtcatgccctgagaatgcagaacagtatgaattcctggagcaggaggcgatttccaataaagctggggtttgggctaatggggatgcagagcggccctgggactggcggagaaggaataagtaggggttagtggagattaaaaatagagaaaaaccaatagaaagaagctaaaagcaaggtttatccttataaatgaattttagtcattgcgtaaacgtttagatttattacagttttagaaaagttaggaatcattattttgtttctgcactaacatccaaacatagagtaaaaatctacgctt

SEQ ID NO: 52661 - DNA, 185 bp, Zea mays
  Clone ID: MRT4577_148023C.1
aactcattccccgcaaaataaacccccgaaaagcaggagaagcgagacccggaagtggaaagctaaggttaaggtcccaactccccgttgcctggggcaacccaattatggccgcccctgccccctccggcgcaactaatgccgccgcctcaacgtctccgctgatggaaccgccgtctccgttc

SEQ ID NO: 52662 - DNA, 263 bp, Zea mays
  Clone ID: MRT4577_148024C.1
gacccagtcctacttcaacgcgcggctccgagctttgcgcactactcgatattcatggctcttgacgtatacgagaactactacctcatcaaataccgcttaccccaggacatctgcttccatctagataatacgtcctctgcacatatctatgtcagattgaataaatgtcagctcaatgtatgacatgatctaggatgacctcgaagactattcgcactttgtcgaagctacttccattcaccctaataaactcaatcaca

SEQ ID NO: 52663 - DNA, 351 bp, Zea mays
  unsure (1)..(351): unsure at all n locations
  Clone ID: MRT4577_148025C.1
gccggcacggaggacggcagcaaggagccgcaggccacccccnccgccggcnncggcgcggccancagcaggcnccacccgaccaagnacgccggcangcccgccgagaagaggcgagaagacggcgccaccggggggcncgncaacaccggcggggcgggaggcagggacggcgngggcaagaggaacagagcacccgacaccagaaagaccagcgacgccacccacnccggcgagcgccgcaccgccaaccaccagaagaccgaggcggggggccaggaganccncacggagaacaacggcgcgccgccggaaanacncgacccgaacaacaccnggacggacaaggcc

SEQ ID NO: 52664 - DNA, 316 bp, Zea mays
  Clone ID: MRT4577_148026C.1
cattgtcattcttgctcaggtttgaacggagtgggtgtcatataagaatgctggaaatgctattttatgtgaatgagtggagacagtaatgagcattgaatctacaagtggtctacgtgtgttggcaataaatatttttggccggatttggttgtagcgttaacacaacataggatgtgttgccctaaacatgcttataaaggccattgctcgttacacacaggctgtgcagaggcgcaaggctacaatatgagagcgcgtagaggatgcagatggtcatattcgttaacaggcccaggaacttttgtacctactt

SEQ ID NO: 52665 - DNA, 487 bp, Zea mays
  unsure (1)..(487): unsure at all n locations
  Clone ID: MRT4577_148027C.1
tgcaggncgactttttaaagttcactgtttcgtttgtagcaagctagtattttctatctctgnntagacaaattgttgctaaatgtttttagctcagtttgtacgtttataactaaacgtgtttttggtttgtttcctactacgataaaaccatcccctcaatataatataaataagatgatcatgccgattgaggattctaactcctagtctttcaaaacacaacacaacatatgactcttttatggtagaatataatacaaatgaatagctcattctttcgactagttcaaacttttagtttgaacaaattgatatatgtaacttaatatgttattagagacaaaagtcaagagttcgaattctgactagcacgattaaaaaacattttagagctagtttgggaacctcattttctcaaaaaatttctattttcccaatgaaaaattaactaatttgccttgaaaaatagaaatcttttgaaaaa

SEQ ID NO: 52666 - DNA, 1146 bp, Zea mays
  Clone ID: MRT4577_148028C.1
cggccttcggctcgagtttagtttatttgtttatgtttcctgtctgttgagttctagtcgagtcacccccacagcatagatgaacatatttgttattgatttgagctactgatggcttattcacctaagcaatctttcttgtgagtgtagagtttgagaatacttagctcattaattcttgtcacttttttcggacaggattcaaagaaaccattacttcaccaccatggttcttgattcattgtcatctccgcacaggaggtcccaaaacatattcttcgtgtcatcatcaaaaaagcctcagtcatctcgtgatgacagttggtctgcactggttgagcggcaccggttcctcctgacaacacttcttgtgcttgccttcctatgcagtatctatctgtactttgcagtgaccttgggggcatcagatgcgtgcagtggtttgacaggaggggcacagaagatcgagtgccaggcaagatcagtgctgcaacatggaaagttgaaattccgctgacttcggagtctcattgatgaagaccaaattattgagtttatttgcactctggtcacaggtcttattcttcataccatgaatctgtatattattggtggtggctggtttgtattcatgctgatgttattgggccacaacatttattgtactggtagagataaatctaatagtgatagcgttgagtttgtggaaagtggaaactggtataatggggtaggcctatattgttcttttaccttggtgtgcgaaaaacatcatggcgtctataattcttccaggagatattggtattgtctcccttgagacatgctcacagttaatttgaaaccatgctaccttgagtaccgttaaatctataaaaaaaaccatttacaaccgtactgattaatttcgttagtgttcatcttaatttattaacaatcagctgttcactgagaaatttgtcaattttagtgagtcattgatgtaaatacgacaacctggaacatgattgtttgtagttgtgttatcgtttccagcttgtttttgttttgtgttttggccggtagatcagagtggttggaacatattagtagacatctggtttcatcatgtaacataattcaataagtagtaaatgagttatatcc

SEQ ID NO: 52667 - DNA, 122 bp, Zea mays
  Clone ID: MRT4577_148029C.1
gagatctagtagcatataggattgcatgagagaagttgctacaagtcactgcaccagagcatcgtgggcacaagcaaacggctggaaattcgtccccatgcagcttagagcgcgccgtcgcc

SEQ ID NO: 52668 - DNA, 159 bp, Zea mays
  unsure (1)..(159): unsure at all n locations
  Clone ID: MRT4577_14802C.1
cggacgcgtgggtgcgagagcatgacagaacaacaatacatgaagccatggagcaacagacaattagcattgcgaaggctggattagttacaacactcagtacaaggactactgnntttggngccacaaatncnaaagggnnatatgaccntanngaaa

SEQ ID NO: 52669 - DNA, 188 bp, Zea mays
  Clone ID: MRT4577_148030C.1
ttttcacgtagggagaaatctttccaactcttcgatttgttggacctacatgtttggcgccgttgattgacacagcacttggaattggtgactgaactgggtcatcaatatcattgtttcttatgttatgcgccctaggggcagtgtttccctaatgggtcgattcacaattatggacagtggagtta

SEQ ID NO: 52670 - DNA, 478 bp, Zea mays
  unsure (1)..(478): unsure at all n locations
  Clone ID: MRT4577_148031C.1
gcgggcggggaaaccctagtcccctgctgcattctcaggcgccgccgatcccttcccgtgctccggaggcgcggagggagaaaaaaagatgggcgggaagggcgatgggccgggtatcgggatcgatctcgggacgacgtactcttgcgtgggggtgtgggancacgaccgcgtcnagatcattgccaacgaccaggggaaccgcgccacgcgctcgtgcggggggtgtaccgactccgagcgcgtcatcggggatgcggccaagaaccaggggcggatgaaccccatcaacaccggctttgaggcgaagcgtgctatggggaggaggggcagggaggcggctgtgcagagtgagatcaaggtgtgggccttcaaggggatttctgggcctggggagaagccaatgagtgtgtgtgcancgcaagggggaggagaancangttgcggcggaaaagatctcctctatggggcttatcaa

SEQ ID NO: 52671 - DNA, 266 bp, Zea mays
  Clone ID: MRT4577_148032C.1
tccacgcgttcgcccacgcgtacgccctctcgttcggaatcatcaattaccaatcgattggctcgcaattgttcaatggatgcctgttcctcatttaccttaaagccgattttctttcattctttgcatatctacgttgacagatctttcctgcccacttatattatcctcacatccttttactagtagctatgcagctcacttctccatcacatgcgtgtgtatacatgtactctcgcgctctagcgcccttgataactaaagca

SEQ ID NO: 52672 - DNA, 160 bp, Zea mays
  Clone ID: MRT4577_148033C.1
ctcttcgcgtcggtgtttttgttcaagcggctcacctgtcaccatgtcttcccctttgagccttcgtcgacgcggagcgtatgcgtattccaattcgaccttgtctatactgtctccgtttagacttcgagctggttcggtttcgacttcggctgatctg

SEQ ID NO: 52673 - DNA, 258 bp, Zea mays
  unsure (1)..(258): unsure at all n locations
  Clone ID: MRT4577_148034C.1
tgctcntttttcaaaacaacaccagccaacacggggggttttttaacaggtttgtggtgaccatacccttcgtaatagaaacattggtagcgtttggtttgcttattgaaacggcactcgattactaacggtatcacattcgattgcttcgtgtttgtttcggccctcctgtattctggccacagtgtaatcagataatcgccctatacaaagttgataccattctgaacccgtcgcaatcagacacccattctaccc

SEQ ID NO: 52674 - DNA, 211 bp, Zea mays
  unsure (1)..(211): unsure at all n locations
  Clone ID: MRT4577_148035C.1
aaccatgggaaaaaaaaaggcactggaatcgagaaaacagaaatgctcccacattatacaacaaggttcatattttcactttctgcccgcagcctcgaaatcacgttctcaaggtagtcatgcacccggggcgctgcgttgctacccacacgaggggcataggtcccacaaaaactacaagtnttaagggcaatatagacgaggggacaac

SEQ ID NO: 52675 - DNA, 437 bp, Zea mays
  Clone ID: MRT4577_148036C.1
accggtatacccaattaaccaaaaacacctctaccaatctaaacaaacaaaaccaaaaaatgccagaggcatgtccttaaaccaaacccacccttaccaacctaaaaaaacaaatgcccaaaatgattcccccacaatgtaaaaaaaaaacggaaaccctttacaaaactgacaaaactaaaaccaccatgttacttttccattatacaagggaacattccaaccaaaacaaaactaaggctttccaaaaaacacggtattccccaaaaccccctcccttcaaaagtctaccccccactccaaaagaccccaaagcaccctccccccctgaccactgttaaaaaaaaagcttaaccttgttcttttgggttggatcccacccggaaacccccccactaaacaaagtttaataaaaaaaaaaaacaaacccgttacaa

SEQ ID NO: 52676 - DNA, 319 bp, Zea mays
  unsure (1)..(319): unsure at all n locations
  Clone ID: MRT4577_148037C.1
attcgctggctcttgattgtttcatgtaatttttttcatatgtagaaaagaaagaacggactcgggtcacactgtgtgaacgatcagggagcctagtcatcaaccaaggagtcacagnggggaaaaccggagaaccgtcctaccggcggactgaccctacgaggagatgtgaccacactgggtctaccactcaaggggagatgcaccaatagactacaagacatcgctattagtgagttccgccctagataggtaagtggggtaataaccaccaccataaacagtcgttgaagagggggtaaacaaccccccctggtca

SEQ ID NO: 52677 - DNA, 640 bp, Zea mays
  Clone ID: MRT4577_148038C.1
acggcgcatgcggagctgggccgcgcgcacgctctcctggaccactccgtgcggcatgtggaggccgcgctgctgcaggtgacgggctgcagctgccgctgcaagttccgggcgcgtgtgactggcggcggcgccatgagctccgaggtggccagctacgtctcctccgttgtcacggccgagggcggcgacgccgaggtggacgacgacgacccgtaccgccaccaccggcagctcaccgccgacgacgacgcgccgagccacgctaggatgatggacatcaactagcggccggccggcgcccggccatctcgtactcgcatggacgagaggccgtgatggatggatcgtggatgtgcgatgtggtagcagctgcttggtggtggtctctgactagatgtggtgatagtgcagagtgctagtctagactctcacggccggcggccggcggggagtcatgcttgagcgcaagtgaagctagtagctaattacgacgtgcatggaatctttcgcttgtttgcttgctgttggactttcttacaataacatttgttcgatcgatccggactcagcaggagcattccggctgcagctggtgctgtcgaaaccgagaaagaatgcatgcatggcagctcttgtc

SEQ ID NO: 52678 - DNA, 299 bp, Zea mays
  Clone ID: MRT4577_148039C.1
ggcgcgcgcgcgatcttggctccggatcgtgcgtgaagcggcttcgtgggcagcgagagtcacagacaagacagcaagcaggatggagcactaccggaaagctggctctgtagagctcccagcgccttccccactgccccagctacctcctgatatccttgagatgcgggtccgtgatggcagcagaattcgcaacctgctggggttggctcagggtcggttagagggcggcagtgctctgcaagtagtgctctcaggttctggcagggctgcacgaaatgctgtcagcttcgctgaga

SEQ ID NO: 52679 - DNA, 427 bp, Zea mays
  Clone ID: MRT4577_14803C.1
ggggccaaaatttttttttttttgggggggaaaaaaaagaaaaattgggcccaatacagtttaccaatgcgccggccagtttggggggattgatgagggaataaccccccccccgggggaaacccctgaggggatgaccccccgacaaccggggggggcccctttgggctcacgtcgttcctcggggaaagacggcaaagggaaaacggccccctccggggagcccccaaccaggcgtccacccagttgacgagaaaaagggggggggcccccgggtgttgccccaccatttttccgccccaaacgttgtccatgtaaaccccccacaaaaaggagctcccccccgggtggttgtcgtccccactccccacttcattttttaacgggggccccttttaatacgtaaacccccccgggagggcgggga

SEQ ID NO: 52680 - DNA, 312 bp, Zea mays
  Clone ID: MRT4577_148040C.1
gggggggggatacaactatttttcacaacaagggccttaaatttaaaaggaccatttcaatccggcgcgccgggtttataaagcagggaagctagcttcttagccggtagggtgggggactggggaaaggacacagcaaagaacccttctaacaaatccgcggatcccgcaacgcgctcaattgctggtgaacttggtgacggccttggttccctcggagacggcgtgcttggcgagcttttcggggaggactaggcccacggaggtctggatcttccgggacgtgatggtgggctttttgttgtaccgcgc

SEQ ID NO: 52681 - DNA, 178 bp, Zea mays
  Clone ID: MRT4577_148041C.1
aattggcaacacaaaggctgttcgaagtttatttttgctttttaaaatccagattcattcataaaggcttcataaatttagcgggggtttagcaaagcaatttttgtttttaacttttagcttttaaacgcccaaccaattaaaccaagcgggtttgacaacaactaatttcacaaac

SEQ ID NO: 52682 - DNA, 243 bp, Zea mays
  Clone ID: MRT4577_148042C.1
gaaaacccgggccgacgcacgcgtccgcagagttcatctcccatacagattattctttttaagatggctgaaaagcctagaatataggtggttttatgcgatgagacgcatatacttgataacgagtgcatgttgataggaacacctccaaagattctatttacagtataacagcacacatgttactaaacactaatagagtcatgacagtagaatatatgaacactgatagtttatagaata

SEQ ID NO: 52683 - DNA, 405 bp, Zea mays
  unsure (1)..(405): unsure at all n locations
  Clone ID: MRT4577_148043C.1
gaaagaaaaaaaatcatctgaagaactacgggccattattaaaaatatcggtgacattggaaaagagatagaagaagatggacgtaggatcaatcaactgagaagtcaaattgatgatatacgacggcgccaacaaaacaaactaacggccttcggaggagatagagttccgagcctctataaatcagtagagagacacatgagtaaattcaaatgccctcctattggtccaataggatatcatctgcaactggcaagcgattcctggtctgttgcaattgaatatgcattanggaggttattagatgctttcattgtctcatgtcataaggattcactcgttttacgagaatgtgcaaaagaagtgaactaccgcaaccttcaaattattatatatgacttcac

SEQ ID NO: 52684 - DNA, 407 bp, Zea mays
  Clone ID: MRT4577_148044C.1
gcccttcctcgagtttttttttttttttttttttttttttttttttttttttttttttttttttttttttttttttttttagcggccaaatttgatatattttttcctgcagccggggcccatgcctcatttaaatacccgggtctccgtcatataaaaccccccctgtttaaccacttccaaaaaacgtgggagccccacttgaacttttccttcccctcccactcgatctcgagggcggggttgaggaaggggacttttttttgctgggggagggcctggcccccagggaagttggaggggaactggcagctgccgaactcgactgggaaggcccccccaaagttggcagccctgggggcaaccctttttttggggttaaattccgggccgccttgggccaaatt

SEQ ID NO: 52685 - DNA, 220 bp, Zea mays
  Clone ID: MRT4577_148045C.1
aacatccttctatcagtaccatcactcatgcattcatcttagtactataggggcacagtgccatgtgctctgagatccttcctgctcgaccgcccgtgcccgtcgactcgtcgttcttgccggccgcgcctcaccttcgacctctccttctacagggggatcggatacgccacaggctgcacgacggtgctgtgggtcttcggctactgctccctcatct

SEQ ID NO: 52686 - DNA, 568 bp, Zea mays
  unsure (1)..(568): unsure at all n locations
  Clone ID: MRT4577_148046C.1
nnnnnnnnnnnnnnnnnnnnnnnnnnnnnnnnnaaacaaacttctaccggctccttctatccggcacacaataatgtttcacgaaattacagtctctgccaccgtctcctcgtgagaagctgttttaccaaatgaattacaaaacggctctggcttctctagagaaaccaagaagctagagaagccagagccgaagccgttaggagccctgcggccctgccaaagggggccggagtaatggctcaagcatatcttttgttgggctaggatgacgccttttacaaaaaatgaaaaattgcaggcttaataaagaccaggaagtaaagatgacaatggtccatgagaacgcagttattaagggcccgtttggcaaagctccaactcctgcttctttagctccagatcctgatcctcatgaggagctgatcctcctgattctccccatcatcctctgactcctcgtcgtcgtctttcccgccctcgccctcgtcgcggtcctcctcctgctgctcttgcaatgccgccatcgccacctccaacgctagctctcacaacggcgggctgtgaa

SEQ ID NO: 52687 - DNA, 287 bp, Zea mays
  Clone ID: MRT4577_148047C.1
cacgtcgcgcccctccactgcaccagcgtcatggcggtggcctggacgtcgccgctgtccgccaagcccgccacgagccgttctccgcgcggtcccggatgcggggtgctggctgtcggcgttcggcgcgccgccggcactgccgggtggaggaggctccgcgtggaggcgatcaggacgcagcggacggaggtgcccgtggaggagtccgccaccggcaggtacgccagcgctggcgcgcccctggacgcgaacggagccggagcgaacgggtccgtggttcgttg

SEQ ID NO: 52688 - DNA, 535 bp, Zea mays
  Clone ID: MRT4577_148048C.1
ctcgaggccggccgggcagtcccatacaggaccgccgccgccctctctgccgccgtccgccctcctctggccggacctcctcgcgggcgcggcgtcctccacctgccgcctcgtcgccgcgcattcccgtcacttcctggccctatacctctctcctccttctcccgctcgcactcctcctactcgccctacccctgcccgttgttctctgcctccggctactaagaagtctcacctccagaggatctccgaggcccgcaagatccgtagaggtacccactacacatcccactgccgctgcacagcctagaaacggcgctcctataccacggcgacttctgcgatcgagaagccaacgcacatcaagggtacttcggccgccccgtatcggcacctcgcctcgctcaagtcagtgccagacacagtcctccgactcatcctgaccgacatactggcctcccagctcgaaatacatctgcacatcccgctcaccgatgcgctcggtgctcatgctgatcgacctaaggatcaacca

SEQ ID NO: 52689 - DNA, 316 bp, Zea mays
  Clone ID: MRT4577_148049C.1
cgtttatttttgtttttagctggttttgagattcactgggctttctaattctattctgtcaccagtgagagctacgggacggggggagggttatgctattcattgaggaggggatacttattaaatctgttttggatctattagaggagcgttttccttggcgtcctcttcattattcgtttttttgaagtattattgagtgagtctttcacaatgcataggactaccccttccgatttcctgaatctcgacgtggtgctagatgtgattgatagtgcttttgattgacatacccgctaaaactttactaaggggg

SEQ ID NO: 52690 - DNA, 612 bp, Zea mays
  Clone ID: MRT4577_14804C.1
cggggaggacacgcatactgatacgatcgccaccacatccactatgctacttcggaggcgtgacaatttttccccttgtccgaaccaccgccaccactacatccggcgtgtcttagcctgaggcgggtgcttatgcgtatgccatgcgctgcgcgagcgtcgacgcttgacagacaagacgatgtgagctggactgccttgagcatgggatacacgatgacggtgacaatgcgaggacaccagaccattggagcaggtgatgatgcattgaggaccttcttcagcacagaatgctgctgggaagtactgttcccttcgctgattgtggtgagcttgcatggagtggcgtacacgaggcaaaaactgaagcctaccgcgaggtcttacaccctgaacaaggcatcagtgggaaggaggatgctgacaacaactttgaccggggccactaacccattggcaaggagattgtagacctgtgccttgatcgcataaggaagctggacgacaactgcactgttcttcagagcttactcgatattcaacgctgttgttggtagaatggactttagccttgattccattctcctataacgcctgtctgtagactacgga

SEQ ID NO: 52691 - DNA, 301 bp, Zea mays
  Clone ID: MRT4577_148050C.1
gacccacgacgtacggctaagccttcctgcgagatgcaactgtttagcacacaacgcgtgctgtctcagacctagagaatccacaggagctgtgtacacaatgtgatgatgccccacgtcgggacaatgattcaatcgttgaccgcaagatctgctataaagggacacaagaacatttgaaggatagtatgaatcactcatggcgttgaaagttttgaggacttactactggtttgaggatacccacattcccgcgacaagtcgtggccaggcctagcctgagttatctacacgacctgaa

SEQ ID NO: 52692 - DNA, 442 bp, Zea mays
  Clone ID: MRT4577_148051C.1
gaagcacaaacattagatttcattgcaaacagattagacaaagtgttgcgtgtcgagttgaccttgactttggccaccgctgggcccacgcccaagtggtcgagtattattttgttctggtcacgattctagtagtacatgtacaactacaacaaacatgaaacctcaacctatcatacctgttcttggccggatacaagtcacataaacaaatacatcgtcaggatcccgtgcagagggggaaaatgatctggggtactatcccataaataatgttcgtgagatttgaaaggctcgaccgtgtttctgaaacacgaacagctccatatcgatctggtgctttcatctctacatgaggccgctcttcggctcttgcgatagtggtagcttggacgacgtaccgcccttcagacgatcacacacgatgtctttaaccgatctg

SEQ ID NO: 52693 - DNA, 322 bp, Zea mays
  Clone ID: MRT4577_148052C.1
ctggagaaaaaaaaaaagcgccccaagtgttttaacccatgttggcccacctgtgggtaaagaatctccgagcacaaaaaaaaaccggtcttctttttaaaataagggtgggaacggacctaatcaaacccggaaaattgggttggtctagaacctttgaaaaaaaaactttttttttaccatttttgcctataaagggtttacattacagccttgtcctggtgagggggaaaacaagcttctaccaaaaattggtccaacggtcaaaatctaaacaagatacgggccgggtggaaaacgtgaaaaaaacgggggcctaaaa

SEQ ID NO: 52694 - DNA, 587 bp, Zea mays
  Clone ID: MRT4577_148053C.1
aattcggcacgagggtagacctgcgtggaaagtgcttcatactgcttctcctcctcccatagcgcggcaggagtgtagacacccggagaggtgcttctcctgcaggctgactgggcaccgtgctcacgtgtgcccgcgccggagatcggcacctcccacgcctctgagtgccaaggtgaggcgggctgtccctcacatcttgcctgctatgcgtgcactcgcatgcattgctgatggccacgagggtggcaacatcacatgctctagtggtggtactggcggaggcggacacaggcgtactcgtcggcgacatagacggcgaagacccactggagcggctggtgttgaggacaccaacgaacctgccgaggtgctaccccaacccccaccggatgctgttcgcgccatttctctgccccctcccccgttccggggctgcttcttaaaacgttctaggaggattgcccatgctgaggatgacctgcatagcgctattgtcatatgcgttgtagacatggggcgttctggctgtgccgcggaggtctccgatgcgctcgcttccagatttgatctagatggtaatgcgc

SEQ ID NO: 52695 - DNA, 525 bp, Zea mays
  unsure (1)..(525): unsure at all n locations
  Clone ID: MRT4577_148054C.1
aaactgaacgttttagcttttttcactgaagaagaagaagtgttaagaacatgggtnttcctccatgtcttgtgcatccattccatcccagtctgtccaggcgtnacatgttgtgctaccacttctaacaatctgaccctttttttctcaacacagcaaccaagtgggtaagtgtctcacacaacacgcacgcacgcaccccctgccctcaacatacaccacttgcttgttggctgtgggaacaactcgcaacactcagatcagtcgactttttgatagaccgggcgaccaatcagcaacgcttcacgcctgctgctccaggtagctttccatgtcgggtgcaggggggaggttgagcaaatggtgtatttatcacggaggaccgtcgtctctctntataatttatcccttgtcgaatgcgaccccttatatgaagggttgaagaaactgtaaccttggtggtggcggtgttgtggtgggttagtttcctgttgtcctgtgtccttttctgttgctggtgaggga

SEQ ID NO: 52696 - DNA, 335 bp, Zea mays
  Clone ID: MRT4577_148055C.1
gagctgtactgcgatacccacgcaagagcccgcacaaagcccccagagcgctatgacacggtcactctgtatcacagagcttaagtctctgcaggcgtggcacgcacgcacgcacccacccacgcgcacttacacgagaagacattcatggctttgggcagaatgattgcgcagattgtcaactccatatctatagtcaaggctttagaccttgatcctattgcatattgtcgacaaggaattggaggcaaatgcctgctatgtgaaacatacatacacttagctatgttgtgcaactctttttggggctagccagatgatatttcaagcaataa

SEQ ID NO: 52697 - DNA, 360 bp, Zea mays
  Clone ID: MRT4577_148056C.1
acccacgcgtccgcggacgcgtgggtgcacgcgggagccggcgaggtgcctaatggactcggccgaaatggcattcagctacaatatcaagactggactcgtgtccgtcgacttgccggtgccggcgcatgacctatacctttggacactggacattatgatctaagtcgtgatgctgtgcgccgacggtaaagcatgccatcgcggctgagccattatgagtctgacgacattgtcatttgctatgtgcactatatgatcatgtatcgtggtggtatagtatacttggcatggggagtgtcttttttgttatgttcatatctgtatcacatacatgctctgaatgttacaagatacctg

SEQ ID NO: 52698 - DNA, 343 bp, Zea mays
  Clone ID: MRT4577_148057C.1
acacacctgacgttcgtggatcacagtcagcacatttatcattcgcccttgataatcgatgatcaatctactgtacagtttactgccatgccacaaataatctgtatccagcatggagtttgctcacaaaagatgaaagggaatgcccactcactctgactagctttgacatagtctactacatgttcaatataaaatgtgctttgctctaacaaaacaagagtcatgctgcttcctacctcttctgatggtgaaatgctctaggcacggctatgtatcctcttctcccatgattcgatactacacccgcctagttcaaactccttcacattaccccttgcta

SEQ ID NO: 52699 - DNA, 643 bp, Zea mays
  Clone ID: MRT4577_148058C.1
aaagaggctagtaccggaattcctctagtaccatcccagacgaggagcagagccaccgcaatcgaatccccttccttccttccgtcccgcacgacgatggagcgcgtgagaagggcttcgcatgccggctcctggtacaccaacaacgccagcaagctggaagaggaacttgatggttggctttcggcagctgctctcacgaagtcacctgatgttagggccgtaattgcaccccatgctggctattcgtactcagggcgatgtgcagcttatgcttttggcaacattgatccaactaacatacataatgtaaaagttgtacctatccttgttggtgctgtcaactcccaaaatgaagccatgtatgggcagttgctcgcaaaatatgtggatgatccaaagaactttttttctgtctcctcagacttttgccactggggatctcggtttagttatacatactatgacaagaagcatggtgccattcacaaatcaatcgaggcgttggaccggttgggcatggagatcatagagactggtgaccccgacgcgttcaaacagtatctcgaggagtacgagaacaccatatgtggacgccatcccatcagcgtccttcttcatgtaaatgttgaaacactgctcg

SEQ ID NO: 52700 - DNA, 819 bp, Zea mays
  Clone ID: MRT4577_148059C.1
cgattaacagagccaccgcaatcgaatcccctttcttccttccgtccccgacgacgatggagcgcgtgagaagggcgtcgcatgccggctcctggtacaccaacaacgccagcaagctggaagacgaacttgatggctggctttcggctgctgctctcaccaagtcacctgatgttagggccgtaattgcaccccatgctggctattcatactcggggcgctgtgcagcttatgcttttggcaacattgatccaactaacatttctcgggtgtttctgctcggcccatctcatcactactatactccaaaatgtgctctgtcaagagctactgtttatagcaccccgattggggattaccagtagacctggaagttatcgaggaactcaaagctaccggaaaatttgaatttatggaccttaatgtggatgaggctgaacatagcatggaaatgcatttgccttacctttctaaagtatttcagggacataatgtaaaagttgtacctatccttgttggtgccgtcaactcccaaaatgaagccatgtatgggcagttgctcgctaaatatgtggatgatccaaagaacttcttttctgtctcctcagacttttgccactggggatctcggtttagttatacatactatgacaagaagcatggtgccattcacaaatcaatcgaggcgttggaccgcttgggcatggagatcatagagactggtgaccccgatgcgttcaacagtatctcgaggagtacgagaacaccatatgtggacggcatcccatcagcgtccttcttcatatgttgaacactgct

SEQ ID NO: 52701 - DNA, 305 bp, Zea mays
  Clone ID: MRT4577_14805C.1
agttttaatcatttttagtcatttccgggaaaaccacataaaaggggggggttatttatagttttgcggggcaaccccaaaaaacaccttatttaccttaaaaataatcttaaaaataaatctcgcactgggttactaatattctttatcccctaaatcccagctgttttattcaagggtgttcgtaaaccacagttaaaaaactgtaataaaactatttcaaaaagatacctttctaaaaaaaatacagttgggacacaacaaaatcaattaatataaaaataaaccccttggacaaaggataa

SEQ ID NO: 52702 - DNA, 955 bp, Zea mays
  Clone ID: MRT4577_148060C.1
gccgccaccagtctctccctctcctcccggctccggcgaagagcgcccaccagatcacttgttaatctttctcaaggggagatggcgttttctttcgcaaacgtcaactctgaggcagggcttgaaaaagcttgatgagtaccttttgactcgcagctacatcactggctaccaagcttccaaggatgatctggctgtctactcttcattttcggctgctccctcatccatcgatatcaacgtagcatggtggtttactcacattgatgcactcttgaggctgagtggagttactgcagagggcctaggtgtcaaggttgagtcatcagcagttccttcagcctcaactcctgatgttgctgaggccccagcagctgacgatgacgacgacgatgatgttgacctttttggtgaggagactgaagaggagaagaaggctgctgaagagcgtgctgctgctgccaaggcttctggcaagaagaaagaatctgggaagtcttcagttttacttgatgtgaagccatgggacgatgaaactgacatggccaagctcgaggaagctgttaggagtgtccagatggaaggactgctctggggtgcttccaagcttgtcccagttggatatggcatcaagaagctgcaaatcatgatgaccattgtcgatgaccttgtctctgtcgacacactcattgaggaccatctgtgcgcagagccagtgagcgagtacgtccagagctgcgacatcgttgccttcaacaagatctaaatttgctagaggtgctggcgaaggtggttggcgggcaatgcaacaacctaatttatccatatttctgtgtctgctttgtgtggctagtgatattgccgtgaggtttttggatcctagtcgtgtcaaatgtaccagtaccagagttaatttgctttaattcgaaacacagtctggtggatttctgttact

SEQ ID NO: 52703 - DNA, 379 bp, Zea mays
  Clone ID: MRT4577_148061C.1
cattggctccctcgaggccgggagggaaaaacattctccaagaggcccgagcagaaccctcttccaccgcgctaaagggttgcatatcctgacaagggtcagccccctcctccacaacgagatgctcatccccatcgaaaaaggccgccatagacgcatgaaaaggatgcccaacagcgtgcctaaagaaacctctccacgaaggacaacacctacacctctacggaaaccatctccaagtcgacgggctgaatcacacaagacgccaccctgaccaaaaactaaaagacgaactgatcatccaccaacacctccccgcaccaccaaccttctcctgtcagcacgagacgacacacatcataagtgtttttttttttcc

SEQ ID NO: 52704 - DNA, 197 bp, Zea mays
  unsure (1)..(197): unsure at all n locations
  Clone ID: MRT4577_148062C.1
aaaaatgaacttattttttatttgtcgcgtttaaatttaaaaatgaagccgacggtaaaacggaaggcagtaactgctgaaaccgaggcaaagcttttatacagggcaagtcatatataccccagtccggggggggggggggggaacactngnccnnnaccanaaaacgggagcgggggggggcgcccgcccctgtt

SEQ ID NO: 52705 - DNA, 306 bp, Zea mays
  Clone ID: MRT4577_148064C.1
tatatggggagcggggagcgcgtgctaggtgccggggcgcagtatacggggcgacccacgcgtgcgctcttatggacccgagtttagaggtactattggatcaggggtgatgtcaccagagggctcacaacccaatactttgtatgatgcaatgaagtatcctgttgagatgctcaggatagatattagcttggttgaccaggacacctgttctacatgacgggtttacaagctaacggacaagggaaacggctgagtttgacacgaaagtcctattcgcagcaggcagatgagtgatgcacaata

SEQ ID NO: 52706 - DNA, 387 bp, Zea mays
  Clone ID: MRT4577_148065C.1
tgacccacgcgtccaccctcctcccaaactcaagtcacattcaatcttccaacaagctctccaagaggaaagttgagcacttcttcatccccctcgtgctcacctgtatttcgaacattcataattcttggctatttgataattacatcaagaagaatctgcttccgtttgacttccgacccaaaaagacccgatccattagaagaacacgcaaccaaacaccatctatccttgtagaccgtgaattaaaagaaccgttacaagcattttacgatctagaattacaatatcatctcctccatcagtaaaagaacacatatcctgtcaagtaactttcaaactaaacttgcattcaatacataaatttctacaaacaatactatttct

SEQ ID NO: 52707 - DNA, 594 bp, Zea mays
  Clone ID: MRT4577_148066C.1
ctcaaggaaatagaatacagtaaggcacgtatttaacaagaaaatgaggatttgcggtcaaagctcaaggagtatcaggaggcacagattggtggtgcagatgctgttgtatcattgaaaagtctgcgggagaagttccgagccctggagcagacacatagaagttgcaccgagaagctaagaggtaaggaagaagaatggagactgcagatgacaaagcttgtgaatgacttggatggatgcttatcacagttagaatccaaagatattcttattgtgcaactgcagaatgagttgctgggtagtcataggtcccttgagctacaaacagtggataattgggaagcattgataatacttactgttgtacagacaaaattttatgagtcctgctcatttgttgatactgctaaactgaatatgcagcatcactgtgaagaaattgagaaggaaatttcttctgccaagaaacagttagaagaacaatcttgcattattgcccagtctcaagctgaacagaaacaacaatctggggttataacaaaattgcatgcaagaattgaggagctagagcatatggaacaagaacataag

SEQ ID NO: 52708 - DNA, 374 bp, Zea mays
  Clone ID: MRT4577_148067C.1
acgcaagatccaccacaaagcgaaggagaaagagaccaacctaggcacccagggagaaagagttcagaagatactcgccagcggtcgatcacgaagccactagacgctgacgcgagagcatctaccagcacacatcagagcagagtcgcagtaccaggtccccaaacagcgggctgccgagcctggactgccctttcccatgacattcacagctgacggtcacgaggccccgtagacaacaccatatgacgcagcggatgatgctttcaacacctacgtaattgaaactgccgctgggaagcacgtgccccgagatgttatcgttgaccttgaaaccactgtaatccatgacgcgcaggactgccacctaccgc

SEQ ID NO: 52709 - DNA, 405 bp, Zea mays
  Clone ID: MRT4577_148068C.1
aataataaaaaaaggaatagcatttgagttcatctttgttggccactaactcgcaggccggcttattaatcctgtccatccggagatgaaatcaaaaaaggaatgcagcgaaaacaaaaaagaaatgtattctttctttctttcttttttcctaatcaagaacctgaatgatggcttctctgaactctgaactcttcttcttcttgggtttctttcttggaagattctctctctctaccttcgagcttggagcgcttggaaagaatgacggaaacgaatcgaatcaatctgtacacatcccccattgatggcctcggtttgcggatcgagcttctgcttgtggctggctctcgctgcggtgggtcgggcgctcgagttcaggcctccttcgatggagccggcggg

SEQ ID NO: 52710 - DNA, 292 bp, Zea mays
  Clone ID: MRT4577_148069C.1
gtgagtcgtcatacacggttctcgggatcatgtgaaacggcctcacggtggagtaggcattgaggtcgcctcgacaagcattggtgtcaaattgtggggtgttcacgaaggcagttgtcggtgaagtgtccgtcgtcaggaagtgtactggggtttgcatcctacggctgttctcatacagacaagcgcgagatacgtcttttaggtggatcttggcagctctcttgacaacattaatcgttcgtgtaacaaatttggcatgacgagctgtcctttcgcccaggtctatctg

SEQ ID NO: 52711 - DNA, 528 bp, Zea mays
  Clone ID: MRT4577_14806C.1
cgcaggtcgtctctagaggatcgccatgtgcaccaagaaaaggcttaggctatattgactaggaaaaatttttagataggatctaaccagcagttcttaattcagtaatccatgcgcaatcccctccgttggctccaaaatgacgactttgcctatgttgtccagcggttgatagaagggctgattaccttattgctagcatccctattaagctttgccattgttcagctagcccccggcagttatctcgacaccctccagcaaaatccgaaaatttccccagaaaccctgcaacagctaaaagttcaatttggcttggatcaaccttggtatgtgcaatattggcgctggctcacccaagtggtgacccgtttcaattttggtgaaagctttgtctataaccgttccgttgcttccctactaatagaacggattcccgccaccctactactagccataacatctatcattctcacctgggcgatcgccattcccttgggcattgtgggggccgtacagcaaaacaca

SEQ ID NO: 52712 - DNA, 228 bp, Zea mays
  Clone ID: MRT4577_148070C.1
cttacagaaattattttttttttgggtttttttaaaggtggattagagaggcccgcatggacagaaattatcaagaggtaaactggggggcaacaggtttcaacaattttggggcaaacgataaccgaacaagctttaaaccgaaagcggaaaaagtggaaggggaaaaaggagggaaaaaaggtccccagctgaggaaaacataaacacctaagatgggaacaaaag

SEQ ID NO: 52713 - DNA, 1746 bp, Zea mays
  unsure (1)..(1746): unsure at all n locations
  Clone ID: MRT4577_148071C.1
tctgngacagtccagtctagcattgcaatgaagatgatgaaatgggcacagagcttattgatcagctaacttcagaagaaagagatctcctttcacgattgaatcctgaattactgatttgaaggagagatttctaatgtgtaaaaacagtcggattgagatcgaagcacgaaaggaagaattggagaccaatttatcaacaaatcttatcaggcgtcagaaagagctagaagcgataatttcatctgcagattctagaaccttgcctttggaagctgaggcaaaggagcaagaactgaaaagttccaagagaaaccttgatgaactaacttcattattaaaggctaatgtcgatgccataaataatttcaccagaaagatggatgatctgaaaagaaaaagggatgatctgaaggctcgtgaagctattttagagcagactgtacaagatggtgccaaagacttagaacagttgatgaacagcaggaacacttatctagccaagcaagaagagtgcacgaagaagatccgagatttgggcttgttgcctgctgatgcttttgaagcgtacaagaggaaaaacaagaaacagctacataagatactctatgactgtaatgagcagttgaagcagtttagtcatgtgaaccaaaaggctcttgaccaatatgtgaacttcacagaacaacgcgaacaactgcagagaaggcgagctgaacttgatgccggtgatgtgaaaatcatggaactcatatcggttttagaccaaaggaaggatgaatccattgagcgcacatttaaaggggttgcaaggcacttccgtgaagtgttttctgagctggtgcaaggtggtcatggatatttggttatgatgaagaaaaaggatggggatgcagttgatgatgatgaggaggaggatggacctcgtgatccaggccctgatgggagaatagaaaagtatatcggtgtgaaagtcaaggtatcatttactggcaagggagaaactcagtctatgaaacaattgtcaggcggacagaagacggtggtcgcactaacactgattttcgctatccaacgatgtgacccagctccattttatctgttcgacgagatcgatgctgctctggatccacaataccgaacagcagttggaaatatgatccgccgtctagctgacatggctgacactcagttcattgcgaccacattccggccagagattgctaaagtggctgataagatatatgccgtgagacacaagaatagggtgagcaacatcgacgtggtgtccaaggaggaggccctggacttcatcgagcgtgatcagacgtacaatgctagctgaggctgctgctgctgtgtattgattgatctgcaggcagatgctaacgcagacaggatagttcttgttgtgttatggatattctggcctattgttgtagctgtgtatatgtgtgatgcagttaggtagctattggaccagcttgtttggcgcatcaacgttgtgaatgtagcagctaccaccttggtttggtaccagctttaattaagtttgggaagcgctgattagactagacgtacgttacatgttgccccatgattgttgtatggcacgcccagcccaaaatggcagtaatcagttcatttcgacaattaacgtaagtgtaagtgtacgagtagtggtattcaaatgttttttaactgtatttttctagtacatttattttttgtacacataaaaaaaaa

SEQ ID NO: 52714 - DNA, 503 bp, Zea mays
  Clone ID: MRT4577_148072C.1
cccacgcgtccgatttactggcaagggagaaactcagtctatgaaacaattgtcaggcggacagaagacggtggtcgcactaacactgattttcgctatccaacgatgtgacccagctccattttatctgttcgacgagatcgatgctgctctggatccacaataccgaacagcagttggaagtatccttattgtttgttctagtgtctagctatgcacatgatcaatgcctcttctttgtgtgtcaatagtcctgctgctttccttaagtttcattccagatatgatccgccgtctagctgacatggctgacactcagttcattgcgaccacattccggccagagattgctaaagtggctgataagatatatgccgtgagacacaagaatagggtgagcaacatcgacgtggtgtccaaggaggaggccctggacttcatcgagcgtgatcagacgtacaatgctagctgaggctgctgctgctgctgctgctgctgtgtat

SEQ ID NO: 52715 - DNA, 337 bp, Zea mays
  Clone ID: MRT4577_148073C.1
tcgttttcgtccgttgactccgacggatctcgtaggactaggatcggtccgacctccccgcgccggcggcgcgcagtatatgaaggccgaacccgtgggcaaccaggtctagttggttcatacttaccgcgaccagattgcgtgatgcagtacctactgcgatgcagtggaggcgccatcgctgttttgtggcggattctacacaacgcttactttgacgtagcgtcgtcttctgtggcctggaggcgaccatgccttacttcacggatatactataccgtcgtgatgagccagcagttgcttgcgaacctagtggagatcatggatgacagaatga

SEQ ID NO: 52716 - DNA, 386 bp, Zea mays
  Clone ID: MRT4577_148074C.1
cagcaattgatagaaagacgggtcatctagagagtgtcgtaaacaagctaaaagatatagataagaaaattacagatttagttaccaaacagcagcaaatggatgctgaacgtgatcatgcgaagtcagagttggaacaatttaaggctgacattgccagggctatgaagcaaagggggtcacttgagaaagcccttgtcaagaaggaaaaatcacttaacaacatctgcaaccaaattgagcaagtccagtctagcattgcaatgaagaatgatgaaatgggcacagagcttattgatcagctaacttcagaagaaagagatctcctttcacgattgaatcctgaaattactgatttgaaggagagatttctaatgtgtaaaaca

SEQ ID NO: 52717 - DNA, 495 bp, Zea mays
  unsure (1)..(495): unsure at all n locations
  Clone ID: MRT4577_148075C.1
tggcttggaacctttgggctgatttatgtgcttgggatctcgtagatagctcgcctggaagttccctaaattggaatattttttagtagagcgtttggaagaaactcacggatgctccgaagagaaggtccaaggaccccagtcaaggaacaaaccgtcggtatcagtacacagcactcactccccagaccctaatccttctgatcatcccctcaggcaggctgacccgctcccgcaggcgaagcgctgacccgctcgcgagagcgagattatacgaagtcagagagagaagacgttaacaagtcacctaggtcgttgtcgtcctgcgtccttgccttatcggttgggcggtccgaccgcccacgtagatccggtcaacaagtcacctagagtcagtttcntaacccgtccaagatagcgattcgngtgcgagaagggaaggaagatggtagtacacttgatagtgatgccctctgatgtcacgtcgtccatgac

SEQ ID NO: 52718 - DNA, 279 bp, Zea mays
  Clone ID: MRT4577_148076C.1
cgctactgtagcgctagaagccaatgactagctgatgtggaggcaccgaacaggtggtccagtggcgcaccggactggtccagtgcaacgcagacagaaaaattgtagattcctccaatggctacaactgagtgggggtagagatgtacagaaggcttgcggtccaaaagcacgaacggatgcacgctttaccgggccagcacgactcgctttgaccgggttcatgccagaccgaccccgattggcgtgccgggcttgtgtacagtacacaacctgttg

SEQ ID NO: 52719 - DNA, 309 bp, Zea mays
  Clone ID: MRT4577_148077C.1
ggcggggtaagacgacacccatttctgcacgcgaacttagtttgttctagggagtacgtgcgagtgagggcaggggctgagctgctccatgctggcggcaccaggctagtacatctggcggctgtggtggaccgccttgacgctgctgacggtgaccggcggtctgtcgaccaccatgcggtgtagggtctcagccacggacgctttcacaggctcagcggtggctgccgatcctcgtccgacatcgaggacagccccggcgagttcggcctcccgctggcggtgacaggggtctacatgggcgacatc

SEQ ID NO: 52720 - DNA, 714 bp, Zea mays
  Clone ID: MRT4577_148078C.1
ttgggtacctcgaggccggccgggatgtcgatcgcacgccaccacgtccggacgatgctgcctggattcaagaggatctcactgtcctcatgtggctccatgccacgctcgctggtaacctcctcgacatggtgatggatgacgacgacggcacagctcatcaggtctggtcccagatcgcgaacttcttcctcggcaacaaaaacagtcgcgctgtccaacttgaacaagaccttcacaatctggagcaaggcgatctgagtgccgctgcattctgtcatcgtctcaagaccctcgccgatgctcttgccgattgcgatcggcctatcgacgatcgcgcgctggtacatcaactgatccgaggcttgcaccctaaatttcatgtcctcaagcagatgctcccggcgatgccttccttccccaccttcatggaggcgcgagatcatctcatcgtcgccgagaacacgcttgggtcctccaaagcatcgggcaacgaatcagccctcacggcgaccacaaccacagacaacagtggcggcttcaccaactctccgtcaactcgtccagacggcgaccgttctccatttgcctcccgtggtcgtggccgtggggggcggtggccgctggaaacggcgcggtcgaggtcgtgggggccgctatggattcaacccccgtcctccccaactcagcccagctgctcttctgcagcagctg

SEQ ID NO: 52721 - DNA, 333 bp, Zea mays
  Clone ID: MRT4577_148079C.1
ggtattcccaaacacattgggctttaaaagaaatgctgactaaatgggggctaaacctaggaaacaagaggggggggaatgccttttttccaggggggagctttaggtggcattggcatcgacgggggaagccttggaccaaccaacctttttggggaggaggggctgggggattttgggcataacccccccccttgggaaggggggaccaccaaacaagttgggaaactccttttttttgcccacggggagctggatttgacccggcacaaagcgggtttttttggtatccctcggtgggttcccagaaaggtccaagaacttaagggggag

SEQ ID NO: 52722 - DNA, 429 bp, Zea mays
  Clone ID: MRT4577_14807C.1
caggcgaccacgtgtctcccggcgttcaccgcaagagtgcagggtggtgcgcacgactgcaagtgcggagagagcaacatgggccagctggtgacgagcaacgtcgaccagggcatcatgatcctcgacgggaactcccagtatgaacatcacgccccagtccatcttggacttcgtggggacctgcaagttcacccactactccagcttccatagcggctgcctgtgcaacatcaaccactgctgatctcttcacaaaacctccatgcttatgtgtattatctatatcgctcttggcgctacactaacaatgataataaccagagcaacggcttgactgccatacatatttattcttggggcgtgtatgccttgatacataaacaaagttctagactgcgtggtgcatcaatgatcatgcttggggac

SEQ ID NO: 52723 - DNA, 359 bp, Zea mays
  Clone ID: MRT4577_148080C.1
ttcttttggcaggataaagggggggtttttttaagttttctttattttattttaacgaatgttatcctgtgggagccagatgtgaaaggcgaggcacacatggaaccgttccagcctggctgttgagttggttcatcatatggaatcacagtttatagggttaacatcggaaccttcaaaatttcatgtggcaggaagagcctcgctcatggacagaatgagcacattttttctccaccaccacaacctgctaccatgcatgagctgatggcttatcagatagagatgcggctgcagttagagtagtataaggagccttaagactatgggggttgtgatcacacaccagcgtgccctag

SEQ ID NO: 52724 - DNA, 709 bp, Zea mays
  Clone ID: MRT4577_148081C.1
aattcggcacgaggtgccgtctctcctaccacaaagccgtggcccgtgggcgctgttcgcggcggcgacgggtctctcatctcctctaccctctctcgcgcgcaacggcctaaaaaaaccctagcgactcggtcggcgctcgacttggatcgtgccggggggctaggggcaggggcagctctcttctctcgtcgtcgtccaggtgcgtcggctgtccaattccctctcgtgttgttcgtgccctgtcagcgctgttgacgcgtgtcttctctgggtcgccgttgaggtgctgggtcggcgcggtttaggagtttgcggtcggttgtgcctggcctcgactctgcgtgcgtgcgtgcgtgcgtgcatagctcgtttcgtttgggatcctttcttccggttcttgtttgattcgtggaattactttcgctcgccgtctgttcctcgccgcaagggcgaggtgagccttttgttttcagccttttcatcgtgtgatctgtgatggacgaactcgtacaactcttcttggttcgattggccatacaataaaaaggtgggattctattctagcatgccacctcctccctgccgcgtgacgcgatcttatttattgccccttctgtgtaaagtctgttctgggtggccaatttggcgacacgaggtctcacgatccaatctgttggcctgctccttttctagtcgtcgattagtt

SEQ ID NO: 52725 - DNA, 171 bp, Zea mays
  Clone ID: MRT4577_148082C.1
gattcgttgaagaggaggtgctctgtagcagaaactgagctccgggtggctggttctcagtggttgtctcatgtctctttttctgtcttaggtggtttcattaaatgcagcacttggttagcagatgtttaattttttttttaacaacattaacttgtggcctctttctac

SEQ ID NO: 52726 - DNA, 787 bp, Zea mays
  Clone ID: MRT4577_148083C.1
cattgggtacctcgaggccggccggggaagacaccgcgccgcctgtatttccatcaccaactccgtcgctcgctccccgagaaatagatatattcgccagacctccctcgacggcgccttcgccggcaggatatttgccaccaccaccgcctccactcgcgcccgcaccttcatcccctatcacggtatgatccagactgccgcgcccaaggatgaattgtctcggggagggatcgagctcggagctgacaagtcctccctgagcacaatgtaatgcttccattcatactacctagacatcatggcaaagattgtcgacccggaagaaactgtgacagctgcacgcacgcctcgtggactgctgtcaagaccgtgaataagacctctttctgaaaggttgcaatcgtgaccatggaggtcgacacacctggcgcagacaccgactgacagttgccaggatctgtgagggaccggcaacaaaaaatgcgaggcactgagtttgtccatgttacaagcagatgcagactgctaccactgtgaatacatattaaacatgcatattggtcggactgtgatagatcatcagtatgagtgtagaagcgatagaccaatattgtgtatgaatcatgcgacgcgactcactgcaatagattacgctcgtgatgatgatcacctgtcgctgctcatgtgtgtgaatccagccgttggcgggcacagcttgatcgagagtcaagcagagaatattgcagaactagagaaggttatgcgcagactatggagtgaaccc

SEQ ID NO: 52727 - DNA, 370 bp, Zea mays
  Clone ID: MRT4577_148085C.1
acttaatatttgtgtttttattttttgttgttccattggtattcccgcgggggatgcaaaaaaaagggtggatcattttatgatccaatccatgcccatgacttgtgcggggtttacccctcgtgctaccattagttccaaaattgggtcggaggcccctcattctgtggggtacccccacaggtcctatgcctccaatgttaaccacacccacccctgccttttgcccggcgctagaaactttattaaactccggacgaataaaacaaagatgggggccaagctttttttgaggcaatatgacccggcccctatggacctatgaaggggcccggaccctcccaagaacgcgggaccttgcagtgcacct

SEQ ID NO: 52728 - DNA, 261 bp, Zea mays
  Clone ID: MRT4577_148086C.1
taggggccttttttttttttttttttaggatatatatgatgatggactttgcaagttgtgggggaatcggaacatgtttctgctgaccctaaattaaaaaaaaagccttgttcatctctcaaacaaactacaactatccatcctcctcgcatcccatgcacatgctcaatccacacaagcaaacggcgcaagagggcaaaaaggaaaagtcaaactaacgagaaggagagagaaaaaaaatatagaaggatcgtcagtccc

SEQ ID NO: 52729 - DNA, 427 bp, Zea mays
  Clone ID: MRT4577_148087C.1
ttggtatagtatcaggaaaacgacctagtgcttgaaaaaaaatcagtgtatagctggcactgcatgtactgaactggcataaacctctctacatttactccttgagtaactttttagctaggttccttgattcaaacttgctatatgctattccacggatagtcaatctaaaccaatttaatgtttccagagcatgttatgtgttatgtaccatgatgttgctcatgttttgtgtaacctctctagtttctatgatctgttcactgaacttgatgactactgtactcaggttattctggctcctcgactcctggtcattcagatggtgattcttctaacagaacggtatatgttggtgggcttgaccccaatgtcagtgaagatgaactgagaaaagcctttgccaatatgatcttgctctgtgaaa

SEQ ID NO: 52730 - DNA, 488 bp, Zea mays
  unsure (1)..(488): unsure at all n locations
  Clone ID: MRT4577_148088C.1
gccatgnattcatcgcgcggccgcgggggcaaggcatttctaggcagcccgctgggggacccggcgccacaggaactgacgcattggggcccgcctttggttcgcgatcgccgtaacggcgaagcctgctgccgaagaggtggcgaacacattgatctcctgtgaccggactttgaggttccccggcgccgtggcgcccgactacctggacggctcgtgtggtcggcgactacggcttcgacccgttcggtctatgaaagcccgctgtgtacctgcagttaaagactatctcggtggaccaatacctgggcaaaaatgaagctggctgactaatgggtacacggatctagtgctccgtagtgaagggcaaccagttgcacacttacagagaggtgtttggccttcatcggatacgccagtgcgagctgatccacgggcgatgggccatgctaggctcgcttggcgcactctacgtatagtggctcacc

SEQ ID NO: 52731 - DNA, 508 bp, Zea mays
  unsure (1)..(508): unsure at all n locations
  Clone ID: MRT4577_148089C.1
ccacggtgctctgcctttgcacacttgctggggcgccggcctgtgccccacctttatcggcggcatcatcatgagtgagaacctgacgggcacatgaggagggaactcgcatgagcaggaggtttccgcgctacttacgctaatctctgcctgggcaaacatatcggacgccgccttctggcaccttcacccatggtagacggggtacaccgtagagcgctaccatatcgaatgcctcctagtaaaagntcggatgcacatgctctccagcctgctagtgtgtacccccatgaccttcgagatgatgagnagggaggcgcatgattgagcgggacctgagtatctgagaggaagtgaaatggtcacagaatcaacaggtggctatatccaaccccacccttgctgcagtgaacaagaagcttgggatgatccacgggctgcgatcactggacaacatcatgccgtttggcagcttgagcatgcactcctggaacctgtgcagcaagct

SEQ ID NO: 52732 - DNA, 144 bp, Zea mays
  Clone ID: MRT4577_14808C.1
tggttacggctgctcaaaagttcggcgtcatcagagcactcgtcgagcatgcacattttgaaatggcatatgtgcccacttggtcccggatatatccttgatgttactccagagttgtttgatataatgcttcttccatccatt

SEQ ID NO: 52733 - DNA, 447 bp, Zea mays
  unsure (1)..(447): unsure at all n locations
  Clone ID: MRT4577_148090C.1
ggccgcttttttttttttttttttggaggggcaacttgctattcactgttgttacacgtacgtcacaccaaaaaactttataattgaattactcctattaaacaatctacaacagggcgcccccaatgatgtgttgtctgggactacctgctccaacttgccccctgacgtacacaaactcagcgggggggactgcctgttcttgttcttggcgccggccttggcctcctggtggctgcgcggcacctggtcttagcctatcaagagctggctggttcctatcaggcccggggtagttggcactaacctgtgtttttgcagccttgcccatcttgcgggactccctgcccctcacagtctttgnggctgagcttccctggtgccggccgcttcttggtcttggtccgggggtggtcccccgcccggtcctttgcggctggccgggtt

SEQ ID NO: 52734 - DNA, 495 bp, Zea mays
  unsure (1)..(495): unsure at all n locations
  Clone ID: MRT4577_148091C.1
tttttttcccttttcttttntgtttttttttatctttatttttagatttcaaactcaaattcaaattttattgccaaattcttacttagacaaaatacaccaactcaaatacgcgtatgaaaagttttatttatttatacatgtattttctttgtgttgtatagcatttttccttctctttctccaaattctaaattgcaaattaggtattaaatccaaatttggacattaatgtatttctattaatattattattattaaatgcacacacaaataaactccaacgtgatgcacatattattttaggtgtcattagttaattattcactttaaatatggctattcacatgttttaataattggaagaaaatacatgtaataagatcaaccttctcttattatttacaagttgggtatcacaaatcctacccccttaaaaataatctcgacctcgagattaggaagaactagggaagaggtggggaaattctattc

SEQ ID NO: 52735 - DNA, 160 bp, Zea mays
  unsure (1)..(160): unsure at all n locations
  Clone ID: MRT4577_148092C.1
cccacgccgtttcggcagtcaccacttcccaagccagtacccagcagtcctgacgagcagttcgcaccgcaagtgtgcaaggagtacataaacgtngtcgacatgggcttcgcatcgcatatctgccgtagtcggtncnngccgtggtggccccgcggtg

SEQ ID NO: 52736 - DNA, 606 bp, Zea mays
  Clone ID: MRT4577_148093C.1
tttttttttttttttaacatagctgactgttttccatcatatttaacgctatgtctagagttccaggcccatatggctatgatctccactccgctttccatccgcaaactacactcaaagttcctgggccgatccgtccgtttcatattggtacactacatccagagttcctgggccaatctggcggtgatacctttcataacgaatgagctggaaacccagacgccaaatctgatcgtgaccttgttgacgctgacatgaataagactgtgaatgactctcaggccaacgtagccccatgccatacgagtagtgactttgtcgttaacgttcaacagggtcaaggccagaactgctgcatagaactgagtgggttgctccaagaggttgttgaaattgtctgcaggccattggacgaaggctggaagtttcgtggccttttcttgcttgaccttttcgggatcgaagtcgatgttgtatttggcgagggcgggggttctgcgccagtaaaggagaccttcgattgcaaaagtccagaagctgaggccgacgaggggacctaggagaggcttgctgccaatgacgaggggcgaagacatgatctct

SEQ ID NO: 52737 - DNA, 454 bp, Zea mays
  Clone ID: MRT4577_148094C.1
cgccgccagcgcgcgggcgtgcaccgttgcaggcggcagcagcatcagcatcagcacgcggccggctcaccgcgtcgtcgtcccccccgcgatgccaagccgcaactgcgggggggctgcggctggggccgaagccggatccgagcgccaggccgcgcctggccgtccgcttccaaatcgtgcatgattaggtggttgatggcactcgggtggtggtggtgcactgcggctcctcccgagcccccaaaagccaaattccatcgccctatggcatcgtgcattgattctaatgggaaagttcgcataactgaaactttgccgtggatcttgtgaattttagtgggaatttgatcgtggaaagtttatgaagttttgttgggattatggatgcataagaaagtggtgtatgtgatttgcccatagtttctgcagcctcattggtttccatttggga

SEQ ID NO: 52738 - DNA, 235 bp, Zea mays
  Clone ID: MRT4577_148095C.1
ccgccgatgtactacactaacctaccagaacttttatcactatgactgcggtagactatgcaacaattggtcctcacttataaatgtgcttgactctagcgtacccagaaccacagtgggtatattcgtacctgaccgagcgggcgagtggcaacatggtccttatatgtatcacactgaggctgcctcgaggatccgtcttaggggcccacttgagcctatgctgcatctgcag

SEQ ID NO: 52739 - DNA, 327 bp, Zea mays
  Clone ID: MRT4577_148096C.1
tcgttgagaagtatgaactcacactatgattactttacttacaatgttaacactgtccgtgttgggcatgcgatctctactgtgtgtttgtgctaactgatgtaccattatgaggggaaactgttttcttctaggcttatgagccctatgatgctaaatatgcaattttgttagaatgtgctcataaaggcattttatttagattatcgatagttacttttttcttaattttaaccttatattatatctttctactgaattttattgcctatatatttagttgatttgtcattaatcgttttatatttttatgtttctatgtttttt

SEQ ID NO: 52740 - DNA, 216 bp, Zea mays
  Clone ID: MRT4577_148097C.1
ggtctactaaacgtggttttctaacagattttatctgctaactatagctggctttacaaccccgcatcgcgaaccaggcaaagggcacggatcaaaaacacccgccggggacacagagttcaaacaacagcgttcaatacagcacccaaaaacgtggggacaggcaggcgattgacagatgcacgcttgtccaacgcaagaatcttacatacatga

SEQ ID NO: 52741 - DNA, 222 bp, Zea mays
  Clone ID: MRT4577_148099C.1
agcattcatacacacatcaagttattcgcactgccaacagccttacaacaagggtaccacaatgtttaccctgcttttagttcttgctgttctagttggcgcaacagatggcgccactaatgcacagagtttacttgagtgctgagtcgttattacagagattcttccacaagttacttcaatgggctcttaaaatgcattcgtacaagcctacaggctaga

SEQ ID NO: 52742 - DNA, 571 bp, Zea mays
  Clone ID: MRT4577_14809C.1
gggtcgagccacgcgtccggcgacatgcacccggcgacgtggggcgcggcctacggcaacagctggaggaccaccaacgacatcgccgacacctgggacaggtcagtctgtttgttccttgcgttgcggcctcgccgctgtcctgtccagactccagaccgtttgctagcttcactgagacggtacctgccgccgttccagcatgatcgccacggcggaccagaacgaggtgtggtcggagtacgcgcgtcccggcggatggaacggtctgtactgtactgtacacatgatcagttgaacggcctgtacatatgatcagatggattcgcgccttaacgctccggtccggtggtctggcgtgtgcagatccggacatgctggaggtgggcaacgggggcatgaccaacagcgagtacgtcgtgcacttcagcctctgggcgatctccaaggtcagtgagactgcgtaccgccgtaccgtacctgctctctgaatcctggtagtggtggtacacagacagaacatttagtttctttttttgtctgaacttgtcctcggcccggcaatgaacgc

SEQ ID NO: 52743 - DNA, 147 bp, Zea mays
  unsure (1)..(147): unsure at all n locations
  Clone ID: MRT4577_1480C.1
ccgggtgcgacccacgctnctgngttcaggcagttgctcaacgtggtagtcgggtggagtgctcttaccgataatgccctgccgtcctcacctgtcactgcgtctgaggcttccatgccctctgttgtctttcctgtcttttgctct

SEQ ID NO: 52744 - DNA, 201 bp, Zea mays
  Clone ID: MRT4577_148100C.1
agaagtttggttcctaaaacttagtgttccagattttcatcggttgtgtctcttgatgctgttgaagtactacaaagaaaaggtcacgtacgccacctgcaaagaggcctacaaaagaggctttttggtatatcacgatgacaagaaagaaggacaagttcaatgtgctcaacgatgctggcccaggtacctcggcaaaat

SEQ ID NO: 52745 - DNA, 248 bp, Zea mays
  unsure (1)..(248): unsure at all n locations
  Clone ID: MRT4577_148102C.1
cccactgnccggccagaaccaaggaggcatcgcgggcccagattccgctggcgacagcgagctaatgcgccggngcncgngaggcacggcaacgcgacgacggagcaaaccggagagccacggnccgcccnccaaaaagaggacaagggncncagaaaaccgagcaaaagggaagcccagagcacaacaacaanagaggccccaacaaaggggaaaaccaagaccagcgcaagacaaccaagaaacga

SEQ ID NO: 52746 - DNA, 211 bp, Zea mays
  Clone ID: MRT4577_148103C.1
gaattccctgtcgaccgactcgtactcccacgcgtccgcccactcttccctaaatttttctcaataaatacatcgtcaatcccttagtcatcatatataggttgctggcaatatcaactttatgtactcttcactcaattaccatcctactcatattctgcttatcattctcattctttccatcattactactcatctcaccctaatatct

SEQ ID NO: 52747 - DNA, 1970 bp, Zea mays
  Clone ID: MRT4577_148104C.1
cattgggtacctcgaggccggccgggcctttccccaaccgactgcgcgtcccctcccaaacgcattccatcctctctcctccagtgacagcctccggcgcctcctcgggctgccatccagcccgtgccactgccacttgcacttgctgtgccgacccgagctgcggtcgagtgagcaatggagcggcggcggcggcggccaccgaggctgccgctccttgtgttcgtcttggttgccaccacttgccccctcgggagctcagggattggaagcttcggagtcggtgcggagagcaatggagcttcgtctagttttaggaccaggagtctgctgcagattggagacagaaacgaagatggcctatttcatctgccacatacacgggctctcacgcacaagagcagatctcatagaaaagttccaacacccgcaccagcaccagagtccgctccagcaccctcaccatccatgtctccaccggacagctcaccgtctccgtcaccacatggttcacacccaatgccacgccaatcaacttcacatcgtcatccatccataacacctccacatttggtcaggcctgggcctaggcaagatggaaatgatcctttggtttatactccagctcattctcggcataaacatttttggacaacctatggtttagttgcagcagggattgcggttttccttttggtatcagcagctagtattctctgcttccgagctaagaaaatgggaaccgtaaggccatgggcgacaggtctaagtggacaattgcagaaagcttttgtaactggtgtaccttcgctgaaacgatcagagctggaaacggcatgcgaggatttcagcaacataattggttctacctctacctgcatgctgtacaagggaactttatctagtggagttgaaatcgctgtggcctcaagcttggtaacatctgcaaaggattggtcgaaagaaaatgaatcacagtacaggaaaaagatcacaaacttgtccaaagtgagtcacaagaattttatgaacttgcttggctactgtgaggaagagcatccctttaccagagtgatggtatttgaatatgctccaaatgggacactttttgagcatctccatgtcagggaagcagagaagcttgactggatggcacggctcaggatatccatgggcattgcttactgtcttgagcacatgcatcagctgcaaacaccagctgcgctgaggaactttgactcgactacagtataccttactgatgacttcgctgcaaaagtctcggatcttgaattttggaatgacgcaaagggacataattctactaccaacaatgaactggctttctccccagacatggaggacattgtgcgcaagtacggcatggtgttgttggagatattgaccggaagagttccttcctccgaggatgacggaccactggaaaattgggtgtctcgctattttgaaggcgggatgcgtcttgaggagctgattgaccctagcatcggcttcttccccgaggacactgcacgagccctttgtgaggttgtgaggtcctgcatcgatcgggatccaaagaagagaccgcagatgaaagaggtcgcagctcggatgagagagatcaccgcgctggggcctgatggggcaactccgaaggtgtcaccgctctggtgggctgagcttgagattatgacttctgagagctgagttcgacgcatgccagatgatattgtttctcctagtgtgactgagaattctttgagctactactggctgctgctaatcttgtttgtggaagtggtgattaggtagaatttgttatgtgtgcagaattgcatatagggattggtattgtacttgtacatgtcaagaaggtttaacacacaacatactgatatgcaggcattccagccaggtgagcaatagaaagcatgtgtggcttgtttttgctgcaataaaaaaaaaaa

SEQ ID NO: 52748 - DNA, 988 bp, Zea mays
  Clone ID: MRT4577_148105C.1
cgcattccatcctctctcctccagtgacagcctccggcgcctcctcgggctgccatccagcccgtgccactgccactgcacttgctgtgccgaccccagctgcggtcgagtgagcaatggagcggcggcggcggcggcggcggccaccgaggctgccgctccttgtgttcgtcttggttgccaccacttgccccctcgggagctcagggattggaagcttcggagtcggtgcggagagcaatggagcttcgtctagttttagtaaagctttggagtaaaagccatatagtgaaggatggctaggtcaaaaagaaaaccccgtttcaacttcaattctgaagcacaattgaccgttcagaaagtaaaaaataattaggaccaggagtctgctgcagattggagacagaaacgaagatggcctatttcatctgccacatacacgggctctcacgcacaagagcagatctcatagaaaagttccaacacccgcaccagcaccagcgtctgctccagcaccctcaccatccatgtctccaccggacagctcaccgtctccgtcaccacatggttcacacccaatgccacgccaatcaactccacatcgtcatccatccataacacctccacatttggtcaggcctgggcctagctagtattcaaatgatccgagctaagaaaatgggaaccgtaaggccatgggcgacaggtctaagtggacaattgcagaaagcttttgtaactggtgtaccttcgctgaaacgatcagagctggaaacggcatgcgaggatttcagcaacataattggttctacctctacctgcatgctgtacaagggaactttatctagtggagttgaaatcgctgtggcctcaagcttggtaacatctgcaaaggattggtcgaaagaaaatgaatcacagtacaggaaaaagatcacaaacttgtccaaagtgagtcacaagaattttatgaacttgcttggctact

SEQ ID NO: 52749 - DNA, 1712 bp, Zea mays
  Clone ID: MRT4577_148106C.1
cattgggtacctcgaggccggccgggttcatcctctctcctccagtgacagcctccggcgcctcctcgggctgccatccagcccgtgccactgccaccgcacttgctgtgccgacccgaactgcggtcgagtgagcaatggagctgcggcggcggcggccaccgaggctgccgctccttgtgttcgtcttggttgccaccacttgccccctcgggagctcagcagggattggaagcttcggagtcggtgcggagagcaatggagcttcgtctagttttagaaattccaggaccaggagtctgctgcagattggagacagaaacgaagatggcctatttcatctgccacatacacgggctctcacgcacaagagcagatctcatagaaaagttccaacacccgcaccagcaccagagtccgctccagcaccctcaccatccatgtctccaccggacagctcaccgtctccgtcaccacatggttcacacccaatgccacgccaatcaacttcacatcgtcatccatccataacacctccacatttggtcaggcctgggcctaggcaagatggaaatgatcctttggtttatactccagctcattctcggcataaacatttttggacaacctatggtttagttgcagcagggattgcggttttccttttggtatcagcagctagtattctctgcttccgagctaagaaaatgggaaccgtaaggccatgggcgacaggtctaagtggacaattgcagaaagcttttgtaactggtgtaccttcgctgaaacgatcagagctggaaacggcatgcgaggatttcagcaacatcattggttctacctctacctgcatgctgtacaagggaactttatctagtggagttgaaatcgcagtggcctcaagcttggtaacatctgcaaaggattggtcgaaagaaaatgaatcacagtacaggaaaaagatcacaaacttgtccaaagtaagtcacaagaattttatgaacttgcttggctactgtgaggaagagcatccctttaccagagtgatggtatttgaatatgctccaaatgggacactttttgagcatctccatgtttggcaatgccttcctgatttcaccgcagtcagggaagcagagaagcttgactggatggcacggctcaggatatccatgggcattgcttactgtcttgagcacatgcatcagctgcaaacaccagctgcgctgaggaactttgactcaactacagtataccttactgatgacttcgccgcaaaggtctcggatcttgaattttggaatgatgcaaagggacataattctactaccaacaatgaactggctttctccccagacacggaggacattgtgcgcaagtacggcatggtgttgttggagatattgaccggaagagttccttcttccgaggatgacggaccactggaaaattgggtgtctcgctattttgaaggcgggatgcgtcttgaggagctgattgaccctagcatcggcttcttccccgaggacactgcacgagccctttgtgaggttgtgaggtcctgcatcgatcgggatccaaagaagagaccgcagatgaaagaggtcgcagctcggatgagagagatcaccgcgctggggcctgatggggcaactccgaaggtgtcaccgctctggtgggctgagcttgagattatgacttctgagagctga

SEQ ID NO: 52750 - DNA, 319 bp, Zea mays
  Clone ID: MRT4577_148107C.1
atattttttttttttttatttttatctgtgggttttttaggttaaattggagccacatttatgtatgattaagccctaagcggtggcacgataaaattgggaaaggagaacacaaatggtccatgaaaccaggttaggcacgactcacgacacaaaccatacaaattctttgaaggacagcaccatccatggggaatgggagagacactagataacccaaaaacagtaactggtactgcgactggaggatatacaaccaccgggaaaacggagcaccaggcggagggggctcttcttctggatattgtaccctgcaagg

SEQ ID NO: 52751 - DNA, 333 bp, Zea mays
  Clone ID: MRT4577_148108C.1
atcattttttttttaggtgcatatagaatatgggggtactgaatagagattttgactgagagcacaatatagatcagcatcacagaggggttcgcacttattaagattacatgcacacaccacacaagcttcgatccatgccagtatatatgaaccataacagatggctatggcttgaccttgattgtagaccgaacgcctaagaccggggttattctgcaattgctatatccagcttcggagaaaatctagctccagtcctgctcgtatcggtccatgccattgatgaacatgatttagacatcgaatatgggctgcatcggggtgtgcttc

SEQ ID NO: 52752 - DNA, 405 bp, Zea mays
  Clone ID: MRT4577_148109C.1
cccacccggcccggccccctggggcccacccggaaaatccgaaccgggccctggagggggaccaactttcccaaaaaggaggcgaaaaaaaaccgggggaaaaaaagggaaaaacggtcccccggggaaaaaaggtatcccctaaaaaagcccaaaaaaaaacaagccggaaaaaaaaaagggaaaacccggggggcccaaaaagggggccaacccaaaataaatgcgtgggccccactgccccctttccaggggggaaacccgtcttcccaaatgcaaaaaaaaaaaggccaacccccggggaaagggggcctgccaaatgggccccaaggggggtcttcttttaaccaaaaaaaagggcaaaaagggatgggccttccaccctggcccgaaaaaaaggaaaaa

SEQ ID NO: 52753 - DNA, 336 bp, Zea mays
  Clone ID: MRT4577_14810C.1
actttgttatttctaggaagcccaagattgaggactatactctttgttattgaactataactttaagtaaatctaaaagagggcaccgcctttgttggtgagcggctacaaacgctggtttgtatggcacaccttggtgatggactgacatcattatgcatcgctatctgaaaaacatgccaccgttagctacatggtgctgttagatcgtgctctcttgtgatgcgtatcttagaagcttaaatatctcacaccagctagctggcttagtgggagaacatcgctctgcctcgaatgtaatcgatagagtgcatagctgtcacattgttgaatgaa

SEQ ID NO: 52754 - DNA, 253 bp, Zea mays
  unsure (1)..(253): unsure at all n locations
  Clone ID: MRT4577_148110C.1
gacttttttttttttttttttttgtctgcgtctcgtgtgtgcgttctgcgttgttttgtccttcttgtggcgcttggcgtgtgagctctttgcttgtcgtgtcaccgggcggcttcaggggtttttttacatgcctgtgctgctctgtcgtggtgggggtgcttanctgtgcgcttcgcaggcccgttgtaagtcaagtccacgttttttttttgtggcgctgtgaatgatttcgacttccctatggcctttg

SEQ ID NO: 52755 - DNA, 344 bp, Zea mays
  Clone ID: MRT4577_148111C.1
tgcgtcagcctagcaattagctcatggactgcatattggagaactgggcaccgtgaatgtgctgatcgttgcccttgctctcctggcgctcgctgcgagcgccgcctccagtacaagcggcggctgtgtctgccagacaccaccgtttcatctaccgtctccgttctatatgccgactccgttctatctgccgtcgcatcagcagccgcagccatggcaataccccactcaaccaccgcagctaagcccttgccagcagttcggatcctgcgtcgtctgtatgctctgcagtccgatcctgggccaatgacctcttagttcctgaggcaccatttgtttttccg

SEQ ID NO: 52756 - DNA, 322 bp, Zea mays
  Clone ID: MRT4577_148112C.1
gcgcaccgtgcgattgcatatgccctatgtttcgcgctccacaccgggcaggcggcgtcatggctacggaggccccccgagggatgggtggtcggtgggatggcaatgcaggcgcctccccggctgctcggctggcgctcgtcgccaccgggccgccggaggaccctaccacttttgatggaaggtacgtacgggacgaagaccatatggggacccgagaaggagacctatcaacgacatgttccggcctccataactgccatccaaaacaacatctcataatgtcttaacatgctcaccagcgttctctcacctgcacgga

SEQ ID NO: 52757 - DNA, 330 bp, Zea mays
  Clone ID: MRT4577_148113C.1
gacaagaatgatccccacttatgtgacttcattgagacgcattacctgaatgatcaggtggaatccattaaagacctgggtgaccacgtgaccaacttacgcgagatcggagcccctgaatctggcatggcacaatatctctttgacaagcacaccctgccacacggtgaccagagctaagctgacgtccccaaggccatgtgactttactggtcactgaggcagtgcatgcatgtcaggctgcctttatctttgctataagttgcaccacaacatctgcttacaagttctttaatttgtaccatttcttcagataaagaatttggtacc

SEQ ID NO: 52758 - DNA, 277 bp, Zea mays
  Clone ID: MRT4577_148114C.1
acagtaatgtttttttatttttggaaacaaagggttaaagacttggggggggggggagaaaaggcttaggggttggggaaaccatgtgaaagacatgcaactaaccattaacaaaataaggggggcggggctaaactaattccaaaacatgggccttgtggggcaaccaatttttgtgtgtgggggcacactaggccctacattacctaaaattggagggctcaatatacgaaagggccctgaatataactacctaaaggcgggataaaaccctttt

SEQ ID NO: 52759 - DNA, 201 bp, Zea mays
  Clone ID: MRT4577_148115C.1
cggacgcgtgggcggacgcgtggggtcgcggcgggttgcagcctcgttccaccaacccaggcaggcgtggagatggtggacattcaacaagaaccgggggcaccagaaccccatttccaagaaggggtcggccaccccgggcctaaaaaggtcttcaattggccgaagggcttaaggggccgaaaccggcaccggggccgg

SEQ ID NO: 52760 - DNA, 277 bp, Zea mays
  Clone ID: MRT4577_148116C.1
ataacgactgagacagacgcatgagcagactctggtttcgaaaaacagaatcaaactaacttgtagggtttaaaaaaacacaagaaaaatgatataaaaagggctcaccgttctacagcatccaagttttctaacacatgttcaaaacccaatgaatttttccaacctgacaccgaatttcaactgaatgggcccggataaacacggcctggattctaaaaaccgtggcattgccccacttaatccccttggagtaaatcccctatcgtcaaatttg

SEQ ID NO: 52761 - DNA, 901 bp, Zea mays
  Clone ID: MRT4577_148117C.1
ttccagctggggatcgtcaccacttgcggtgcgcgcccatcgaccaccgctccctccttaactcatagtctcatctcaccaagtcaccatccacccacctgctcgacccgcccccgtccacctctctccattcaatcacgccatcgccacgcctcctccgcttctcagttctccctcgctgcgcccacaagcgccaaatcattttcaccggaagccatggccccgctgcctccgggcccagagatggaggtaatgagtggatggttgtggaagactgcgctcatggaagttcccagaaaacatcacagcccaccaaaatggtcagtcatactatggatgcttgtcacagccaacctctggataatgtgcagcagcagtacccagaagaaagttcttatgccagggttcagcgcctcggaaatggattacattgataacgatgggaagtttcttctctccaatggctatgtctttggctttggctttgccaccatcagcgtgtcagacagcacatactacgttcttgcagtagtccacttgcccaccacttctattgtctggtctgctaatgctaactctccagtttctcattcagacaactttgtgtttgacaaggatggcaatgcctacctgcagtctggaggttccacggtgtggactgccaatatctccggcaagggggccacctctatgcagctgctagactcgggcaatcttgtagtgtttggcaaggacggctcttctcctctgtggcagagtttcagccatccaacagacacacttctgtctggacaaagcttcatcgaggggatgagtttgttgagccattccaatgcacagaacatgacctatacacttgagatcaaatctggggacatgttgttgtatgcaggctttcaat

SEQ ID NO: 52762 - DNA, 330 bp, Zea mays
  Clone ID: MRT4577_148118C.1
ctaatttttgctcagccgctcgagcaggcaagcagaccggccgccgcagctgctgcagtgctgcccagccgctcgagcaggcagctccggccagccgcacgagagcaggccgcccagctccggctccggccaaccgcacgagagcaggccgcccagctccgcctccggccaaccgcacgagagcaggccgcccagctccggccagacgcacgagcagcaagcaggccgcccagctcggccagccgctcgagcagccagcagcacgagcagccagccgcacgaccagtgcacagcagagagcagaccacaccggcaagcagaccagcagct

SEQ ID NO: 52763 - DNA, 216 bp, Zea mays
  Clone ID: MRT4577_148119C.1
tatataaaccaccagcttagctcaatcgattagttacccggatcgatcgatgcatgcatgcaagccgtacagacatctacatctaccattagagctagctccaagcaaagaaataataccctccaatcccgagaggggatttgaggtttccaaaaaaaaaaaaaaaaaaaaaaaaaaataaaaaaaaaaaaaaaaaaaaaaaaaaaaaaaaaaaaa

SEQ ID NO: 52764 - DNA, 258 bp, Zea mays
  Clone ID: MRT4577_14811C.1
tttcaaaaaggggctctccagatcccggttttccgcaccaccgatggccaccaccgtccgcctgcagctggtctaccgcaccacccgctgctgcttctccttgctgacgacctccctcatcagatcatctgattttgagacggcgtccagatcacccaagatcatcctcgtcccgacggacccagcaaccgcactcctccagcaccgccatccgcgagagcaggcagcatcatgtgacgctgaagctgacgtacctgg

SEQ ID NO: 52765 - DNA, 2146 bp, Zea mays
  Clone ID: MRT4577_148120C.1
gtgcggcgctcaggcggcggtcgggatttgttattgtaagtttggacactgagtggcgtagcaggatggtagcggccgttcgttaggaacagccgaacagggaatcagcggcgtgttccacgcattgctcggagcgcgcgacagacgtgcagccagcgccggggcgtgcagctaactcgcaaacatttttataacccgagcacgcgtcagacatgggaaacggcggtgggactggcgataagacgaagacgaaggcgacaggagggctcaccggtcgcgaaccctcctcctccagccacgcctcgaaacggcgtcggggcctgcgcggcgagtccatggctgatcgcttcattcccaatgactttcctgacttcgtcgccgaggctgaggcctccgacggcgaggggcaccgccccgcagggcatcggggcctgctctcgcttccgtacaccaggctctccgaccacttcgtccgcgccgcgcgccgcctcaaggacaaggtggttgaggagacgtgggtgaaagccggacggaaggtgacggactacacgctctacacgggctctctcgggacagcgctgctgctgttcaagtccttccaggtcactggagaccgcggggacctcgccctcgccgctgatatcgtccgcgcgtgcgatgatgcatcgcggggcctgccgttcttgacattcatatgcgggagggcgggtgtctgcgctcttggggcggtgattgccaagcattgcgatgatcagctgagggtcactcagtatctgagctcctttgatgagctgtcctttgtgacgttgtagataacaatcaccgagaaagttccaaatgagttgctgtatggaagggcaggctatctgtgggcttgtttgttcttgaataagcatctcagcgagaagacgatccctctcgatcacattaattctgtggcgaaggacattattaatgagggaagaggttttgcaagcaaggggagtagccctctgatgtacgaatggcatgggaagaaatactggggggctgcgcatggtcttgctggaatcatgcacgtgctaatgcacaccgaactgaaaccagatgagcaggatgatgtaaagaacaccctgcggtatatgatcaagaacaagtttcctagtggcaattatccctcaagtgaaggcaatgaatcagatcacttggtgcactggtgtcatggtgccccaggtgttgctcttacccttgctaaagcatatgaggtcttccatgatgattatttcgagcaatcagctgcagaggctgctgaggttgtctggaaccgagggcttctgaagagagtcggaatatgccacggtgtaagcgggaatgcctatgcgtttctctcactctacaggctaaccggtaatgttgagtacctctaccgggcaaaggcttttgcctgctttcttctggagaaagctgatcagttgatagccgagggggccatgcatggtggtgatcgcccgttttcactgtttgaagggaaagctgggatgtcatacctcctcttggacatggttgatccatctgaatcaaggttccctgcgtatgaactttgagatatactattaccctgcgacttgtgaggctgttcgatgatccatcagtcaggaaaactctgtttgtattttctcgtctagtatgtgatgtgtgcttagacctcgggtggtctgttgtgtttgtagatttggcgttcgtgatgttgcaaacttgaatcttctgtgaagtatgtgtgaccatcacattcggctgaaaataagctcgaggctcgcgagccggctcgagctcggagcggcttggctcggagcggctctcgcgagcgagccgagcctgccttttgggctcgttcctgtggcgagccgagccggctcgtgagctgtgtcaaattacttaatatgtataatactggtggatattagctaattttataggttgtcaatttgtttcttagcgtttcatgatagatatatgacaattaataatttagattcctcatcaaaaaaaaaaaaataaaaaaaaaaaaaaaaaaaaaaaaaaaaacaaaaaaaaaaaaaaaaaaaaaaagaacaaaaaaaaaaacccgcggccccttgagagcaccccaccagggagggcgggagtc

SEQ ID NO: 52766 - DNA, 241 bp, Zea mays
  Clone ID: MRT4577_148121C.1
gtgaccttatatgggggtgttatatttttgagagggggtactgcaacattaataattgattgggaggcgtgtaacaacaaaaacaggagacatcttcacgatgttagaaacaggagaaaaaacgcacatggccagggaaaaacatgcatggaaattggggcacgtgacatgacggtggagggatggggtcagaatgatcagaaccgccatgccgagacagacacgagctggacgctctgcc

SEQ ID NO: 52767 - DNA, 270 bp, Zea mays
  Clone ID: MRT4577_148122C.1
tccaagaccacatcggtttatcgacgtgagctcttgcgtgagtgctctggtcgactaccgcccgctcgccatggactcaacgacgacgacggcgccgctgctgctgccgtccgccgcctcgtgcaaggtggggccggctctggcgccgctccgcactgtgagggcagccgggtgctggaggcgatcctggccgtcgcgtccaagccgtgggctaggcgggccttggatggctctcgcctggagctgccgctgctgctgcgggtggcgctg

SEQ ID NO: 52768 - DNA, 382 bp, Zea mays
  Clone ID: MRT4577_148123C.1
cggccgggccgggtgctatagatggaaaaaaagaaaggtgtttccatccgccagattaggcatggaagagccgacttcaaatcccgatggccgtgtggacgccagcagctgttcctgtcgcaggtgctgctggcacagcggtttcctccgcgccgcctggcgggtatgacacggctgcttcccggggctgagagagtaccaacacaacgatcatccacctgcccatgtgcactgtcgacctcgagacgaacggtggaacggtcttcccgcccgccgacgaggcggtgcgcgtgccagtgtgccacgcacggagtgcttgctcttcgacccgccctaataccactaccccatcacgcaccccactgaagaacgctcttgactg

SEQ ID NO: 52769 - DNA, 846 bp, Zea mays
  unsure (1)..(846): unsure at all n locations
  Clone ID: MRT4577_148124C.1
gccggccgggctgcgatccattattcagaagacatccattccatattgtgctgctacctctttagtctcttccttctatcttctagagttctacttctccttgtagatcgttagctcgttgaaaccttccctttctatcttcatgtactcagatcttaattgaatccaattatccagtgtttggttgagaggtgttgttaacatttggtatcagactactcgcatcctggaagattgcacgcatggagacgacaatacagcagattctggacgcgatggcgcacatggagctccgcttgaccgatgtgttggctggccgtggtggcgagcacaggatggaggacgcggtctcagggctgcgatcttccaactccgccacctcctctgtcgccgcgccggtgtacgacgacgacgcgtccgccagcgtgccgcccaacccggtcgcggtcatcgccgacaattggggcgggtgcttcgacggcgagcagtacagcaccagaccatccgtcgtcgccgacaactggggcggattcttcggtggcgaggacctcgcttcgtcaggcaaccccacgagattcatcctccccatcgcctccaccgacgagcccagcatcgacaccgcgctagcccgtgccatctctaaagccgcagatgactccgtgttcgttacggtcgaacctgccggctacgacgaatccgagctgcacgccaccgcccgtcctcgacgtgttgtcccgcgtgcacacgctggacaagtgcatgacctcgcaggacaagttcgtcatcgacctcgatccagacgacatggagacgnccgttatcgaagtcggncccttccgtcgttcc

SEQ ID NO: 52770 - DNA, 367 bp, Zea mays
  Clone ID: MRT4577_148125C.1
acgccatcgcgtccatccgtgccgcggaccttcatggtcaaccacttctacctacactactgccgtaagggaggcctcagatacggatacaaccatcattcttaggaagctcctactttgtcacggtaccgaaaatggctagtctcgctaagaggcctcaaccgctatgctcattcatgatggatacgtacaagaattcttgtgaacagaacacctgtatctgtccagactacgcgtagtttgaatgtaatcatatcatgctgatatacgtcctgtaaaacactggagaatattaatgaggtctgcattgatcctgttctaggggttgaagctgacaacgtccacgacttccgctctaaatgatcca

SEQ ID NO: 52771 - DNA, 446 bp, Zea mays
  Clone ID: MRT4577_148126C.1
agcgagacgcgtgggcggacgcgtgggaaaaaaaaaaaaaaaaaaaaaaaaaaaaaaaaaaaaaaaaaaaaaaaaaaaaaaaaaaaaaaaaaaaaaaaaaaaaaaaaaaaaaaaaaaaaaaaaaaaaaaaaaaaaaaaaaaaaaaaaagggggggccccccaaaaggttcaaaccttatttacccttgaatgcaacttcaaacctcttcaaaattttccccaaatttcatttcatgggccttcttttaaaaacttcttaattggaaaacccctgggtttacccaatttaacccctttgaaaaaaacccccttttcccaatctggcttaataccaaaaaggcccccacctttcccctttccaaaaatttccccaccctaaatggcaaatggaaccccccctttaccggcccattaacccccggggtttttgtggttaaccccaactt

SEQ ID NO: 52772 - DNA, 358 bp, Zea mays
  Clone ID: MRT4577_148127C.1
tttttattaagtatattgtgcatgatctccatgcatccactaaaaaaggggcaacaactgcagtagctagctagtagtagtgaacacaacagaagcgtgcgtccatggtgtctgtcgtcgtctgcaaataagtggtgtggccttgttgcaaccgtaccgatgatgatgaaggatttttttttttggccatgaccgtccgtccataatacgtgtatgtatagtagttgcagaaagtcgatcagtcagtgtatatatagtgtacatgaatcaaacaaacaaagctctcaaccaatacctaaagcgcttgcaggtggggcgggccccccgcgttttaaaaagtttttaattcggggggggc

SEQ ID NO: 52773 - DNA, 282 bp, Zea mays
  Clone ID: MRT4577_148128C.1
atgggcacccggtcccaaacgggtgtccccttggccggtgtgggctgcgtcgctcttgtggatcatctccgtgcggcgtcatggccacccaagttccggccgcacctgccggaaaagtacaacgaaacatcgaactcgtcggagttcttgcagacctggctcatgaacctcaccccggggtcagtctactcctgggaggagctctgcgcgcggttcgttgcgaacttcgctagtgcttaccagcaacacggtgtggaggcccacctccatgcggtgaggtag

SEQ ID NO: 52774 - DNA, 146 bp, Zea mays
  Clone ID: MRT4577_148129C.1
atggtagaagctcggatcggtcgagaacggaccaccaggttggcgttgctggtagagaaggagctgtcggcggtgcttataatctgtgctctacctactggcgtagctagaagatagtacagcctgctgctgctaagtacagttat

SEQ ID NO: 52775 - DNA, 337 bp, Zea mays
  Clone ID: MRT4577_14812C.1
aaggaaacaagcgagcaggtccccattattttttacactaaacacatctccacacgtgggactgcattcccttactactaaaccatccatgttactaagtcagacatacgagaccaccgtctttacggcgtgatgtacaacatacacaattcggtgtgcggagtaaaagaatccacttcatcataaacctatcacccgacaacacaaacgacagtaacagatgttcccgtccacattattaattcggttccacgctgtcgacgccacataacataatgcaacaacagcgcgttccttcccttttccacaacgtcagccttcacctatggtacttcct

SEQ ID NO: 52776 - DNA, 251 bp, Zea mays
  Clone ID: MRT4577_148130C.1
ggacggtccgcccacgcgtccgggacgcgtggtaaaactgctgctgatagtcttgcaaaaactaatgagatgttaagtcaagaggttgaaaagctccgtgcacaggttgacaatctaaggcgccgttgcgagcttcaagaacttgagttgcagaaatcagcaaagaaagtacaagaagccatgtcaatggtttcagaggaatccgcaaaatctaaagctgctaaggaagtaataaagtccttaacatcaca

SEQ ID NO: 52777 - DNA, 366 bp, Zea mays
  unsure (1)..(366): unsure at all n locations
  Clone ID: MRT4577_148131C.1
cggccgcgtgggctgtgactgccgaagaacaaattggtctggcccttccacgtgtctgatcggggctgaagtggtggaactatactaaatcgaatcggccatagttagctngaaattcatatcagctgtcagtagcacagtaaggcattcccgccagtgtatgtaccatttgggcgcaagctgtaaaattattgccccgacgagaatgtgtagcatgaatttgaatttcttttctgctattgctgtgtactgttgcagggtagtgccttattgtagtatatgtataggtgcctgagttttatgtatcatctatttatgccattgtaccaaccccaaacatcgattattataattcatctcgcagcc

SEQ ID NO: 52778 - DNA, 387 bp, Zea mays
  Clone ID: MRT4577_148132C.1
atggttccggaaccaggagccattccggcctcgtgggacccggaacacttgcggcactcaagtcaaacgcttctgcagccgtggatcccaccgaccgagagcggtaccgtctcgccgagagttggtgtgggccccggtgggagctaccataccattgtctccgttcgcatggtgacacgtggaccaggggcgcagcttctcagatatttcgtggggccaagtgaatgccggtgcatggaggtcacggtcaccactttggtagagctagcgagcctagagtcgcgatacatcgtgaaaaacaatactaagtctcatctgaccaaggcgaccagtgccggtcctgacattttagaggaccaggacaagacttataatggaggcccttga

SEQ ID NO: 52779 - DNA, 318 bp, Zea mays
  Clone ID: MRT4577_148133C.1
attcggctcgagattggaaactgtatttttccaaataggttctaaggtgatagttctaccatctgggcaagaggcgactgttaaagccattgaccgggactctaatgaatgcaccgtatcgagagcatggagatgatgagacaatgacgattacagggaatggatggaaaacaactaatacctgggggggttactctgtgaccctggcttccctgttcctgtcgctaaccactgggagctaaatgttatagtgctggacataactacttctattcttgttggctatcaagtggagtgacacatacatcatgtgaagga

SEQ ID NO: 52780 - DNA, 556 bp, Zea mays
  Clone ID: MRT4577_148135C.1
tcctgggcgggcccggcttctaagaattctaggtgggatttcccccccggtgtctttgtcagggaaaatatccgggccaccggaaggtggaacctttttttcttttcttaatgaacaattcttcggcggaaggtcccttaaaccggaacttcctaatccagaggaaaccaccaccttaccaccaacccaagccccaggcggaggaataggcggaaacggctaggagaaaccacaaggtgggcccaattccttttgggaaggcggggaccattggaacgccttgggaatcaaggaaattctaatggcccaatgggcccttaatggcaaggcgcccccccgtggcccccttggccaaggccccccggagaaaggaaggccaattaattggggaaggccaacgaaggggtgccaatggttggccttgggtgaggctgggccaattggagctttctccaattccaatggaacaccaagggttaaggccacagggtaagaggagataggccggataccccttcctggccaaggtaattctaacctggaaagtaataggggc

SEQ ID NO: 52781 - DNA, 1239 bp, Zea mays
  Clone ID: MRT4577_148136C.1
ttgggtacctcgaggccggccgggacagcgtccgttccctgccacagagaaacgaactctcttgagtaccacaaaaaaaaacattggcattctttgtagtagagcacagagcgaagccgtcaacgatggcttccgctccgctgccggcggccatcgagcccgggaagaaaggcaacgtcaagttcgccttcgcctgcgccatcctcgcctcaatgacctccatccttctcggctatggtgcgaacacacacacacacacttcactttatattgctttttgcatgggcatcggctcatgaggtacgtacggccggactttgcagatatcggagtgatgagcggcgcgtcgttgtacatcaagaaggacctgaaaatcagcgacgtgaagctggagatcctgatgggcatcctcaacgtgtactcgctcatcggctcgttcgcggcagggcggacgtccgactggatcgggcgccgctacaccatcgtgttcgcggcggtgatcttcttcgcgggcgccttcctcatgggcttcgccgtgaactactggatgctcatgttcgggcgcttcgtggccgggatcggcgtgggctacgcgctcatgatcgcgcccgtgtacacggccgaggtgtcccccgcgtcggcccgcggcttcctgacgtcgttcccggaggtgttcatcaacttcggcatcctcctaggctacgtgtccaactacgccttctcccgcctcccgctccgcctgggctggcgcgtgatgctcggcatcggcgcggccccgtccgtggtgctcgccctcatggtgctcggcatgcccgagtcgccccggtggctcgtcatgaagggccgcctggcggacgccaaggtggtgctggggaagacctccgacacgccggaggaggccgtggagaggctcgctgacatcaaggccgccgccggcatcccgcaggagctcgacggcgacgtggtggccgtgccaaagaagcgggacagcgaggaggcgcgggtgtggaaggagctcatcctgtccccgaccccggccatgcgtcgcatcctcctctcgggcatcggcatccacttcttccagcaggcgtccggcatcgacgccgtggtgctgtacagcccgcgcgtgttcaaggccgccggcatcaccagcgacaaccagctcctgggaacgacctgcgcggtgggcgtcaccaagacgctcttcatcctggtggccacgttcctgctcgatagagt

SEQ ID NO: 52782 - DNA, 307 bp, Zea mays
  Clone ID: MRT4577_148137C.1
aagagaaaatttatattagagggagatatgcaaaactgagatggttatcgaggtataacaagattaaaccaagctcgcgactgtttcaatcctgacccaattcgaatctgacacaccgcgttgtgacgagaaaactacaaacctgggtgcaagggactaggctactctagcgtgacgacagatgcgtttttgccatcgaggagctggctacttgatcaaaagaacccacgataaaagaatctgtcgctggagggaccggggactgagcaaatcagcctgggccctatccaagccatatgacaacgga

SEQ ID NO: 52783 - DNA, 374 bp, Zea mays
  Clone ID: MRT4577_148138C.1
gcggcggttgggcctgtgccacaccggcgtctttcggccggagaaaccttacccgagccgacttcgggacacctttgacgcgttcattcccgaccacgcgtttcgactccttgccatgctcctctacctcgaccctgccgcccgcggcaccgttgtcggcgaccttaacgccgagtactttacgacggcaccggacgcatgcgaccccgggagcctgcccaagtacgcgcccaacaaggagatggtcgccaagttccgggaaggatctagaaggaggtgcaaccttcggagccaaggcggcgaggtggcgaaacggctgtcctgggggcacaagagcatgcagctgcaagtcacgaaccagagccacgtgcacg

SEQ ID NO: 52784 - DNA, 478 bp, Zea mays
  Clone ID: MRT4577_148139C.1
accggtgattgtgtgttgtaacagcaggtgcaacaatggcttcggtgtccatggcaatgccgatgacagtagctagccgaagcaaagaagcgacgttgttcaacccactgcagaaggcgggtgtgtccggaagccagaagtgcagggctcccagcaggctccaggtgaaggcctccctgagggagaaggcggtggtggccgccacctcagccgccctgacggcctccatgatggtcccccaggtggcggaggcagctgacttggccccttctctgaagaatttcttgctcagcatcgctgctggtggcgtcgtgcttgcagccatcggtggtgctgtcgtcggagtgtcctacttcgaccccgtcaagagaggctaaacaaacaaaacttccaggagctgctcccctcgcttgttaaactactgttttctctttgttgaattaatgtgatgctggttgatctgcttgcattttctttt

SEQ ID NO: 52785 - DNA, 480 bp, Zea mays
  Clone ID: MRT4577_14813C.1
ctcatgcgttcctgacctctaagaactgactcgccggaatcgccacaatacccatgtgctcgtggactaccaaccccaggacgttttaagggtagctcgcaactgacgccgccgcatccacactcaatgatgcagcctgatgccatcttcaatctcgaggggaggactgcgactgatgaacacgtcgcgctagatggtgaaatttgaggagccggaagctaccgtctccgcacatcattaatcggctaatgaggtggccgctccacacgcgtccaatgccgcgaccagtaacaaggcggcataaaccgatgatattacctgcatcgcgtatgcgactcctggacgtgcgccaatgcagatgacaatgctggctccgccagccagaccaggctgacggtggatgctaaaaagaactacctagacgatgcatggaactagaagctggcgcattagatgtgatccgctgtccgtgactcagcg

SEQ ID NO: 52786 - DNA, 205 bp, Zea mays
  Clone ID: MRT4577_148140C.1
cattaccgggttcttattcattgcaagttgtacattcaaaacaattggcatagaagtcagtttggaatcgtgtgggtctaatgcggcaagcgtagcaatgtcaaatagccggaccacgtcagcaattagtttttcaaggatacaaatcagcaacacatgacgactgatgcttcccgcaagagtacatgatctccaggacatatct

SEQ ID NO: 52787 - DNA, 256 bp, Zea mays
  Clone ID: MRT4577_148141C.1
aaccaaaaaaacgggacctgaatttttttgggttttctttttttagcatctgtccctaagggaaattgggcagttccaatttaaccaaaaaaaaaccgttgccctgtcaaaggaagaatgatggggcgacaaatggtggttttaacggggaaccaggttttcattttttaaaattaattggatccccttaagcttcccgtgggttgtggtgtaaaaaaaataaggggggaaaaaaaccgttttttttttttttttg

SEQ ID NO: 52788 - DNA, 646 bp, Zea mays
  Clone ID: MRT4577_148142C.1
cgggaaggttcgtagccggaaaccgtcggaaacccttggaccatttgccaccggcccaatgatatcgacctgccccggccgcggcaagatatcatccattgggggttcgaaactccatgtgacgtaagcaagaagaagagcactgtactaaagattgtacccgcggctacgggtacttttcttcttttaatcacatgcatatggcttgtatgcaagtcaagagggaaacaccaaagaaggaattctcagaacaatttactatgcctgaatccttccagcgaacttgggactgaaaatctagatcttccatcagttagctttgaagacatcatcactgcaacaaataatttctctgagcacaagttgctcggggaaggtggttttggaaaagtttacaagggagtgttggaaggtggcaaggaagttgctatcaaaaggcttagcaaggggttctgttcaagggatccaggagtttataaacgaagttgttctgattgccaaactgcagcacagaaacttagtcagacttctttggtttctgcattcatgaagatgagaaagtacttatctatgagtacttacctaacaaaagcttagatgctttcctttttgaagctacaagacaatctttgcttgattggccagt

SEQ ID NO: 52789 - DNA, 238 bp, Zea mays
  Clone ID: MRT4577_148143C.1
aaacacacgtccgcggacggtgggcgaccgtggcggacgcgtggcagatctactgacttcttcataaaccttgaccctaaacaactatactgtttctcgtacaattgggcataactaatttcaatgtaaaggcttatgggcatgacattggtatttaactttcttatggttcaaagttagatcacacaacaacttataattccatggtgtgctaacttgaatatatgagcttatctgc

SEQ ID NO: 52790 - DNA, 470 bp, Zea mays
  Clone ID: MRT4577_148144C.1
aaattacccatcaatggacctagcctatgcagctggccgcgctgggggcaccatgacaggagtcctgagcgctgctaatgagaaggccgtggagttgttcattgacgagaagtatgatccttttttttgcatatcgacttttacctgctttgttctagataaatcgttgcatatttttcatgtcatcctttgatttggtttgccaaacattctgcaaattctaaggccagatacgctatgctaatttgctgcaatgaaaagaaaactttggaccaaccaaagccccatggacaatctactgtgctttgctttagaaaagcgagctggaacgagaatgtatgtccttaaagataatatattctcaagcaccttttgggcctacgttacggattagagcagctatataatcttgatttagactacctttttcctgatttaaatacaagttaaatacaccgaccgagggtcct

SEQ ID NO: 52791 - DNA, 668 bp, Zea mays
  Clone ID: MRT4577_148145C.1
ctcgagtttttttttttttttttttttttttttttttttttttttttttttttttttttttttttttttttttaaaaaaaaaaacttttcttttttttatggaaaaaaagggggtaatggacaaatttaaacaaccataggctagcaggtccccaaactctttaaaaacccccaccattacatgggggtttttttggggtttaaaaaccgggccacccaaaaaaaaaaagacaaaccacaacctcaataggagattaaaaaccaaaaaaatcagggggggattttttaatgggggaggggattttttttccaatggggccgttttgatccaagagcgggcccccttcaccaaaccaaatttgtccaatttccggccgggaattgggggttgaacccaaaatttttgggttgggggcaagatttcacgagggggagggccactctggacctgacccctccaaaatccaaacacctaagggccttccgctttcgccgcccgtttccgttttgtttcccccgggggggggaacccaaaagggccccctttgtgtccccccaccccctaaccctttaaaatctccccggccgttggcttggttgaacctggttgccccccccaacccaagcttggttgtgcccctggggacggttagccggatccgaggggg

SEQ ID NO: 52792 - DNA, 260 bp, Zea mays
  Clone ID: MRT4577_148146C.1
cattgggtacctcgagccggcgggaatccttacaaagaagactactcataagttttctctgagcgggcctgttggtgcaacattgagtccctttactgtgagatagtagcgagcttgagggaaaagtgggcatcggcgtgccctgggtgacagtgttaccggctctcatcttcccacaacgtacgcagacgcaagactacatgcaaggtctggagtgaatactagatgagttaactcaccttacattgcaggtgcccatc

SEQ ID NO: 52793 - DNA, 649 bp, Zea mays
  Clone ID: MRT4577_148147C.1
aggccggccgggccgggcctgtctcaccgtttctctctcctcgaacctcccgacgcatcgctgcttctcccacagcgaggcacaaggcgctcagcagacaagaatcaatcgcccagagcccagaaatgccacctaccctgctctcccatatcccgtagaccaaataattactcttcaactcactggtgatatgcttatacttccagaaacaagtgccgcagccattcgatcgtgtgtagcaagacagtgaagcgagatagacgtctctgtcttcaaccgagcctcatacgcgcaagagacaagacttatatgtggaaggtctcggtacgggcatcctgtagaagacacgaatgacggagactggcatgataggcacgcttcatgggcaaaagatgactcgaagattctttatatgcctgccatgccctgtgattcataaaagcctgggggaggccatatctacggtgagatctggcagcccgaatacatggtgggcacaacgaggtgcgtttattcaatcaacgacaaacgtaaaagccatagctattgtcaaggacaactggctcgtaactaccatatggcggccatagacaatttcatctgtgcaaaatatgtgataacagatgcgtagcccggaacggaacatctg

SEQ ID NO: 52794 - DNA, 341 bp, Zea mays
  unsure (1)..(341): unsure at all n locations
  Clone ID: MRT4577_148148C.1
cgnnaggtgtaccaagcctttttttttttctttttttttcttttgaacaagcttttttttttttttttttttttttttttttttttttttttttttttttttttttttttttttttttttttccaaaacacccttttccccaaaatataatcccttccctttcaaagggtcaatccaggccattgcccaccctcccccccagggggagggggaacccccctttcctaatccccgttaaacggggaacctacctttgggaagttacccggggccccctttactttataacaacagcccccccccgggcggcccttcaaaggggcaaatcccaccccccgggg

SEQ ID NO: 52795 - DNA, 186 bp, Zea mays
  Clone ID: MRT4577_148149C.1
ttcgtaaatttgagacacggaaatcgcatttgctaaacctgataatttaaagccttccctcatatgaaaagcggggccagctggaaagcaaaggaggcacttttgactatggcttctgaattcaccacgctatataggaccatctaccaaaaaacgtttgcctatccaccgcggcctgctatatac

SEQ ID NO: 52796 - DNA, 1121 bp, Zea mays
  Clone ID: MRT4577_14814C.1
agttcatagtatttccaatgggtcacctgtttctaaggcagatgtttctgagcaatccataacaccacaaactccaacacatccttcagtagcagaagaaaagcttgatagctctactgaggcacctgcatctaaggtgggtgatgctgaagcatcagaaacatcacaatctgcaggacatccttcaacagtggaagaaaaccagcaccatcaagttagcaaacattctgatcctagtgatgaagcagagccgaatcagcttagagagtctgttcgagacttacctgatggtagtgcatcttcttcgcctactaaaatacatcaatcaggtgacaccgaaacaggggaatctattcacacaggaaaggaagatacgtctgataggaacatcttgcagtcacaaccagcagagtctgcgctagctagttcagatgatataacggaagctgaggacaatattgctcaagaatatgatgccccaaaagaacttagtggcccacaggagagtagtgatatggtagacaaaggtactcatcttgaagttaaattacatgatagcaatattaatactgaaaaaagtgaggaagaaagcaataagatggagtcaggggaatcatctgttgttgtacaggaggataatgcaatggagcaacctcaagacttaacgttgaagtccttaactgcagagcatgactcaaattcgcagaacgagtcagtgatcaattcgactgatatacctgttggactaggtgaaggtcctccaaatgattttacaaaagaagaaaagattctagaatctgttagaggcacagattctcagactctggactctgttgtttctgtcgatgagctagagaaattaagacgtgaattgaagatgatggaagctgcattgcaaggtgctgcaagacagtcacaggtatgatttcttcatgctcaaatctctgtggtagcaatccagttaaagcttgtggagttatactctataaaatgtaccccatgcgggagtgaaccttttaaatctatgcattcgtactatgttaataatggaagcacttagtagttctgtacagttcatgctttacaattgttgcatggacattagtacagtcgaaacgttt

SEQ ID NO: 52797 - DNA, 483 bp, Zea mays
  Clone ID: MRT4577_148150C.1
tttttttttttttttttttttttttttttttttttttttttttttttttttggcccaccacaactgtgatttattcttcattactggcggtcttagggcaaaataactttcataatacatttggggacttgaagcacataagaatctagaaaggggctttgttatttctgggaagccacaaacatcagacaaaaaactttattattgaactataactcataagaaatctaaaagagggccccctccaatgatgggttgttggtcgaatgcttctgggtttgtcaaagcaagttggttgaatggcagcaattgttgcagttgtaagagggtgccagcgtttggcgccgcgtgctggtggaacggcgacaactgtgggtgtttcaagaaggtggcagggctcacaccagctggctggctgtatggtgggggttgttggtgctgtgttttagtttttgagttcaatgctgccagttggttgaatgg

SEQ ID NO: 52798 - DNA, 426 bp, Zea mays
  Clone ID: MRT4577_148151C.1
ctcacgccacatgagcagcacccgtagggagccgccacggtgaatgtctcctgccactggatcgtgacggctcatgaattacgtcagctaaagctgagacttacgaaggcagtgacattgggcacgaaggtccacgatgcaacctacggcgtcgaaaggcctacagtgactagactgtcgactacttgaagaagctgctcctaaatgtttacgcggctgtcgtacctttggcactattcttatatgtggatgacgtcacgggattcgaaatgacatatctatattgagatgacagagcctttcactatcatcttcacatggttcgtcatactgcctataatatacgggctcgcgcatgcgatcactactgtcatattgaacgacttactgaccttgaaggggccgagtacaaactgctggaatgaa

SEQ ID NO: 52799 - DNA, 347 bp, Zea mays
  Clone ID: MRT4577_148152C.1
aggtgatttcaccgatgttcagatctagcgcgcgccaagcatctcttcacggcaggacgcgaatatcgcattcaagcactgacaagatggtgaagctctccttcggatgcgtcgggaactccttcagcgcgactaccatcacggcatacgtggccgagttcatcgcgagtctcatcttcatcttcgcaggcgtctgtacctccatcaccaaaggacaactgactaatgcgcgagcgactggatcagtgggggctgatctgggatcgccatggcacacgcgatggtgctgttcgtgagcgtgtctgtcacgacgaacatcacggggcggcacttgaaccgtgccgtga

SEQ ID NO: 52800 - DNA, 299 bp, Zea mays
  Clone ID: MRT4577_148153C.1
ggaaacataggtcttactttcccaagctaccctggtgttcctgttggttatatgattccgcaagtgccatataataatgctgtgaactatggacctaataacgggtatggaggaaggtaccaaaacaacaagaaatctcatggagacaaactttgatagtacaagttggaggtctcgaattttaagcccagtacacctatgagatctcctgctagtaatgaagcccaagaatctctgaccattggtattgccgatgaacacattggtgcttgtgtaagacgtgctggaaggaacataac

SEQ ID NO: 52801 - DNA, 676 bp, Zea mays
  unsure (1)..(676): unsure at all n locations
  Clone ID: MRT4577_148154C.1
cgcgacgcgaaggccggatattgaagtccaaaaaggcccaaccagcccccctccctctcctttcttcacttggaaatccatggtgtaggcccagagagatctagctagagtttcctgcantccgcctccgccccccaccgcctccacctccgccccccaccgccccgcagcagcagcagtctccctccgaggaaggagatgacaaggagaaaccaacacatttgagatttctagtgtctaatacggcagcagggtgcatcattggcaagggtggatcaaccattaatgattttcagtcccagtctggggctcgtattcagttatcacgtagcaatgagtttttccctggtacaaatgacagaatcatcatggtttctggactgtttgatgaagtaatgaaggccatggagctgattcttgagaaactgttggctgagggtgaagaattcaacgaagcagaagctagacctaaagttagacttgtagttcctaatagctcttgtggtggtataattgggaaaggtggagcaacaataaagtcgtttattgaagaatcacatgctggaatcaaaatctcgccacaggataacaactatgttggtttgcatgataggcttgttaccatcacagggacctttgataaccaaatgaatgcaatagatttgatactgaaaaa

SEQ ID NO: 52802 - DNA, 684 bp, Zea mays
  Clone ID: MRT4577_148155C.1
accactccccgcctccgccccctcccatggcaaccgccaacgccgacgctgccgaggtcgagcggctctacgagctcggcgaccgactttcctcagccaaggacaagtcccagcacgcggcggactatgaggcgatcatagcgtcggtgaaggggcaaaacgttaaagcgaagcagctggcggcgcagctcatcccccgttacttccggagcttcccagccctcggtaccttcgccatggaagcaatgttcgacctcgttgagatggaagagctcgcgatcagaatacaagctattcgtgggtttccgcttcttggcaaagatgcagagttcatctcaaaaattgcagatattcttggtcagctccttacaagtgaggaaaatgtggagcgtgatgctgttcataaagcactcatgtcccttatacgacaagatgttaaaaattcgttgcagcctttatttaagcacgtggagtcaggatcagagatccgtgaaaagattatttgtttcctccgagacaaggtttttcctgtcaaagcagagctactaaagcctcaagcagaaatggaaagatatataactgatttgataaagaaaagtgtacaagatgttactgggctggaatctaaattattcatggatttcctgcggagtttgagcatatttggggatactgctccccgag

SEQ ID NO: 52803 - DNA, 1784 bp, Zea mays
  unsure (1)..(1784): unsure at all n locations
  Clone ID: MRT4577_148156C.1
gccggccggttcgggtgggaccggccgggccgcacaattcggcgcgaggatggcgtaggcccagggagatctagctagagtttcccgcatcggcctccgccacccaccgccgccgccccgccccgccccgccaaaggaacggaggatggaagccccgggctcgccctacgcctcctcgccggaatccgcccccaagcgtgcccctcgctccccaccgcagcagcagcctccctccgaggaaggagatgacaaggagaaaccaatacatttgaggtttctggtgtctaatgcgtcagcaggatgtatcattggcaagggtggatcaactattaatgactttcagtcccaatctggggctcgtattcagttatcacgtagccatgagtttttccctggtactaatgacagaatcatcatggtttctggactgtttggtgaagtaatgaaggccatggagttgattcttgagaaacttttggctgagggtgaagaattcaatgaagctgaagctagacctaaagttagacttgtagttcctaacagctcttgtggcgggataattggtaaaggtggagcaacaataaagtcatttattgaagaatcacatgctggaatcaaaatttcgccacaggataacaattatgttggtttgcatgataggcttgttacagtcacaggaacctttgataatcagatgaatgcgatagatttgatactgaaaaagttatctgaggatgttcactacccagctaatttgagctccccatttccatatgcaggtcttactttcccaagctaccctggtgttcctgttggttatatgattccgcaggcgccatataataatgctgtgaactatggacctaataacgggtatggaggaaggtaccaaaacaacaagcccagtacacctatgagatctcctgctagtaatgaagcccaagaatctctgaccattggtattgccgatgaacacattggtgctgttgtaggacgtgctggaaggaacataacagagattattcaggctagtggtgctcggatcaagatatcggataggggtgacttcatatctgggacatctgacaggaaggtgacgattactggaacatcagaagctatccggaccgcggagtccatgatcatgcagagggtgtcagccagttcggagaggctatgataccagatatgtttgacggactgtgggggccgttgttgagtccgagcagcatgtttgatgcaagttattattgtttgttgcgttgcgccaatggtttagtcgaagatatatatgtgcagcgtttgaatggatttgggaatagggctgagttatatcccgtggatgccacaacaaggcaggcaggcgccgctctgtgctagtggctgagtaggttgacaattcgaaagggcatggttggaagctttcagcgtttcccattcattcttgtgtgcctctccggatggagatcctctgcagtgccatgtcggccagactgcgagcaaaagctgacttttctggcggacgaagataggagtagcatgcatctagctgtcttgtgaaagtactattatttatcaaaatacagaatcggtcctcaaactttggtacgttgttggctccctgaattcaagaaatcggaaaaaaaaacaagtcttgtaaaacccaaacccgaatcctgttatctatgactacttatgttaccacatgtatatctgaaaatgtctccttatgacctcttccntacatctggcttctatggatcacatctgcatttcacacttca

SEQ ID NO: 52804 - DNA, 1916 bp, Zea mays
  Clone ID: MRT4577_148157C.1
cttcaccactatgtgatctagctttgtcagcttaatactccatcctatgtcctaatccacataatatgctgtgtacattggcgccggcctgtgtacggaagtccaaaaaggcccaaccagcccccctccctctcctttcttcacttggaaatccatggtgtaggcccagagagatctagctagagtttcctgcatccgcctccgccccccaccgcctccacctccgccccccaccgccccgccccacagcaggaaggatggaagccccgggctccccctacgcctcctcgccggaatccgcccccaagcgtgccccacgctcccctccgcagcagcagcagtctccctccgaggaaggagatgacaaggagaaaccaacacatttgagatttctagtgtctaatacggcagcagggtgcatcattggcaagggtggatcaaccattaatgattttcagtcccagtctggggctcgtattcagttatcacgtagcaatgagtttttccctggtacaaatgacagaatcatcatggtttctggactgtttgatgaagtaatgaaggccatggagctgattcttgagaaactgttggctgagggtgaagaattcaacgaagcagaagctagacctaaagttagacttgtagttcctaatagctcttgtggtggtataattggtaaaggtggagcaacaataaagtcgtttattgaagaatcacatgctggaatcaaaatctcgccacaggataacaactatgttggtttgcatgataggcttgttacaatcacagggacctttgataaccaaatgaatgcaatagatttgatactgaaaaagttatctgaggatgttcactatccacctaatttgagctccccatttccttatgcaggccttactttcccaagctaccctggtgttcctgttggttatatgattccacaggtgccatatagtaatgctgtgaactatggacctaataatggttacggaggaaggtatcaaaataacaagccaactacacctatgagatcacctgctagtaatgaagcccaagaatctttgaccattggtatagccgatgaacacattggtgctgttgtaggtcgagcaggaaggaacataacagagatcattcaggctagtggtgctcggatcaagatatcagataggggtgactatatatctgggacatctgacaggaaagtgacgattactggaacacccgaagctatccggaccgcggagtccatgatcatgcagagggtgtcagccagttcagagaggtgatgagccccttctgaaggaagggcgtaggccattgctgtgtccgagcacagcagcgtgtttgatgcaagttaggaggatgtgggaactgctttccttttattttccccccttttttcttttttcctagcaagctcgagcagaaaaaagaaacaagctgttattgtttgttgcattgcgtccaaccgatggttttatgttagtataaactgctagtcgaagataattaggtgcagcgtttgaattgatttgggtttacggttgagttatatcccgtgtatgccataacaaaggcagtcgccgctctgttgctagtggcaagcgctgcctgtcctgtgtctgtttgtacgttgacaatttgattccgttgctcaaggatagaagaatattgatacaggagacccgaggactggtttggtttttgcaaaaaagcaaaaaagggcatggtgaaaggacttctacttatcacattccagaatcggtcctcaaactttggtacgttgtcggctccctgaattcaagaaatcggaaaaaaaaacaagtcttgtctcgcggtcgggtctaaaattagatttgtctaaaaaaaaaaaaaaaaaaaaaaaaaaaaaaaaaaaaaaaaaaaaaaaa

SEQ ID NO: 52805 - DNA, 271 bp, Zea mays
  Clone ID: MRT4577_148158C.1
tctttcttcttttcgggcggagaggttccgggtttggggggtgttttttgggagaggcgtccccttaagaagtccaagaatgggaagcggaaatccaaggatggcatgctcaatattgtcatggcgctggtcgctccctcaactctttcttcttagctcctttccctctataccgtttgttgtttctcttccctgaacaatctaatcttgctatttcattttttgcctccagattattgttaatctatttaatttttttttatattattta

SEQ ID NO: 52806 - DNA, 2131 bp, Zea mays
  Clone ID: MRT4577_148159C.1
gtgaatcctgttatctatgactacttatgttaccacatgtatatctgaaaatgactccttatgacctcttccttacatctgtcttctatgtatcacatctgcatttcacacttcatgacagcatgcatttcttggaaacataggtgagctttcttgcatcatattgacatgtgggttttgcagtaccttttgccagtaatggtgaagcctgccatttctattatttatagaatcacaactttctggaattgattcctttcttcaaatttaatcaggtcttactttcccaagctaccctggtgttcctgttggttatatgattccgcaggtgccatataataatgctgtgaactatggacctaataacgggtatggaggaaggtaccaaaacaacaaggtggggggttctctgtgggttgctctgcttgttatctcacacttgtggacttgttctgcaggtgcaacatgcatgcattcagttcatctttgttgaaactgagctattctatgttttatttttgttatgcattagagtggtagtctggagcctggagggctgatatgcatgacatgttatctaatagaaacactgtcctgtaatgtaatcatgttatattttctgttctgaacaaattcaaagaaatctcatggagacaaactttgatagtacaagttggaggtctcgaattttaaggtaatatcgtgctagtattttcatttgcagtattgatctttgttggtgcaacctaacattagagtgatgttaatgagctgctgtagatgtttgatttaatctgcatgtgctattttttgtggagtttgatatttatgtgcttaaatttcgtgacttagcaatactggttgtatgctgagatgtctgaaaagctattacgttttctgtgaactgttgtgtagtttttagttggatgacgtcgtgcatgccgtggaaagtgtgggtgtggcttttggtggaaaacatgaaagaacttcacccactgctacaatctaattgttttatatttttatcatgcatatctatactgttggtctgttggattaatttgagttgtgactatttctgttgatactttgcagcccagtacacctatgagatctcctgctagtaatgaagcccaagaatctctgaccattggtattgccgatgaacacattggtgctgttgtaggacgtgctggaaggaacataacagagattattcaggctagtggtgctcggatcaagatatcggataggggtgacttcatatctgggacatctgacaggaaggtgacgattactggaacatcagaagctatccggaccgcggagtccatgatcatgcagagggtgtcagccagttcggagaggctatgataccagatatgtttgacggactgtgggggccgttgttgagtccgagcagcatgtttgatgcaagttattattgtttgttgcgttgcgccaatggtttagtcgaagatatatatgtgcagcgtttgaatggatttgggaatagggctgagttatatcccgtggatgccacaacaaggcaggcaggcgccgctctgtgctagtggctgagtaggttgacaattcggtatgttgatttcctggtacccccccttccttttttttttgagtcttgtgtatgtagatctgagtatgggttctttctttcacgtggccagaaagggcatggttggaagctttcagcgtttcccattcattcttgtgtgcctctccggatggagatcctctgcagtgccatgtcggccagactgcgagcaaaagctgacttttctggcggacgaagataggagtagcatgcatctagctgtcttgtgaaagtactattatttatcaaaatacagaatcggtcctcaaactttggtacgttgttggctccctgaattcaagaaatcggaaaaaaaaacaagtcttgtaactttgtcgggtctaaaattagatttgtctaaaccgaatgcgccgatgtggcgtgacactattattaggtttagtgtatttaaacacctctaaatatatgagaaaggcgtgccactattattaggtttaaaacaaaaataaatggaaccaacattgcaagttggtggtggggaaaagaaacttggtc

SEQ ID NO: 52807 - DNA, 424 bp, Zea mays
  Clone ID: MRT4577_14815C.1
cccacgcgtccgaaaaaaaaaaaaaaaaaaaaaaaaaaaaaaaaaaaaaaaaaaaaaaaaaaaaaaaaaaaaaaaaaaaaaaaaaaaaaaaaaaaaaaaaaaaaaaaaaaaaaaaaaaaaaaaaaataaaaaaaaaaaaaaaaaaaaaaaaaaaaaaaaatatggggggggcgtttttagggatttaaattttacttcggggtgttgggaaaaattattttttttttttgggcacctaaattaaatttcgggggccgcgttttaaaaagttgggatggggaaaacccggggggttccaaatttaaatggtttgggaaaatatccctttttgccgggttgggttattaaaaaaggggccgatcaagttgctttttcaaaaaattttgccacttaaatgggaattgggacccccctttttttgggt

SEQ ID NO: 52808 - DNA, 404 bp, Zea mays
  unsure (1)..(404): unsure at all n locations
  Clone ID: MRT4577_148160C.1
cccacgcgtccgattcctccttcggatctcttattcagcgcagcgcangtgtgaaggaagggggacgcggaggaagatggggctcgcgttcgggaagctcttcagccggctcttcgccaagaaggagatgcggatcctcatggtcggcctcgacgccgccggtaaaaccaccatcctctacaagctcaagctcggcgagatcgtcaacaccatccccaacatcgggtttaaatgttaaacctgttaataccaaaaccttaacttcacttgcttggattgtcggggttaagaacaaaacaaaactttttggaagcattactttcaaaacaaccaaggtcttatttttggtggggacaagaatgaccgtgaccgggttggtgaaaccagaaattaacttcacaaga

SEQ ID NO: 52809 - DNA, 580 bp, Zea mays
  Clone ID: MRT4577_148161C.1
cctagttctagaatcgtgtgtcggccgcccttttttttttttctttttttttttttttttttttttttttttttttcccctttaccataacaccatacattactccttttgcaacttatatctgggtacaatatttctgttggacgagacaaagcaatcgatctaaaaagattcgttttatatataacgtttttttggggggaaaagaaagaaataaaagagtttttttttcctagtttcgacacctccttttatacagcgggaagcatccaatcctcaactttggaacaagacgatccaaatttaccctccagaaatattcttattcgagggatttttagggggtaggtttctggattcgaatggcttcaagggctgggtatcaaaatgaattcacgcttgggtgaccccggggaagcagatccaaagtcctaagactacacagatggggcaacatcaagcaggggttttatgaaaaaatgggggcacccgatctggtttgttgggcggaattggaaacctggttctcactgtgttggggagctggggggggtgcgccctcccacatggtttgggatta

SEQ ID NO: 52810 - DNA, 272 bp, Zea mays
  Clone ID: MRT4577_148162C.1
ggggcttcaaatttggtgggatggcctcattcctcatattagtccttactaaattacttttagggatgggggggttgagggtcaacttaatccctttcaccaacccaaccaaaaattaaggggtggggggaccatgggcttaattatttcttaaaccaaacaggttattaaatactcggatccctgtaagcgcgcacaccccacgtggttaaggcgagccccccccccaaaatatcaccccacacaggggttttgcgcgctcacaaaaaggg

SEQ ID NO: 52811 - DNA, 144 bp, Zea mays
  Clone ID: MRT4577_148163C.1
tcatgtgcagcaaaccctggtgctgctttttgcaacggaaccacatacccacacctgaagggcatcgaatgctccaagcacgctgtatacttcactaacaacttgtgatcaactttcctgccgacgacatatccacagatgctg

SEQ ID NO: 52812 - DNA, 283 bp, Zea mays
  unsure (1)..(283): unsure at all n locations
  Clone ID: MRT4577_148164C.1
agaccacaaactggttgtgcatttcaacgaaaaatccaaacaattgcccaattacatgtccttgattctacctcaaagtttcagggaaacttgaatttacacacttgacatatttacaaacattttcaacatactttcgaggggggggggggggggcnaactaattgattaaaccggaagatcaaacggtattgccgacagccaaaaattttagagcttgtactcaaacttataacgagggaacatatggtccttgagaccctacctcttgaagatatccacc

SEQ ID NO: 52813 - DNA, 416 bp, Zea mays
  unsure (1)..(416): unsure at all n locations
  Clone ID: MRT4577_148165C.1
cgaggaagcaagcaccacccgccaggcagccaagagcangcagggggcgctcnccaagcncnangagcaagcgccacaagngcgacccanaaaccagggcacnggccaccagncangccanngggnaccangaacccangcacgcagnacngcaagangcaacaggggcgggccagcgggagggcgagaacgacccngaagcagcagcaacggggggccagaccggaaaagacgaagccagngangangccacaggagacgacgccnaacaaganggcaccannggagaagccgagcaagacggcaccaagggncnngccgagcangaagccgcaaacgangacgccacaaaggcaccgcgacgccgccccgcagaacaggccgcaacagcagggaccacgcaggcccaacccaaa

SEQ ID NO: 52814 - DNA, 165 bp, Zea mays
  Clone ID: MRT4577_148166C.1
aggcgtgctggacattacattcattacgcgctgggcaaaactggctttggggtaaaggttgtacagttcttcccattccaactaggtcctcacttcttttttctagggggggcgggccatttttcactcactccataacatagggcaaattaaacgggggggaac

SEQ ID NO: 52815 - DNA, 547 bp, Zea mays
  Clone ID: MRT4577_148167C.1
cttctcccccccctctcccccccttcctttcttttttttttttttttttttttttttttttcccccccccctttttttttttaaaaaaaaaaattcattgaagggggcgggccaggggaattgaaggggccgttttttgaaggaaactcccccaaccgctttttttggggcccctggaaactggcggggtgatttgaacaccccacatcaaatttagagggggcccaacaaagatactaaatttttagatttaaggggccaccggaaatcaaaaaattgctttttggggcatgaattaaaaaaatagctagggggggggccaatttttggtaaacaaaatggaaaacatactgtttgatataagcctttttttgccaaagcctgtcaaagggggtgtttgggttcccctgtgcacggacaaacccaaaaagaggaaaaggtggtaaggtacctttatacaagcgttcctggtcctaagggggacgcaaaaatgcgggggggggggagttgttttaaaaaaaggggcgttaattttaaataggggggg

SEQ ID NO: 52816 - DNA, 328 bp, Zea mays
  Clone ID: MRT4577_148168C.1
gggggcccgaaccaccgtaaatttatgttttggtcccccccccatggccaaaccggctttaagttacaacggggggggcctttaattggccaaacaaactaattttttaaatttcttaaatttttaacccccggccccgggggtccccccgggatttccggcccggtccctgggggggtcccattttttctttttgggggtctttttaaagtttggggaaatcaggggaatagttttttcctggggaaaattgttttcccttcaaaattccacaaaaaatacgggccggaagtttaaagtgtaaaccctgggggccctaagggggggg

SEQ ID NO: 52817 - DNA, 841 bp, Zea mays
  Clone ID: MRT4577_148169C.1
cactcctatgggcgattgggatcctcgaggccggccgggatcaacagtaaacaggtagcttcgtttggttttctgtctgcttggatagttcacatctttgatctcatctttagactttcgatcatactggcatgaaccgtgtctcaaactcgatcaacatttttgactcgaaatcaacgacattctcagagctgaaaccagcttgccatgccccaaatggcagaccgaaggcccgccctcacactcccgctcccagaccgggagcaaagtgactttcaacgacctcagtcttctctccaaacaccaccaatacgcagtccccgatttcgtgaagacttcgacgcaccattctcagtggacatcatgaacgcttcgagaataactcttgcaaccgataccatgagttatccttcaactggtaccaacagtcgcaacagtttcggatacgacgaaaccccaccccaatatctccggaacgcatcttgggaatcagagaccaagcgtcgttcaaaggtcaatgatcgtattctggaatgggccaagaagtcatggggcgctgtccgaactcgctccgactccaagtttgactactttgacagccattcggcacaaagcccaaccagcgatataatgtcgccgtcatcagaaaacatcaccccatcagagcctgatggttctcaagcagccaacgattacactcgagctgttactgtcactgtaatggccagctcaaagccaggatcgaagggatgggtggatctaaataccggatccccaatctaattgtaataacgtggattccctagaacaaaaatgtcgggttaggagcactttgttctgc

SEQ ID NO: 52818 - DNA, 624 bp, Zea mays
  unsure (1)..(624): unsure at all n locations
  Clone ID: MRT4577_14816C.1
atgacgcgatgcacgcgtacgtaagctcgaattcggctcgaggaatgccgtccgcgcttcattttacaaccacattccgtaataacataatattttgtgtttgtttctgtacttttcatgaactctgaagcctctcaccaacgaattgtgtaatatactacatgctatggaaaatctgtgctgtttacgaaaaaaaaaaaaaaaaaaaaaaaaaaaaaaaaaaaaaaaaaaaaaaaaaaaaaaaaaaaaaaaaaaaaaaaaaaaaaaaaaaaaaaaaaaaaaaaaaaaaaaaaaaaaaaaaaaaaaaaaaaaaaaaaaaaaaataaaaaaatgcagaaaagcgaaaaaaaaaactttttttaaagggaaaaaaaaaataaagggcccggcccgaaaaacaaggccgaaacgggaaaaacccgggggtccaaactttgggcgggaaaaaaaacccccttcccagtttgctaagccaccgagccttcccaaaatcccccccccaaaagggcttggaacccccttgatgttgagttatgtaaaaaaaagtntttaattggaaaaaatggggaatgataaaaaaataaatagtgggaaaaaaaaaaaaattttttggattttgttttt

SEQ ID NO: 52819 - DNA, 645 bp, Zea mays
  unsure (1)..(645): unsure at all n locations
  Clone ID: MRT4577_148170C.1
attgggtacctcgaggccggccgggatctcactcctttgaagaccagctctaccacgctctctagcaaccccacagtcattcctttgatcaactgatcagtcattcattcagtcattatgcttaccaccaccttcattatggcccttgctggcctctccaccatgatcgaggcatctcctctccaggcacgcggcggtagcaagcgcggtcttgccttccccaaacagcacaacggtgttgctggatctcagtggacacacaagttctctggttccaaggtctcttggatgtacgactgggaggcagtcatcgatggaacccccctcgacctcgaatacgttcctcttcttcactccaaccaacagtggtgcactgagggttgggccaacaacattgccaacgccaagaagaactacaaggtttcgcatgtgctgagcttcaacgaacccgaccaagctggtgggtggaggatccannacatcgatgtntgctactgggctgtcgccacccacaagaagtntcgttcagcccgctcgccgcacagggcccttaaggaaatcggctctccttcagtcaccaaaacgccgacgagccccaacaaggggcatcaaactaaacctcaagaacttcatgaaccanatgca

SEQ ID NO: 52820 - DNA, 634 bp, Zea mays
  unsure (1)..(634): unsure at all n locations
  Clone ID: MRT4577_148171C.1
ttctggntctgctgggtttgatatgcacggcaacctagcttttatggtctgtgatcccatgaagattgcaccttctacacccaatgggtatgcttctgcatcatcaactgccatgtgtacatcaaaaaagatgtgcccacacagtttgggatccctatccctgcagtatgtgaatggttaaaacaacattggaatggttgcttggaagatgctagcaagccgatgatgactcctgcacgattgacaacctgtggagaacgaagtgggtgttcttcccttggtcgtcttcgttatattaagactgcagaggttgaaggtggtgatgtcttgtcatcatcacagatgccaccaagaccaacatggcagcatggagcatgcagttcagcatctgccaagatttcacatggcgaaaatgattcgattggctcacattctttccatgggcaacatgagcagagctcaaaaatttgcaaacctcataaagagcaagctacttcacttgtggatcattcaagatctattcgcctaccccttcccttaaagcaaatgctgcctgatgataacaaggatgaggcgaacagtcaagctccgcacagaacagaaccatctaatgtgcaaatgaactgtggcactc

SEQ ID NO: 52821 - DNA, 345 bp, Zea mays
  unsure (1)..(345): unsure at all n locations
  Clone ID: MRT4577_148172C.1
ggccggccgcacgcgtgcggagcgcanattaacccgatcgactttatgtttgtgttgcncgcagccctcgctcggctggcgctcgctgttagcgccacctccacccatacaatctgttgctgatgctgccagccaccgccaccggttcatctaccgtcgccggtgcatctgccacctacggttcacctgccacctccggtgcatatcccaccgccggtccacctgccgccgccggtccacctgccaccgtcggtccatgtgccatcgccggttcatctgccgtcgacaccatgccactaccctactcaaccgcccctgtcttagcctcattcccagccacaccca

SEQ ID NO: 52822 - DNA, 583 bp, Zea mays
  Clone ID: MRT4577_148173C.1
aggagcttgacaagattagcacagcaaacgaggacgaaaagattggagttcaaattatcaagaattctttgaaggctcccttgatgaccatagctgcaaatgctggcattgatggagctatagtcatagggaagctgattgaacaagaggacctcagtttgggctatgatgcagcaaaaggggagtacgtagacatgatcaaggccggcatcatcgatcccgtgaaggtgatccgcaccgcacttcaagacgctgcaagtgtttccctgctgatggcaaccacggaggccgctgtctccgagctcccggcaaccaagtccagaatagccagccgtatgccgcagatgagcgggatggacttctgaggaaattcaggcgccgtgtatgatgctgatctgtgacctgtaaggctaggaattgggaggttggggacgaactttgtttccctagcggatagtcggatacgtctacggagttcattcgaaaacgaggtgcagaactgtcaccgagttgcagtttttgatgcagtgcggcgttcgatggtggggtaataaagctggactgatagcgccttccattttgt

SEQ ID NO: 52823 - DNA, 521 bp, Zea mays
  unsure (1)..(521): unsure at all n locations
  Clone ID: MRT4577_148174C.1
ggggggggggnnnnnnnnnnngggcagcaccaagaagcaccannnncccccaagggagaacncagaacaaacccggacaggagnaacagcagccancganccacagcccangcnggnngangcacgggnccgccggagccgaggacgaacacaggacgaacaacngacacagagcgaccnngcaancaaaaacacagaggggcaacaacaaacgagacgaacgaagacaaacccncgggaccaggggaaacancacggnagcgaacagganaacgnggccgcgcgggccccaccgcncagnaccnccagaacccgccggagccgccgnagccgcccccacgggagcccaccgcggagccggcaccaccaccaccggagccaccggcgccaccggagccggcggcgccaccgcccattttgccggggggaaccctccgcccgccaccgccaagccgggggggccacgggccgaaccgaaggggcgcccgggccggcacgggcggggggggagggggaccccc

SEQ ID NO: 52824 - DNA, 2444 bp, Zea mays
  Clone ID: MRT4577_148175C.1
gctcgttgcgcctcagggttcgcgcggttgagtccgcggtcaccgtcaccctcacacctgcacatctacaaccatgctcccaaggcccgacccggcagcaaaaagcaaattcgagtgcgcacacgagcagacccccgcagacagccaggcacactcgcgcgaccatgtaccgggcggcggctgtcatctcgaggtcctcatcagcactgcggaggcagctcgcgcggggcgtggccggggagctgccgcgtctgttggcgcgagggtatgcggccacggcgaaggaggtgtccttcggcgttggcgcccgcgccgccatgctgcagggcgtcaacgacctcgccgacgccgtcaaggtcaccatgggccccaaggggcgcactgtgatcatcgaggggtcccataaaggtcccaaggtcacgaaggacggggtcactgttgcaaaaagcgtggagttcgaggatagcgcgaagaatgttggggcgaatctggtgaagcaagttgctgatgctacgaacaaagctgcaggggatggtaccacctgtgcaactgtgcttacacaggcaattcttactgaaggatgcaaggccgtggcagccggtgtcaacgttatggacttgcggaatggtataaacaaggcaataaatgctatcactgctcacctcaaaagtaaagcgtggaagattaattctccagaagaaattaaccaggtagcaaccatttctgcaaacggtgaaaaggaaattggagatctaatatcaaaagctatggaaaaagttggaaaggatggagtcattactattgttgatggcaaaacattggacaatgagcttgaagcagtacagggaatgaagctgtccagaggatacatatctccttactttgtgactgatcaaaagactcagaaatgtgagatggagaaccctcttattcttatccatgacaagaaaatctcaaacatggattctctccttccagcattagaaatttctatcaagaatcgcaagcctcttctcattgttgctgaggatgttgaaggagatgctctgtcaatgcttgtactgaacaagcatcgtgctggactcaaggtatgtgctgtcaaagctcctggatttggtgaaaatagaaggcacaatctagatgacatggctgtgatgactggaggagaggttattagcgaggaacgcggtcttgatcttggcaaagttcaattacaaatgcttggcactgctaaaaaggtaactgtatcccttgatgatactatcatcctagatggtggaggtgacaaacagcagatagatgagaggtgccaacagcttagagaatcaattgacacaagcactgctgtattcgacaaagaaaaggcccaagagcgtttatctaagttatctggaggtgttgctgtactcaagattggtggagctagtgaagctgaagttggtgagaaaaaagatagggtgacagatgctctaaatgctgcaagggctgctgtggaggagggcattgtgccaggtggtggagttgcccttctttatgccaccaaggagcttgacaagattagcacagcaaacgaggacgaaaagattggagttcaaattatcaagaattctttgaaggctcccttgatgaccatagctgcaaatgctggcattgatggagctatagtcatagggaagctgattgaacaagaggacctcagtttgggctatgatgcagcaaaaggggagtacgtagacatgatcaaggccggcatcatcgatcccgtgaaggtgatccgcaccgcacttcaagacgctgcaagtgtttccctgctgatggcaaccacggaggccgctgtctccgagctcccggcaaccaagtccagaatagccagccgtatgccgcagatgagcgggatggacttctgagggcccgtttgggagggctccggcttctggaaatatggctctcgctcctactcctttacaagagcagcttatccataggagccggtgctttttctaaatcgtttggcaaaaatagctccttgtgtattcttctcatggcgccatggtcctggcaaccatgtccaactcgatgtgctaacacagcatctcaagaacttcagcatcttgagcttgtactgatgcgccgctgcgagcaaatcctagatcattgcgacgacgccctgctgttctttctcccatgggtgccagcgtgttggtgtacatgaaaaaaacaaaaaaaaaaaaaaaagggcggccgccaccgcggtgtatgatgctgatctgtcacctgtaaggctagaaattgggaggttggggacgaactttgtttccctagcggatagtcgaatacgtcttcggagttcattcgaaacaaggtgcaggactgtcaccgagttgcagtttttgatacagtgcggcgttcaatggtggggtaataaagctggcctgatagcgcct

SEQ ID NO: 52825 - DNA, 581 bp, Zea mays
  Clone ID: MRT4577_148176C.1
tccaccgcggtggcggccgccctttttttttttttttactatggcctacattgttgactcaataaattgtgctgattacaaattagcccatctgctttatgcatggtctgctaccgcaaccatttcgtgctgttacacaagtatatgatcggatccatctttatataataaccgctgttcaaacatgggcagcttacataaacataacacagatagacattcttgatattcacagctatatagcaaacatagaattaggcacgccatcaaatcataccacgtcctgttggtattacaagacagtttatttgatgattcgttctaccttacccatggtacggcctccaaggtgagttcgaactgctatcactgtaaccggattctgactaccttgccagcttcatctggaggatactgatcaccaagtagggcttcgatgcataccctgaaccctgtcctatgcgtctgcatcggagatgtctcacttcaccacttttacactggcccggcgtgagcgtgacgtccaatgagtacctacccttgatgatctcaaggataacgatctcgaagctgtacacctc

SEQ ID NO: 52826 - DNA, 312 bp, Zea mays
  unsure (1)..(312): unsure at all n locations
  Clone ID: MRT4577_148177C.1
agaggggggcttcgcnnagttgctcccggcggagggggcccaggccccgtgccgcccatgacggagngnngttgcgtgccggagaatnttaaaagaaattacccatgctnnnaaaaacncnnntctgctgaaggggtaagatnngctgcgcttaagccccgttgaagcnntggtggatggtnntctgggttccccaatatnntctttcgcttcttggatgaccaagaaaaaatgccagatgacagggttnttttggagacctganntggtgttagattgggtcgtgggatgaccatctcattataatttcgt

SEQ ID NO: 52827 - DNA, 319 bp, Zea mays
  Clone ID: MRT4577_148178C.1
ccacccgaaccaaaaaaattccagctcctggtagagtaagaagtgttacagtccgcggaaaaagaaagatccagttgctccatgagggcaagggtcagtcagaagtccgttacatgccaaatacacactgccctgcatttttttccgggtttgacagtttttgccgtgaaggagacctttttcttaaccatgcttcatgctcactcaaacataaggccgatcagcctcccctgcctacagaatttgtccagctaaaaacatttgttgttgccagggctttttttaacacgtttttcacacgtcaaggtagcggtttttt

SEQ ID NO: 52828 - DNA, 720 bp, Zea mays
  Clone ID: MRT4577_148179C.1
gccggccggttcgggccgcccaaaccatcgacgctctcatctcacacacacttgcaccgtcgttgtgcacgcacatccaacacaatagcgaccacgatcgagaacccatggcgcccaagctccccgtcgtcctcctcgctgcctgcgccgtcctcctggcgctcgctaccccgctgctcgccggcgatcccgacatgctccaggacatctgcgtcgccgactacgaatcgcttgaaggccgtgagtcacccggcccgtagtcgctctaagggtccgttcggttattcaggaatgtactctaggaatgatttcagctggaataattgtataatttgtagtataaattggtaacctggaatagttcttagtcttgttccaggctatccgaacggggcctaattaatgcgtgtcggccatttcacttttgttcaaaaaaaaaaaaaaaaaaggttcttgttgctgtaataattggccagtcagcgctgcggctgaacgggttcccttgcaagcgtgaggcgaacgtgacggcggacgacttcttcttcggcgggctcgccgcggccgccgacgtgtactcgggcaacccgatggggtcggcggcgacggcggcggacctgtcggtgctcccgggtctcaacaccctgggcgtgtccatggcgcgcacggacttcgcgccgtcgggcggcgtcagcccgccgcacgtgcacccgcgcgccacgg

SEQ ID NO: 52829 - DNA, 611 bp, Zea mays
  unsure (1)..(611): unsure at all n locations
  Clone ID: MRT4577_14817C.1
agcttcgaggtattccaccagagcagagagagcagggcgcgagaggctgcaagcggccgccgccatggagaacgagttccaggatggcaaggaggaggtcgtccaagcatggtacatggatgacagtgaggaggaccagaggcttcctcatcacctcaaatagtgctggtaaacctgctggatgctaaaaattgtgcatattataaatgcccagaattgggtgttgtaagctggaacctgaatgctgatgactgggagaaagacgagaatctcaagaaaatccgtgaggccaggggatactcttatgtggacatttgcgacgtatgtccagagaagttgccaaactatgaggccaagctgaagaacttctttgaagagcacttgcatactgatgaagagatacgctattgtctcgagggcagtggatactttgatgtgagggaccaaaacgaacagtggatccgtatagcagttaagaaaggtggcatgattgttttgcctgcaggaatgtatcaccgctttacattggatagtgacaactacatcaaggcaatgcggctctttgtgngagagcctatctggacgccatacaatcgtccccatgaccatct

SEQ ID NO: 52830 - DNA, 182 bp, Zea mays
  Clone ID: MRT4577_148180C.1
accctaaccggacgggagccccttttttattagggaaaacaaatttaaccctgaaagaaaaagaattctcaaatcaaatgaaaggccgaattttattcagggggccggaaaaagtttatcccatcggggggtttgcaatttccgttggcgggacccgggggacttggggacccctgggttcc

SEQ ID NO: 52831 - DNA, 332 bp, Zea mays
  Clone ID: MRT4577_148181C.1
agcggtccgagcgagatcgatcgcccctccgcaaggccgcaacaacagacgcggcaagcgggtacaagggagttcttctggaggcgcgggagatcacgcgagtgtgttgcgcttgaaaagaagaaaaaaacaggcagggaggagggagtcccgttcccgaacccgaactacaagccagcgcaactgctgctgccgccgcccgcccagcaggaggagcgagggcattgcccggccccatcgccgtcgcgccgtcgccgtcgccgcgctgcaggcagaggaggacggcgccggccagcatgggcgggtacgagctcgtcaggagcgacgacgcg

SEQ ID NO: 52832 - DNA, 262 bp, Zea mays
  Clone ID: MRT4577_148182C.1
cccacgcgtccggtgaaggctcagggtaatgattgcatgaggctgaaggttaaacgagtctctatggagcacactcaccatacatgccaatacattccgctactcatgatcttcaaagagcatggccccattcgtagactcgatgaacctcacctgtcgtcaccgtcaaatactccggctctgtacactccttccaccctgtcgcatcctcccaagcccgctgctccacccactttgtcggagtctacaccaccgtattctc

SEQ ID NO: 52833 - DNA, 242 bp, Zea mays
  Clone ID: MRT4577_148183C.1
cgcattcatactcacaccccaaacccaaacggcaagtaccccttttttcggtttttttctcacaaaaatacatcgcacgaaacataactcgaggcttcgccccggccaatacaagctcaatccattctactaaacggcatacaacttcacattctttatggcttctacacttcatcgcctaaaccacttacataaaaactacattcaactactactcacagattatctaatacaaaaaccag

SEQ ID NO: 52834 - DNA, 574 bp, Zea mays
  Clone ID: MRT4577_148184C.1
tcgcctcaggccgtgactacgaatggtcgccgttctccgctggggatttggtctacttcgtccaccgcgggaacggggatctcatagagtacgacatgggtggcagctacccagaggatgaacaggttttgcgcctctgcaatctcgggcacaatttcagagctgtaactccctacgtcccctgtttctccatgtcgtctgcactccacacaaacgaggaattatttgatgtctagttctgctgtaacttattatattatgtggtgcgtgcattctatagttctgctgttgcttggatttggatgtatcatgtccctttccttcaattctggatctgatggctctgttcaatcagacagttgacgcctgtatgtgatgagtcagctacacttttacaactctggtattgggtggattaaagcttaaaggaagacatactactggcaaaaaaaaaaaaaaaaaaaagggcggccgccgtgccgggcggcgggcagcagctggacaacgggcagacgtggagcatcgacgtgccggcgggcacaacgggcgggcgcgtgtgggcgcgcacgggctg

SEQ ID NO: 52835 - DNA, 1634 bp, Zea mays
  Clone ID: MRT4577_148185C.1
aattctcgctccgtctctacaggtcctccggtgatacctgtcaacctccggcgatctgggttgtgacaacgagaaacgaggaagacgaccccacctcgcctggaaaacgcatcccaagacttcaaccttcctttccggccggagatccgcttcgcatctccgcgacagatccgggcaaacgggccgatgcagttcttcggcggctcgtcgctgacgtcggtcgcgccggaggcgaccccagccccggcggcgccccctggcacgggcacgggcgccagcgcgcaggtcctctacgtcttcaaccgcaacggcgtctgcctgctctaccgcgagtggcaccgccccctccgcacgctcgaccccacccaggatcacaaactcatgttcgggctcctcttctcccttcgctccttcaccgccaagatcgacccaaccacggcagaaaagggaaatcttggtgtgccactactgcccggccaaggttgttcgttttatagcttcaagacaaacacatacaaactgaactttatggagagcccttctggtataaagcttatactaattacacatccaaggactggtgatcagcgagactcgctaaagcatatctacaacctatatgtggaatacgttgtaaaaaatcctctgtatgctcctggaacaccaatcaagtgcgaacttttcaacaaacatctcgatcaatacgtgagaacaataatttgatgtcattgagagagccattgactcaccttcgtccttgttcagctgagcattgtgttccagtttcacacaatgcggtcttactgtttatctagaactggcacaaccgagaaggcaggcaggcatagctgctaatatacatgtctttctcatacttatcaccagtgaaatgttgatttgcagacaatgggttggtgaggcaaaaaaaggtccatttcatgttctttagcgtgatatcaccatttcgtggatggtagacttttctggtggaaaatttgcacagccgcaccatgggagctgcagtattcttgtgtaccgacctcaatttgacagctctactgtgaccttgtttatccatccaggcattgtgcattgtcgcttctagtgtgacgtgtacatgattaatccatgggttattgcgtcaccgttcaagggggttcatggtcaagtagtaattatttcatatttgaaccggtcgccttgtcagatgactagactgaaacatcatgttttccgcttgagacattgtatgatttgtatggttggctgctaggataaagtcatatcaggaaacgtgatactaaaggtcttcatgctaggcgatttcggtctcggtcgtatccggtagtctccagcttttggaaggcagacttttgacttctgggagcttaaacctttttggacctcctaaaagctagcagtccaaaagtggctagaagctgaaacatgtcggcggtgtattctattttttagtactctgtcagagagccatgaagagtgaaacataagtatttgctatgttaagagtcttggttacctgttaggtaacaaatcagttttctttgctggattccttgaatttataatgcggtcttcatctctactgtataaaacaccagtttttccggttttcg

SEQ ID NO: 52836 - DNA, 879 bp, Zea mays
  Clone ID: MRT4577_148186C.1
ctctccccagctgcttccgccgcccctccccatcgcgtcgcccgtctgcaaactgctgcctttgccgatccgcctccacatctccgcctgccgcgaagacgagaaacgaggaagacgatcccacctcgcctggaaaacgcaccccaagacttcaaccttcctttccggccggagatccgcttcgcatctccgcgacagatccgggcaaacgggccgatgcagttcttcggcggctcgtcgctgacgtcggtcgcgccggaggcgaccccagccccggcggcgccccctggtacgggcacgggcgccagcgcgcaggtcctctacgtcttcaaccgcaacggcgtctgcctactgccaggccaaggttgttcgttttatagcttcaagacaaacacatacaaactgaactttacggagagcccttctggtataaagcttatactaattacacatccaaggactggtgatcagcgagactcgctaaagcatatctacaacctatatgtggaatacgttgtaaaaaatcctctgtatgctcctggaacaccaatcaagtgcgaacttttcaacaaacatctcgatcaatacgtgagaacaataatttgatgtcattgagacaatgggttggtgaggcaaaaaaaggtccatttcatgttctttagcgtgatatcaccatttcgtggatggtagacttttctggtggaaaatttgcacagccgcaccatgggagctgcagtattcttgtgtaccgacctcaatttgacagctctactgtgacaacactcctggtagcctggtttgtttgatcgttacggatgcattcgacagggaagctgcattgtgcattgtcgcttcctagtgtgacgtgtacatgattaa

SEQ ID NO: 52837 - DNA, 403 bp, Zea mays
  Clone ID: MRT4577_148187C.1
atgcaaaaagagctcgacctagctgctgttttcccatcccagcgctcctctccctcgcggagggcacacctgacacgttccactttatggcatcagctcctacaaccgcgttagttgccatgatgaaagcaaagaaagagcacgcctcggtcgccgttcgatgaccagagctccattctcgacaaggaggacgtagaacgcgtcgctggagaacctcaacacctaccccttcgtcgcggaagggcttgatgaatgggaccctcaagctgatcggcgcccactacgactttgtctcacgagagttcctcacatggcaaaagtgtgaaactacgccctacgagaattctcacgcggcggccgactcctgcgtcatcatatatatatctactctactctactacta

SEQ ID NO: 52838 - DNA, 371 bp, Zea mays
  Clone ID: MRT4577_148188C.1
acaagactctagactgagtcgtattaaccctgcacggctcgccgagacttcagtttaactgaagcaagcaacgcaaacttcccccccttcggccaatcttcgttccttccttcgaaagggttgcgccaaaggaacattccttcgttcggccgttccttccaacggaactccgtttggttcctccgtccccgggaagaaaagttaacggaccgtgaaaaaaaggcgttggtatattttttatgtgccacataaaactttaggaaaatatccccacccaaaggaacagcccaacgctcagcacattaacagagactcaacacaaatctctaaagccccctggagtcaacaacaggcacagttttcccccccta

SEQ ID NO: 52839 - DNA, 1469 bp, Zea mays
  Clone ID: MRT4577_148189C.1
ggcctgccgggaccggcgcttcctcccgagctgcctccgctccgccgccagctgtcccctccccagcgcgtcatccgtctgcacgccaccgcctatccactcgcctgcacatcgccgccctagcagagacgtctgcacatcggcgcctggaggacgagaagcgaggaagaagacccacactctcctggaaaacgcatcacaagacttcagcctccctttccggccggagatccgactcgcgtctccgcgacagatccgggcaaacggcggctgatgcagttcttcggcggttcgtcgctgacgtcgatcgcgccggaggcgaccccagccccggcggcgccccccggcacgggcacgggcgccagcgcgcaggtcctctacgtcttcaaccgtaacggcgtctgcctgctctaccgcgagtggcatcgcccgctccgcacgctcgatcccacccaggaccacaagctcatgttcggactcctcttctcccttcgctccttcaccgccaagatcgacccaaccacggctgaaaagggaaatcttggagtgccactgctgccaggccaaggttgctcgttttatagcttcaagacaaacacatacaaactgaacttcatggagagcccttctggtataaagcttatattaattacacatccaaggactggtgatcagcgagactcgctgaaacatatatacaatctatatgtggaatatgttgtaaaaaatcctctgtatgctcctggaacaccaatcaagtgtgaacttttcaataaacatctcgatcaatacgtgaaaacaataatttgatgccattgagacaatggttggtgaggcaaaaaaaggtccatttcatgttctttagcgtgatatcaccatttcgtggatggtagacttttctggtggaaaatttgcacagccgcaccatgggagctgcagtattcttgtgtaccgacctcaatttgacagctctactgtggcatcactcctgttgcctgtttgtttgatcgacggatgcattcgacagggaagctgcctagcttttggaaggtgcaggcttttgacttctgggagcttaaacctttttggacctcctaaaagctagcagtccaaaagtggctagaagctgaaacatgtcggcggtgtattctattttttagtactctgtcaaagaaccatgaagagtgaaacataagtatttggtatgttaagatgtctaggcctgcagtcccctttgtacttgtcatactgtttttttctgtctagaactggcacaaccaaccgagaaggcaggccgcaggcgtagctgcctacatgcatatttttttcacatccttatcaccgttgaaatgtttcgttgcagactttgggttggtgaggcattaggaaagaaaaggaccatttcatgatgtcaccatttcgtggaagacttttctggtggaaaaactgttttattccctccaagtacc

SEQ ID NO: 52840 - DNA, 823 bp, Zea mays
  Clone ID: MRT4577_14818C.1
cattgggtacctcgaggccggccgggatggaaacgaggcgctcgacggtctacggactctcggcaccctaatcattagcaatggccagttcaggaagctgctctccgacgctaccgtccttctccgtgacatggctggcgatgccgcccaaaacactgccgacaagatcaagccctcagaagaccgtctcaaccgattggacgagcctgctgaggacaacacctggcacgacacctccgatctgaaccgtgagaacctccgcaaccaagctaagaacagcctgcctttcggtaacaagaacaaggacgaggccaagagcgacttgaaggagcatgccaaggacatcaaccaggctgccaacccagacggttcgcgcgatcctcaacacaccgccgagctcggcgcccatgagggtcaaactggtcagagcactggtatcaatgctcgcggtgcgctagagactgctaagcagaaggtcgatgcgaacacttctgaggaggacaagaacatggctcgcgctcgtcgtgaccaaatgaacaactacctcaggggaaagatgcccgaggagcgtcgcgagcagaccatctggcgtctgaagaagatggtcgtcgagattcagggacaccaggattaccagcgtgccattgagactctgctcagccttgccgagcagtactctggccatggtaagaacctgggccagcagggcaagggctctgttcaaggcttcctctccgaaaataaatggctgacaaacttgaagactctgctcgagcgcttcgctaacaacacctcgttcgatgaccttattgagtcgattaac

SEQ ID NO: 52841 - DNA, 597 bp, Zea mays
  unsure (1)..(597): unsure at all n locations
  Clone ID: MRT4577_148190C.1
cgggcattattagtttagttttttttttgtttctgacagatctctttcgaaacacgttttaactacaatgcctatgtgaatatgcacccgtttcctagtcacgtttctagaattttcgcaggccgagaaggacttgcagccttggattgctagagacgacgaacaaggccagaagatgtggagagtcaaccaacgtatagtgaagcttatagcggagctcatgaggaaccatgacagccctgaagccttggtgatactcgctagtgcttctgaccttctacttcgtgctactgatggaatgcttgttgacggtgaagcttgtactttgccacagcttgagcttctcgaagtaaccgctcgagcagtccatcttattattgaatggggagatccaggtttatcagttgctgatggcctttctaatctgctaaagtgccgtctttcaaccaccatccagccgaggggaacagcagcggaatggcatccagagcccatcgtaccgggtgcgtggccgcaggcatcctcaactggcaagcggacgtgggagaggtgcatagagtggggaagcccacagncgncgcgccaccgggctgacgc

SEQ ID NO: 52842 - DNA, 1120 bp, Zea mays
  Clone ID: MRT4577_148191C.1
attgaagccctcgaggcggccacgggtccagccgctcgagcgtcgcccgtctgcaaactgccgcctttgccgatccgcctccacatctccgcctggaagacgagaaacgaggaagacgatcccacctcgcctggaaaacgcatcccaagacttcaaccttcctttccggccggagatccgcttcgcatctccgcgacagatccgggcaaacgggccgatgcagttcttcggcggctcgtcgctgacgtcggtcgcgccggaggcgaccccagccccggcggcgccccctggtacgggcacgggcgccagcgcgcaggtcctctacgtcttcaaccgcaacggcgtctgcctgctctaccgcgagtggcaccgccccctccgcacgctcgaccccacccaggatcacaagctcatgttcgggctcctcttctcccttcgctccttcaccgccaagatcgacccaaccacggcagaaaagggaaatcttggtgtgccactactgccaggccaaggttgttcgttttatagcttcaagacaaacacatacaaactgaactttacggagagcccttctggtataaagcttatactaattacacatccaaggactggtgatcagcgagactcgctaaagcatatctacaacctatatgtggaatacgttgtaaaaaatcctctgtatgctcctggaacaccaatcaagtgcgaacttttcaacaaacatctcgatcaatacgtgagaacaataatttgatgtcattgagacaatgggttggtgaggcaaaaaaaggtccatttcatgttctttagcgtgatatcaccatttcgtggatggtagacttttctggtggaaaatttgcacagccgcaccatgggagctgcagtattcttgtgtaccgacctcaatttgacagctctactgtgacaacactcctgtagcctgtttgtttgatcgttacggatgcattcgacagggaagctgcattgtgcattgtcgcttctagtgtgacgtgtacatgattaatccatgggttattgcgtcaccgttcaagggggttcatggtcaagtagtaattatttcatatttaaaccggtcgccttgtcagatgactagactgaa

SEQ ID NO: 52843 - DNA, 587 bp, Zea mays
  Clone ID: MRT4577_148192C.1
gagtaatagccatattattaaacaaagttacaagtatacaaattacgtacaactcaagcagttaaatacacgtgtacaacatctaacgccaaattgaaatcaaatcgcattatggaaacaccagataataacacgtgatggagagattagagccgttccgctgctgttccccttggattgtcttgttggggttcacggatccgttgctcaggatgtcgcggaggacagacatgctgagtgcgcgcacgtgtgcacttgggtgagaaaggcagcggatggtggttgatagacggcacttcagcagatttgaaagaccatctgcaactgataaacctgaatctccccattcgatgataagatggacagcccgagcggtcacttccagaagctcaagctgtggcaaagtacaagcttcaccatcgacgagcattccatcggtagcacgaagtagaaggtcggaggcactagcgagtatcaccaacgcttcagggctgtcatggttcctcataagctcagctataagcttcactatacgctggttgactctccacatcttctgaccttgttcgtcatctctagcaatccaa

SEQ ID NO: 52844 - DNA, 5529 bp, Zea mays
  Clone ID: MRT4577_148193C.1
ctaattttggtttgagttttgtttgaattatttcaagtaaattctttttacccttttctggttaatttatttcaaagcaaacattcttagtttagttttttttgtttctgacagatctctttcgaaacacgttttaactacaatgcctatgtgaatatgcacccgtttcctattccgtttctagaattttcgcaggccgagaaggacttgcagccttggattgctagagacgacgaacaaggccagaagatgtggagagtcaaccaacgtatagtgaagcttatagcggagctcatgaggaaccatgacagccctgaagccttggtgatactcgctagtgcctctgaccttctacttcgtgctactgatggaatgcttgttgacggtgaagcttgtactttgccacagcttgagcttctcgaagtaaccgctcgagcagtccatcttattattgaatggggagatccaggtttatcagttgctgatggcctttctaatctgctaaagtgccgtctttcaaccaccatccgctgcctttctcacccaagcgcgcacgtgcgcgcgctcagcatgtccgtcctccgtgacatcctgaaccacggatccgtgagccccaacaagatcagccgaggggaacagcagcggaatggcatccagagcccatcgtaccggtgcgtggccgcaggcatcctcaactggcaagcggacgtggagaggtgcatagagtgggaagcccacagccgccgcgccaccgggctgacgctcgccttcctcggtacggcggcgaaggagctcggctgccctctcccgtgctgacgaggccgctcccggatctgctctgacatcggcggccacttgacggccagtgctggcagcttgctgcggggccggcgagtaggacgctaatctctcgaccaaggacgactcgccggtttgttcacgtgatatgtgatcaaactgatattagatggtgtttccaaagtatatatctactggggggcttgctcccatgatgcgattttattccaatctgacgtcagatgctttacgagcatatttaactgcttgagctgtacgtagcttgtattacttgtaactttgtgtaatatggttattattaccgaagaagtagaacatatctttttttttttttttgattgactactggatgccatctttatgttcatgttatagaccgtacaaggagccctgcaaggggaacttcaatctatatggcgctccgttgcaacgcatggataaggatctagcagcagtctaaaaaagagagagaaaaaaaagaaaaagctatgttctgcttcttcggcaataataaccatattacacaaagttacaagtaatacaagctacgtacagctcaagcagttaaatatgctcgtaaagcatctgacgtcagattggaataaaatcgcatcatgggagcaagcccctcagtagatatatactttggaaacaccatctaatatcagtttgatcacatatcacgtgaacaaaccggcgagtcgtccttggtcgagagattagcgtcctactcgccggtcccgcagcaagctgccagcactggccgtcaagtggccgccgatgtcagatcagatccgggagcggcctcgtcagcacgggagagggcagccgagctccttcgccgccgtactgaggaaggcgagcgtcagcccggtggcgcggcggctgtgggcttcccactctatgcacctctccacgtccgcttgccagttgaggatgcctgcggccacgcaccggtacgatgggctctggatgccattccgctgctgttcccctcggctgatcttgttggggctcacggatccgtggtccaggatgtcacggagaacggacatgctgagcgcgcgcacgtgcgcgcttgggtgagaaaggcagcggatggtggttgaaagacggcactttagcagattagaaaggccatcagcaactgataaacctggatctccccattcaataataagatggactgctcgagcggttacttcgagaagctcaagctgtggcaaagtacaagcttcaccgtcaacaagcattccatcagtagcacgaagtagaaggtcagaagcactagcgagtatcaccaaggtttcagggctgtcatggttcctcatgagctccgctataagcttcactatacgttggttgactctccacatcttctggccttgttcgtcgtctctagcaatccaaggctgcaagtccttctcggcctggagaacgatagcagctgaggccttggttggtgaggctgaaacgacatcacaaagtgcatccacaaccttcctccatccttggtgagctgatgtgctttctgcagacatctgcatttcgggagaagctatgagcttctgccagagcaatgagacaacagagaagcacagctcttgtttctctgataatacagatcttaggagagtttgtgaacctcggtaccccccattccgatccatggtaaggaagtttgccaaatcagatgcttccacctgtaagcttgcaatggatttcccagatgtacttgcaacattgccgttcagaacctcttctgcacatttcaagtgtggttttgagaaaccgtttttcttatgtgttgaaccattcttgttttccaacttggcactatccgatgagttggtgctgttttcctcacagcgatgttgattaaccttctttactggtgtaagggtcaggtgagcttcaagaggctcagctttgttcacaatggaggacactgttttaccatgcaagtcaatcaaatggtagagggatgatgccctggtagaaatctcagcatcccacttgcatctcatcagtgcagagagtgaattaaggcatggcctggaccgacggaataactcagaaacgtgagcagcaaccatagctgctgcaactatttcatttgagctatagctccatgaggtaccaactgatgatggcttcaaggagaaaagggcttccaagatggcaagaattctacgagtatgaagaattgctgagctgttgctgttgtgtagctcattattgatcccattgttttttccaggtatgataatcttcatggaatcctttaaatttgaatgtgatccattcttagaaatgcaagggaacagctggagctcacaagataaggcacaaactgcagctagaacatacgaatcaaacgtagcaacagggccttgtctcctcttacatctgcttcttccatttgttaatcttgaatgctcagtggcttcctcgagggaatggttatcgctaccagttggtcttttgctgccccctggcaaagcttgatgacttacacaaacagttaacaccacaaatagcaaccgggaggcaaggtccattgaggcacaggattcaacaaagagtgaatgtatcattgtgtgaagttcagcaacagcaaggttcttagattgacttcttggctttctggattgctctggtgtttcagaaggaaaagctctcctaagtatagcttcaaccgttgccacaaatatcctcataaggcatgcttcagatggacttccacgaggtagatactcaaatacttttaataatggtaagtacaggctccatgacagtgtaggtggctgaagcggggcagctacaacaatttcaggcaaatcaactgctgatgaacttagtggtagcaaaccataggcagcttcccagatggtacatattctccactcaacatcagggccatgagcacacaacaaagaagcaatgccttgtgcagtggcatcgatagtggcctcagatgcaggaacttccaactgcttcttatatgatgatacatagccacctagtggttcatgatgtacttcaactccttcggcatgtctcagtggtggaaaaagcagcgttggttgggaaagtattcggaaaagcaaagcagcagctgtatcagcagcaatgccagctctcattgacattgcagttccaatcgcacgcaagaaatgcagatgcatccaattttttggaagccgcatgccagaagcataatcttcggctgctctaagtagctcaactagttgtactgctgcatcaagtgcatctggagcccatgatggtggtgcttccagaagaccaaaaagcaacctctgtgtagcacttggtgtagcaattgcatagtatctatggaacaaccgagcatatggttcaagagggggcaggccagccaccaaatgctcgtccaagggtgttgttggtggaggtagcagaagcgcaggaacagctgctgctgttaaatttgctgtctcataacgagctacctcctcatcacagacacttaatataactccagctccattggcaacagcccatctgggggtggaaggcataagctgtgggtgcttcccagatcctcggctgcaagcagtagttggaggcttcaactctccaccagcagcatattttcccattacaccgccacaccatcgaaaatagtcacttcgaatgcccaaaggtgcggctagcaatatgtcagtgatccacggggttagtggcctcaatggcttccagtcagattcatttcctggagaattattagatctcttatctgtggaatcactagatgttgcctgatcagatgtgctgctacattcagcttcagtatgttggcgctcaactttgaatattggcctattgtagtgagttaagaccctaagaatttctccacaggccaaggcccactgctctgagtactcttgctcagaattatggctgaataaagagatgaaggaactgaatgggggaccatgtctatcatagcacagcgtcccatctatgatgcgtgaaagaattggatgtgcaactgcatgaccatgctccggatgatgaagaacaaaagttgccaatacttcatctaccaagcgattttcttttgatggataggaactttgaatgagctgagctatgtcttcagggaattgatcggtgtcagctgtaaactggccaaagtactcgacatatgccaaaatttgtgcctgcttctgctccgcatcgaggggtggaggccagtacaatgatgtgaactggagcccatcaatccacttcacatttgaatctgacatgcttggtagctcaagagcctgtaatcaacaacttgttgaagttgacaatcagttcatccatctatgccaccaaagccctactcttagtaagacattcacatttgaatctgacatacttgcctcgaaaccaagaaactttcagtaggacacaagttctcctaagtgtacagttaacttcttcaatcaacccccacagagggggggtctgcatccccaacgtgaatgagtatcatatcaaccaaactcaaacatagttgcttgaaaacctctcgacggaacgcgctctaattcgaggctctccacgggcagccggcggcgtcggcgcgcagatttcggagcgggcggtgggcgaagcggaggggaagagagagaaatggcgaggagcgaggagaggcgagaaaaagattttttccgcgat

SEQ ID NO: 52845 - DNA, 264 bp, Zea mays
  Clone ID: MRT4577_148194C.1
cttcggtaataataaccatattacacaaagttacaagtaatacaagctacgtacagctcaagcagttaaatatgctcgtaaagcatctgacgtcagattggaataaaatcgcatcatgggagcaagcccccagtagatatatacgtgttcggctggctgcaagccgacactgttgcagctgtttggactgctgcagctgcaatccatagagagaaaaatactgtagaagccgcagccgcagccggattgcagcccacgcgtccg

SEQ ID NO: 52846 - DNA, 211 bp, Zea mays
  Clone ID: MRT4577_148195C.1
cacacgcgtccgaccacgcatttttaaacgcgcagacgcaaaagcgtgttgactcaaactatgttaggaggacaaaaatgaactcaagataggctccattgatcacttgcggggggctgtcacctggctcaaccgactgatctgcaatggaaaatatgctgcagggtgatatgatgcccttactaaggagatcactccatcaaaaccattt

SEQ ID NO: 52847 - DNA, 1498 bp, Zea mays
  Clone ID: MRT4577_148196C.1
agagccctgcacgggagctaaactgggtcacgtgcagaagaaccaatctcattgcgatagttgctgattgactactggatgccatctttatgttcatgttatagaccgtacaacaaggagccctgcacgggaaactttaatctatatggcgctccgttgcaacgcatggataaggatctagtagcagtctagaagagaaaaagaaaaaagatatgttctacttcttcggtaataataaccatattacacaaagttacaagtaatacaagctacgtacagctcaagcagttaaatatgctcgtaaagcatctgacgtcagattggaataaaatcgcatcatgggagcaagcccccagtagatatatactttggaaacaccgggcgtgttcggctggctgcaagccgacactgttgcagctgtttggactgctgcagctgcaatccatagagagaaaaatactgtagaagccgcagccgcagccggattgcagccgcagcaagccgcagcgaacaagccgaccatctaatatcagtttgatcacatatcacgtgaacaaaccggcgagtcgtccttggtcgagagattagcgtcctactcgccggccccgcagcaagctgccagcactggccgtcaagtggccgccgatgtcagatcagatccgggagcggcctcgtcagcacgggagagggcagccgagctccttcgccgccgtactgaggaaggcgagcgtcagcccggtggcgcggcggctgtgggcttcccactctatgcacctctccacgtccgcttgccagttgaggatgcctgcggccacgcaccggtacgatgggctctggatgccattccgctgctgttcccctcggctgatcttgttggggctcacggatccgtggttcaggatgtcacggaggacggacatgctgagcgcgcgcacgtgcgcgcttgggtgagaaaggcagcggatggtggttgaaagacggcactttagcagattagaaaggccatcagcaactgataaacctggatctccccattcaataataagatggactgctcgagcggttacttcgagaagctcaagctgtggcaaagtacaagcttcaccgtcaacaagcattccatcagtagcacgaagtagaaggtcagaagcactagcgagtatcaccaaggcttcagggctgtcatggttcctcatgagctccgctataagcttcactatacgttggttgactctccacatcttctggccttgttcgtcgtctctagcaatccaaggctgcaagtccttctcggcgaatgtagcaatatcttgacctggagaacgatagcagctgaggccttggttggtgaggctgaaacgacatcacaaagtgcatccacaaccttcctccatccttggtgagctgatgtactttctgcagacatctgcatttcgggagaagctatgagcttctgccagagcaatgagacaacagagaagcacagctcttgtttctc

SEQ ID NO: 52848 - DNA, 179 bp, Zea mays
  Clone ID: MRT4577_148197C.1
gattcgggtcgaggcattcgagctctaaacacatcgcttccagaacagctactttgaccagcttagcctctatattgcttgaggcagatgacatgtccgggtagtattgtgacatctcccctttcaccatgaccaattagagcactctagttctgccttgagaatttcattatccacgc

SEQ ID NO: 52849 - DNA, 361 bp, Zea mays
  Clone ID: MRT4577_148198C.1
cgcagagcgggggtacgggcgcccccgtctacctggccgccgtcctcgagtacctggtcgccgaggtgctggagctggccggcaacgctgccaaggacaacaagaagacccgcatcatcccgcgccacgtgctccttgccatccgcaacgacgaggagctagagaagctgctgtacggcgccaccatcgcccacggcggagccctccccaccatcaaaccggtgctcctgcccacgaagaccgctgagacggccgccgcccaggatgccaagccgcccaacaaggccgtcccgccccccaagaaggcatagaggggcgggcgcctttaccgctgcgaagtcgaatgctcgtgttcagtaga

SEQ ID NO: 52850 - DNA, 817 bp, Zea mays
  Clone ID: MRT4577_148199C.1
gccggccggttcgggatcgcgaaaaatctttttctcgcctctcatcgctcctcgccatttctctctcctcccctccgtctcacccgccgcccgccgcgaaaatctgcgcacggacgcgccggctgcccgcggagagcctcgggtgggagcgcgccccgtcgaggtgctcttattggttatgggatcaatgtgcaatttttttctttccgtttgagagcctttctagtttcttgggcaggctcttgagctaccaagcatgtcagaatcaaatgtgaagtggattgatgggcttcacttcacatcattgtactggcctccaccccaggatgtggagcagaagcaggcacaaatcttggcctacgtcgagtactttggccagtttacagctgacagtgagcagttccccgaagatgtagctcagctcattcaaagttcctatccatcaaaagaaagtcgcttgatagatgaagtattggcaacttttgttcttcatcatccggagcatggtcatgcagttgtacatccaattctttcacgcatcatagatgggacactgtgctatgataggcatggtcctccattcagctccttcatctctttatttagccatacttctgagcaagagtactcagaacagtgggccttggcctgtggagaaattcttagagtcttaactcactacaataggccaattttcaaagttgaacgccaacacagtgaagctgaatgtagcaccacatctgatcaggcaacatctagtgattccacagataagaaatctaacaattctctaggaaatgaatctgaccggaagcca

SEQ ID NO: 52851 - DNA, 794 bp, Zea mays
  Clone ID: MRT4577_14819C.1
agcttcgaggttttccggcgtgaggaaggaaggaaggcagcgagagcagggcgcgggagactgcgagaggctgccgccatggagaacgagttccaggatggcaaggaggaggtcatccaagcatggtacatggatgacagtgaagaggatcagaggcttcctcaccaccgtgagcccaaagagttcattcctcttgccaaactttcagaattaggtgttgtaagctggaacctaaatgctgataactgggagaaagacgagaatctcaagaaaatccgtgaggccaggggatactcctatgtggacatctgcgacgtatgtcctgagaaattgccaaactatgaggccaagctgaagaatttctttgaagagcacttgcatactgatgaggagatacgctattgtcttgagggcagtggatactttgatgtgagggaccaaaatgaacagtggatccgtatagcagttaagaaaggtggcatgattgttttgcctgcaggaatgtatcaccgctttacattggatagtgacaactacatcaaggcaatgcggctctttgtgggagagcctatctggacgccttacaatcgtccccatgaccatctcccagctagaaaggagtatgtcgacaagattatcaacagaggtgggaaccaaaccgtcgaagctcgttgatggctcctacagtgttcggcagcgagtgagtcttctgtatgtatctacatatcacaccaaaggtaccgaaaaaaatgtgtgattgggcttcgccgtgtacccatacagcatcgatctgg

SEQ ID NO: 52852 - DNA, 203 bp, Zea mays
  Clone ID: MRT4577_1481C.1
agtgagcagcaacggccagaaatttcagggagaccatcttgaaccatccagcctccaccaggccaacagctgacagctgtcacatgaatatgatcagcagaagaaccactcaggcaagccaagcccaaattgccaagcccccagatattaagcaattgtttgtttttttaagcatagactttgaggtggtatatagcataaat

SEQ ID NO: 52853 - DNA, 2644 bp, Zea mays
  Clone ID: MRT4577_148200C.1
gtggctatgtatcatatataagaagcagttggaagttcctgcatctgaggccactatcgatgccactgcacaaggcattgcttctttgttgtgtgctcatggccctgatgttgagtggagaatatgtaccatctgggaagctgcctatggtttgctaccgctaagttcatcagcagttgatttgcctgaaattgttgtagctgccccgcttcagccacctacactgtcatggagcctgtacttaccattattaaaagtatttgagtatctacctcgtggcagtccatctgaagcatgccttatgaggatatttgtggcaacggttgaagctatacttaggagaacttttccttctgaaacatcagagcaatccagaaagccaagaagtcaatctaagaaccttgctgttgctgaacttcacacaatgatacattcactctttgttgaatcctgtgcctcaatggaccttgcctcccggttgctatttgtggtgttaactgtttgtgtcagtcatcaagctttgccagggggtagcaaaagaccaactggtagtgataaccattcccacgaggaagccactgagcattcaagattaacaaatggaagaagcagatgtaagaagagacaaggccctgttgctacgtttgattcatatgttctagctgcagtttgtgccttatcttgtgagctccagctgttccctttcattactaagaatggatcacattcaaatttaaaggattccatgaagattatcatatctggaaaaaacaatgggatgaataatgagctacacaacagcatcagctcagcaattcttcatactcgcagaattcttggcatcttggaagccgttttctccctgaagccatcatcagttggtacctcatggagctatagctcaaatgaaatagttgcagcagctatggttgctgctcatgtttctgagttatttcgtcggtccaggccatgccttaatgcactctctgcactaatgagatgcaagtgggatgctgagatttcgaccagggcatcatctctctaccatttgattgacttgcatggtaaaacagtttcctccattgtgaacaaagctgagcctcttgaagctcacctgacccttacaccagtaaagagggataatcaacatcaccgtgaggaaagcaataccagctcattggatagtgtcaagttggaaaacaagaatggttcaacatcacacaagaaaaacggtttctcaagaccactcttgaaatgtgcagaagaggtcctactgaatggcgatgttgcaagtacatctgggaaatccattgcaagcttacaggtggaagcatctgatttggcaaacttccttaccatggatcggaatgggggttaccgaggttcacaaactcttctaagatctgtattatcagagaaacaagagctgtgcttctctgttgtctcattgctctggcagaagctcatagcttctcctgaaatgcagatgtctgcagaaagtacatcagctcaccaaggatggaggaaggttgttgatgcactttgtgatgtcgtttcagcctcaccaaccaaggcatcagctgctatcgttctccaggccgagaaggacttgcagccttggattgctagagatgacgaacaaggtcagaagatgtggagagtcaaccagcgtatagtgaagcttatagctgagcttatgaggaaccatgacagccctgaagcgttggtgatactcgctagtgcctccgaccttctacttcgtgctaccgatggaatgctcgtcgatggtgaagcttgtactttgccacagcttgagcttctggaagtgaccgctcgggctgtccatcttatcatcgaatggggagattcaggtttatcagttgcagatggtctttcaaatctgctgaagtgccgtctatcaaccaccatccgctgcctttctcacccaagtgcacacgtgcgcgcactcagcatgtctgtcctccgcgacatcctgagcaacggatccgtgaaccccaacaagacaatccaaggggaacagcagcggaacggcatccagagcccgtcctaccggtgcctggccgcaggcatcatcaactggcaagcggacgtcgagaggtgcatagagtgggaagcccacagccgccgcgccactgggctgacgctcgccttcctcagtgccgcagcgaaggagctcggctgccctctcccgtcatgacaaggccattcctggatctgacatcggcttccaattgacggtcagtgctggcacagctgctgcagggtccgcgagtaggacggctctaatctctccatcacgtgttattatctggtgtttccataatgcgatttgatttcaatttggcgttagatgttgtacacgtgtatttaactgcttgagttgtacgtaatttgtatacttgtaactttgtttaataatatggctattactcaagaagcggaacatatcttatcctttttatatgctgctgctagatccgttcaacgtgagtgccatgcaaatgtccacgaaatgtttagtatttgttagggggaaaaggtctcggtggaaggtaaaataatttctaactgttattcaggataaatgatttaacgtggtttaattattaaaaaaaaaaaaaaa

SEQ ID NO: 52854 - DNA, 484 bp, Zea mays
  Clone ID: MRT4577_148201C.1
gcttgcttgctgtccggccagagcaacgactggccatgggttccaccaagccactccggctgatccagcacaagaaggaggccctctggttctacagcttcatcttcttcggctacgaccatgtgttcaacccaggccaatacaccgaggacatgcgcgacatctccctggagcatgctcgcctccatagccgggccctcaaggtggtcgacgtcggtggtggcactggcttcaccacgctcggcgtcgtccggtatgtcgaccccgagaacgtgacgctgctcgaccagtcgccgcaccaactcgacaaggccagaaagaagaaggccctcaggggcatcaagatcatggagggtgacgccgaggacctccccttccccgccgacaccttcgaccgatacgtctccgctggcagcattgagtattggcctgatccgcagcgggggatcaaggaggcctacagggtcctgagcgccgacggcgc

SEQ ID NO: 52855 - DNA, 1544 bp, Zea mays
  Clone ID: MRT4577_148202C.1
ttttttttttttttaataattaaaccacgttaaatcatttatcctgaatacagttagaaattattttaccttccaccgagaccttttccccctaacaaatactaaacatttcgtggacatttgcatggcactcacgttgaacggatctagcagcagcatataaaaaggataagatatgttccgcttcttgagtaatagccatattattaaacaaagttacaagtatacaaattacgtacaactcaagcagttaaatacacgtgtacaacatctaacgccaaattgaaatcaaatcgcattatggaaacaccagataataacacgtgatggagaaattagcgccgtcctactcgcggaccctgcagcagctgtgccagcactgaccgtcaattggaagccgatgtcagatccaggaatggccttgtcatgacgggagagggcagccgagctccttcgctgcggcactgaggaaggcgagcgtcagcccagtggcgcggcggctgtgggcttcccactctatgcacctctcgacgtccgcttgccagttgatgatgcctgcggccaggcaccggtaggacgggctctggatgccgttccgctgctgttccccttggattgtcttgttggggttcgcggatccgttgctcaggatgtcgcggaggacagacatgctgagtgcgcgcacgtgtgcacttgggtgagaaaggcagcggatggtggttgatagacggcactgcagatcacaatattcagttaacctgctgagttacgaaggatgcatgggtggcgtttgaatgagtgagaacgaaggcagatgaagacggggcatgccttcagcagatttgaaagaccatctgcaactgataaacctgaatctccccattcgatgataagatggacagcccgagcggtcacttccagaagctcaagctgtggcaaagtacaagcttcaccatcgacgagcattccatcggtagcacgaagtagaaggtcggaggcactagcgagtatcaccaacgcttcagggctgtcatggttcctcataagctcagctataagcttcactatacgctggttgactctccacatcttctgaccttgttcgtcatctctagcaatccaaggctgcaagtccttctcggcctggagaacgatagcagctgatgccttggttggtgaggctgaaacgacatcacaaagtacatcaacaaccttcctccatccttggtgagctgatgtactttctgcagacatctgcatttcaggagaagctatgagcttctgccagagcaatgagacaacagagaagcacagctcttgtttctctgataatacagatcttagaagagtttgtgaacctcggtaacccccattccgatccatggtaaggaagtttgccaaatcagatgcttccacctgtaagcttgcaatggatttcccagatgtacttgcaacatcgccattcagtaggacctcttctgcacatttcaagagtggtcttgagaaaccgtttttcttgtgtgatgttgaaccattcttgtttt

SEQ ID NO: 52856 - DNA, 573 bp, Zea mays
  Clone ID: MRT4577_148203C.1
cccagcgtccgggttactatatccatggccagtgtgcgatcatcatgtttgatgtaacttcaaggcttacttacaagaatgttcctacgtggcatagggacctgtgcagggtctgtgaaaacatccccattgtcctctgcggtaataaggttgatgtgaagaacaggcctttgttgaagctgttgctcttaaggtcaaagccaagcaggttactttccacaggaagaagaatctgcagtactatgaaatttctgccaagagcaactacaactttgagaaacctttcctgtaccttgcaaggaagctggctggtgatccgaaccttcaagcctccggaagttaccatcgacatggctatgcagcagcagcatgaagctgagcttgctgcagcagctgcacaacctcttcctgatgacgatgatgatctgattgagtagaaaggatcatgagtcttgaacttgagcaggagttgtgccttgcgtgttttaagttgttctagggtgaactcttgagttctcattgtctggatcatctttttctccttggatgtgttgcatcttttgagtgtggaaa

SEQ ID NO: 52857 - DNA, 348 bp, Zea mays
  Clone ID: MRT4577_148204C.1
gcgctcgccatttctccttagttcgatcctccttccctccttccatctttggctcgcctgtggaggaccctggccatcctggccaagcgcaccagcaaaccccaagcagtggcgctcgggctcgcgcctcggcgcgatggcaccgagacactgaggcgatggtagtgccggagcgcaggacattcgatctcgaggagggctgggcgttcatgcaggagggcatcatcaagctgaacaacatcctcaggggccagcgccgagccgcaggtcactgaccgaggactacatgatgctctacactacgaattacaacattttcacggagatgtcgtcgaaggactacttaca

SEQ ID NO: 52858 - DNA, 351 bp, Zea mays
  Clone ID: MRT4577_148205C.1
tgggttggggggctatgccaccccgagcttcgaaggccgcagcatcaggcgcggcccccctcgcgtgtgaccgagatggcgctggcaaatcaggggaccgccgattaccccagcttcaagctcgtcatcgtcggcgatggtggaactggcaaaactacttttgcgaagaggcatctcactggagagtttgagaagttcggcggcctcagggatggatactatatccatgggcagggcgcgatcatcatgtgtgatgtaacctcaaggcttacttacaagaatgttcctacgtggcataggcacctgtgcagggtctgtgaaaacatccccattgtcctctgcggtaataag

SEQ ID NO: 52859 - DNA, 452 bp, Zea mays
  Clone ID: MRT4577_148206C.1
gggagggacgcgtattgtagggttttgctgctctccgaccccgagctcctaaggccgcagcatcaggcacgggcccccttgcttgtgaccgagatggcactgcctaatcaggggaccgttgattaccccagcttcaagctcgtcatcgtcggcgatggtggaactggtaaaactacatttgggaagaggcatctcactggagagtttgagaagaaatatgaaccaaccattggtgtggaagttcatccgttggatttcaccactaactgtggtaagatcagggtctactggtgggataccgcagggcaagagaagtttggtggcctcagggatggatactatatccatggccagtgtgcgatcatcatgtttgatggaacttcaaggcttacttacaagaatgttcctacgttgcatagggaccttggcaaggtctgtgaaaacatcctcat

SEQ ID NO: 52860 - DNA, 537 bp, Zea mays
  Clone ID: MRT4577_148207C.1
ctcgaggccggccgggccgggatacaaagctacgcacctgcctatctatctagcgacagacacagaggaaagctagttagctagcatggagagcgcaccaacagtgcaagaagcaaagcgttgacgctgctgattctaacgctgccgttagatccgacgaccgcgacagacagcctcctgcaggcgtatactccccaccgtgcatgctccgaagatcacctcgagcgtagtctgtgcatccactgagaggcatcctcttgtggcgaaacctcgggtcttcattaccagtgcatatgctgatacccatggagttcgcccaccgctttgcgtcatatcttgcgctgattgcgatatgctggcactagcgtctactttgtaattctgtgatcgccagaaacacacatgacggctaccggtgcgagtgcgacttattgcatgaggacgccggtacctgaagctcagtactgctctcagggatctggcgcatgcggaaatgaaaattgaacaaatgtgacgatggtacctcgagctcccact

SEQ ID NO: 52861 - DNA, 307 bp, Zea mays
  Clone ID: MRT4577_148208C.1
ggccaccaacgaatgaacttgtttttggggggccaaacaggcgaaggtccaaaagacgggaagtccattgtgcccaaactttggggggaaatggtgacaacccaaacctccccaagaccagtgcaaaagaaaaactttaactggcttgggggggggcaaaagaactaacaaattgtcctcttgtaaaaagattttcagtgggcccaagccgcaacactttaaactttttgtttctcacaccatccagaatacttgttttggggcttataaccccccatccttgagcaagttctttttttggaacccc

SEQ ID NO: 52862 - DNA, 391 bp, Zea mays
  Clone ID: MRT4577_148209C.1
gcatactgcgcgggccacctagcgtgtgaccgatatggcactgccgaatcaggggaccgttgattaccccagcttaaagctcgtcatcgctggcgatggtggaactggcaaaactacatttgtgaagaggcatctcactggagagtttgagacgaaatatgaaccaaccattggtgtggaagttcatacgttggatttcaccactaactgtggtaagatcaggctctactgcttagacaccgaatggcaagagatgtttggtggccttaatgctggatactatatccatggccagggtgcgatcatcatgtttgatgtaacctcacggcttacttacatgaatggtcctacgcggcatagggacctgagcaggggctgtgaactcatccta

SEQ ID NO: 52863 - DNA, 689 bp, Zea mays
  unsure (1)..(689): unsure at all n locations
  Clone ID: MRT4577_14820C.1
ccggccgggaacccattcaccatggaagtcgacaatccttctagtcttccccagggaagtccgagacatgatgtattcctactccattccggaaatcccagccacagacgccacagtctccaaaacagcctacaacaccaagaatgcccctcttctgttcctcaacgaagccatctccaaagacgttcagcacgtgctctatcaagatcacgccatcgtcatcccagtactgaacccaagcgaatacgaactcaaagaaacaaaattcgcacctatcgtcagccaatgctcgcgtctgatgaaacagcgctctaacagagtaatcatcggtacatcacgcttcattgccgcaagctactcaccgctgcttcacataaacatccacgacggaacatcagctgaagactggatccagaaattctgcggttttgataatcctgagccgctagccaagaaactcatcgatgagttgatttcacttacgacctgaactgccgaatgtcaaggtcattgagttcaagttttttgaggggtttaatgtncttgtcgctttgaggtggagggaatactttttagaattgaaagaggcatggccggagattgagaatgagatcgattttattccctgcgtttctgggcttggaacatgttgaagcaatttttcaggacgctcaggatagtatggagga

SEQ ID NO: 52864 - DNA, 411 bp, Zea mays
  Clone ID: MRT4577_148210C.1
agcaaaagcatagagatccatcttctctgctcaatcaattacacaacaagagcattctagatttgagttcatcctagcgataccaatacacccatcccaacactccaaaccaaccaacacttcaaccaaaccaccacaacaatgccttcagtaacccaggcccgtctcatgtggcgtagcgtcgcccgcggcatggtagagccccaccccttcgctcgcaatcccatcaccatgacccctcacgcctggcgcgccgccgacctctccaagaaagtcgtgaagacaagcactgtcttcttccccttctatgcaggtatccttggatggccagtcgcagccgcctggtggttcaacggaaacatgtgactcttccaaatggaagtgccaaggcaggagaagaggaagggaccg

SEQ ID NO: 52865 - DNA, 246 bp, Zea mays
  Clone ID: MRT4577_148211C.1
gatagctattcctctccgacttacttttctgatctgagatagggttaccccggtactatcaatagcgaagtaactgattgcttgggagcatttgttggcatgtcatagagagccaatcagagagtgcaagtacgagttcaattttccatgtgatgagtagcggcggtatcacataaagaggcaggctccacaagaacattcgttcctaggtgcatgacttggaggggagctccttcttgctaagat

SEQ ID NO: 52866 - DNA, 377 bp, Zea mays
  Clone ID: MRT4577_148212C.1
ccagcaagcgcgcgcgcacaccaaacgcaactgcaactgcaactgcaagagcacgccacagcagaaaccaacagttccacacgaagcaaaaaaaaaagggggaccctccccctctgccgatttccatccgccggggcgtcgtctgtgaccgaccagaccatggacaagatcctggccttctccatcctgagctcgtcgccggcggacatctccgcagccggcctctcctcctcctcgtccgcccggctctcgtggcgggcctcggccgccgggcggcctcggccccaggcggcggcggcggcggacgcggcgccaacgccgaggcaggagaaggcggccgaccagcgggcaccgccggccgagcgccggcgggaggt

SEQ ID NO: 52867 - DNA, 950 bp, Zea mays
  Clone ID: MRT4577_148213C.1
agcgcaagcgctgccgcacaccaaacgcaactgccactgcaactgtaagatcacgcagaaatttcatagtactgcaccacactcagcaagtagaaagggggctccctccctttgacctgattgcccttcacatcggcgttattaccgcagaggacaaccatggtgttttcacagaccctgcacaggtccctatgccacgtaggaacattcttgtaagtaagccttgaggttacatcaaacatgatgatcgcacactggccatggatatagtatccatccctgaggccaccaaacttctcttgccctgcggtatcccagcagtagaacctgatcttaccacagttagtggtgaaatccaacggatgaacttccacaccaagtggttggttcatatttcttctcaaactctccagtgagatgcctcttcacaaatgtagttttaccagttccaccatcgccgacgatgacgagcttgaagctggggtaatcaacggtcccctgattcggcagcgccatctcggtcacacgcgagggggggcgcgcctgatgctgcggccttcggagctcggggtcggagagcagcaaccagcaaccagcaagcggcaagcgcgcgcacacaccaaacgcaactgcaactgcaggtgcaagagcacgccacagcagaaaccaacagttccacacgaagcaagaaaaggggacccccacctctgccgatttccatccgccggggcgtcgtctgtgaccgaccagaccatggacaagatcctggccttctccatcctgagctcgtcgccggcggacatctccgcggccggcctctcctcctcctcgtccgcccggctctcgtggcggcctcggccccaggcggctgcggccgacgcggcgccaacgccgaggcaggagaaggcggccgaccagcgggccccggcggccgagcgccggcgggaggc

SEQ ID NO: 52868 - DNA, 1513 bp, Zea mays
  Clone ID: MRT4577_148214C.1
caaagctatcaagccccgcagtcgcgagtaaagaacaacagcaggccaccgctgctataaaaccctccgcctccaccggcggctcgccaaactccgtttcgaattctagggttttgctgctctccgaccccgagctccgaaggccgcagcatcaggcgcggccccccctcgcgtgtgaccgagatggcgctgccgaatcaggggaccgttgattaccccagcttcaagctcgtcatcgtcggcgatggtggaactggtaaaactacatttgtgaagaggcatctcactggagagtttgagaagaaatatgaaccaaccattggtgtggaagttcatccgttggatttcaccactaactgtggtaagatcaggttctactgctgggataccgcagggcaagagaagtttggtggcctcagggatggatactatatccatggccagtgtgcgatcatcatgtttgatgtaacttcaaggcttacttacaagaatgttcctacgtggcatagggacctgtgcaggtatgttgatgtctttctttgtcgtaaacttgtactgatgtataattttgttggaaaattttgatgtccagttatgaattcatgcagggtctgtgaaaacatccccattgtcctctgcggtaataaggttgatgtgaagaacaggcaggtcaaagccaagcaggttactttccacaggaagaagaatctgcagtactatgaaatttctgccaagagcaactacaactttgagaaacctttcctgtacctcgcaaggaagctggctgggtaattgactacccttcttctgtgcattgcatttagtagtcacaaccaattaccactctatgtttgttcttgacaatgtctttgtttttaacagtgatccgaaccttcactttgttgaagctgttgctcttaagcctccggaagttaccatcgacatggctatgcagcagcagtgagtgtcaccttttgtcttcatccaacttataatcattatggtcctactatccttttaatgtgtctcctcaatttgaaatattgcgggaactgattcacttttcatttgctcaggcatgaagctgagcttgctgcagcagctgcacaacctcttcctgatgacgatgatgatctgattgagtagaaaggatcatgagtcttgaacttgagcaggagttgtgccttgcgtgttttaagttgttctagggtgaactcttgagttctcattgtctggatcatctttttctccttggatgtgttgcatcttttgagtgtggaaatggatggtactcctcgcaatgtataacggcgccagccaattcatggcgacgagtaccatccatttccacactcaaaagatggtcactcctcgccatgaatttgctggctactttatacattgctttgtaactctgtttgatgataaactttgttgtggcaatcctcttagtgctgaaaaaaaaaaaaaaaaaaaaaaaaaaagggcgaccgcgctcacgaggataagagtc

SEQ ID NO: 52869 - DNA, 454 bp, Zea mays
  Clone ID: MRT4577_148215C.1
gaaggaacccgcaaaacggggggggtccttggggaaactttcgcggaatccaggggggcctgagaattgaaaaccaaaaaaaaagggattcgaccggatattttctaagccccccgagcaaaggtatgaaagcatgaaaaatacagataaggcccgagcttgtacacaggaaaaaattgcccggctacccccttttggagccctgttaaaaattgcaccctttgcccagggggggggggaaaaaaacaaaaattttaaggttaaaattaagggggggaggaaaatcaaaatcagatgggggccaccgtcctgatgcccatcgggaaaacctcgttgggcaactcggcccggaaggacccgcggcccacaaaaatgttggcccccccccacggggggaaggcgccccaaaaaagggctggcccctgttggcgcacggcgcctggtacggaaggca

SEQ ID NO: 52870 - DNA, 514 bp, Zea mays
  Clone ID: MRT4577_148216C.1
ctcgaggccggccgggccgggattccgttgccttgcgcttgagctgagcgtcgaacccatctttccattactttcttcttctgctccactcaccccttgatccgttctgtacttctacatttgaccgactgatgtatctccactcatgccgtaatcaaaacctcgtacccgaccaatccgtaccattcaaatgatgctggctttgctctatgagagccgaaccaccttatctccgcaaagatcagataaaccgccgcacgacgattgagcgatattgcttatatgaaccatgcaactgtgcatctcctgccacacgcctaagtattgatgcatgcaagtacgcgatacttcatgcctgcacgatgcggtctgcttgatcatccgatatcgagagcgaggaagaggcactgatcaatggagcacatccacatttgctgttgcttaattgctgccttagctccaccaattggatctcctggtaaatcattaacgcaagcatgacactccttatatc

SEQ ID NO: 52871 - DNA, 173 bp, Zea mays
  Clone ID: MRT4577_148217C.1
gaggacgccgcgctcgccgctatcattcgtttttggagactccttctagccccgccgccaccacaagaccaagagcaagactcggatcaaaggcgctcgccgtggtcgccgtcctggcagccgtcgtcctctcggttgcctccgctgccgatgctcccgcgcccagccccgtc

SEQ ID NO: 52872 - DNA, 448 bp, Zea mays
  Clone ID: MRT4577_148218C.1
gagaagggggccccccccagggaccaaaaaaaagattgggagggggggttttcaccggacccgaatccaaaataacgaaaacagaacaacgcccctaaaaaagcctattggggggggaacaaaacattaaacaaaaccccggagaggagggctaccccccccccccaaggaggcggggggaaaaccggatgtccttgggcaagagggggacccccttaacggggagggggcaaaggtgggggccccaaaaaaaaccgaagaggggggccttgggggccccctggagcgccaaaacgggggggctttgaaaccggagggttgtcttaaagtcctgggggatctcgcccaccaagggcgggaagggcatcttggggataaaaaactccaggcctttgggggactgggggaactcccccaacgccacggttccgggcctgtaccggggggg

SEQ ID NO: 52873 - DNA, 786 bp, Zea mays
  unsure (1)..(786): unsure at all n locations
  Clone ID: MRT4577_148219C.1
actccatagggcgattgggttcctcgaggccggccgggtgtccgtacttctctcgctggcgatcgatcggagcagagagagacttcctcgcctcgataccattccgccggcgccgtgtctacggacgctaatataccgggcgcatgccagagatcgcactacgaagcaagatacgccgtgtcgccgctcctcggtcggcgcactcgatgcactcgtgaccgctggagcgcgtcaggcgccggttaccctgtctcaacagggcctactccttgcgcgcagccggcctgccagcgcgggggggggaccagttagtactatcgtcgtcatgctcatgccctcgacgatcgtgcggagcgtcatgcacgcaacatgtcggcgtacctcgcctcgtctcaccgtcgtcgcgagattgcgatccggttccaagcttcgagggatcgaggatcaagcgttggcgaccaagtgatatagctttacgagttctacgatactaaagaccctgagcatctgttcggagaaggttgcctttggggcaatctatgctcaggtaaagaagaaggcgtcgaggcggatccccaggaattccaggacttcgacgagttcgaggattaggctagcgacctcccccagtcagctgcctgtggtgggttaatttacgttggctacgtttctattatgtgtactttgattatattatgtaatgactctagtctttaataccatgacttaccctttattgttattcgaggcattgtgctatngaaaaaaaaaaaaaaatttgcggnc

SEQ ID NO: 52874 - DNA, 234 bp, Zea mays
  unsure (1)..(234): unsure at all n locations
  Clone ID: MRT4577_14821C.1
ttttagttggaacggnagtaatagaagaaaccgagatgggcagtgttatgtcaacaacacagggatgccaccaaatcaaatcgatgttctaatgaacaaacaggtcaacatggaaggccttaaaatttgccttctccgtatataccaagattgaagagagtaaacagagcacaagcatcataataacaaaaaatgttctcactagttgcaaagcagcacaaacgaagcaagaaa

SEQ ID NO: 52875 - DNA, 387 bp, Zea mays
  Clone ID: MRT4577_148220C.1
cggctcgagcaagaacactctcgtttacagagcaactttttcgtgctcaagaaacacttacactcgcttaagcttattccagcaccaaaaccgtcaaaatgggtttcatcaagtctgcctccatcgccagcgtcctcgtcggcgctgccaccgcctctccctactatgctcccccctccaacgagaccgtcaagtacaccactgaggtcgtcactcacctgaccaccttctgccccgaggccaccaccctcacctacggcgagaagacctacaccatcactgaggccaccaccctcaccattgaggactgctcttgcaccatcaccaagcccgttgctaccggcactggctatgctcctcctcccaagcccactcatgccaaggact

SEQ ID NO: 52876 - DNA, 118 bp, Zea mays
  Clone ID: MRT4577_148221C.1
gtggggggcggggcttagcgttttcctttcttgtctcatccttgttatgggatgttgctgtcatccaccttcactctcataataacgctgctaggcgcagcttgattaattacaaact

SEQ ID NO: 52877 - DNA, 1110 bp, Zea mays
  Clone ID: MRT4577_148222C.1
ggagtttgcttctggtgctccgtatgatccattagttgacagtattgaaccatcaagcagttcaatcaacaaggtagatcttcgtaaagagaagaactggagtgctgctgataggcgtgatgcatcgaaatttatgaacctagaagtggacagtgaaaatatgcatggactgggggttgttgctgagtcagaagttgagggacttggagaggtggcagcagatactgagacaggtgtggtggagaatgcaagtcctgagttcttgggtggtaaagattggaactcagatatccctgttgattttgacaatgaccaaacattggacaaaaataagaagggtaaagattccagatcaatgaagctttttaagagtgctattgcagattttgttaaggaagttcttaaaccatcatggaggcagggtaacatgagcaaagaggctttcaaaactattgtcaggaaaacagttgataaggtttccggttcagttcctagcagtcatattccaaaaacacctgccaagattaaacattatgtacaatcctcccaaaggaaggtgaccaaattagtaatggggtatgtcgacaagtatgtgaagccatagagtaatgtggcattgtgctgaatcagaactgtcatggttccagagtctgtgctgcattctactaaatgaggctgcaaatttggtaatctttctgatgaaacggttgttccacagtaaggtagtttgctctagttctgcaggaaatgctgtattttattggagtgacatgtctagatgtgcttccagtattgataatttgctgcctgatttcttgtaccctgtaagggtgcgatatttgtgcgaacatgctgctgaaaaaactttgtttcttaatggtgattatgcatactgagagctgtaaggcttactgctgaacgaactttgtttctgaatggtgaatatgcatactgagagctgtaaatatcctgctctgctatcattgaacgttgcctatgctaggagcttgtcgaaagctagtagacgcaacaagaaaaaggccagtattaccatcaaattgcctatggagtaatgaagactaccatcgtttcgacgctggggcttagtat

SEQ ID NO: 52878 - DNA, 833 bp, Zea mays
  Clone ID: MRT4577_148223C.1
cgtgcatgcagctgtggttctcatctcatccgtgctctcctcgacctcgcctagctagagctagaattcggctcgtgggctgggggtgtcctccactcctcccctcgtcgtctccttccacgcgcggccgacacgggtgccgccacgagcgagtcgggctctggcaacaccgcgccgccgcgtgggttgggttgggacttgggactcgcggtttggaacccgaacaccagtggccggtcgcctgccacaggggggagggccagttttgtttttctagtactcggacagtgtcctgcaggcaacggacaaaactgacgggagccccgccgcctgctggcctcggccctcagttctcactcctcacatccagcctccagcgcccgcccgcccgcctccgctctctcgatccttctctatatagctcggcctggccaccggccttccgctcccacacatccccgtctgcgtccctccattgcgaccgagcacgtacgccaccgccgcgtgtcagccagccagccatgatgtcaacgagccgcgcggtgaagtcgccggcgtgcgcggcctggcggcggcagtggtccgcggacgcgccgaaccgcacggcgacgttcctggccaggcacgggaggcggctcggcggcggcggcggggcgccgtgctccgtgcgcgccgagggctccaacaccattggctgcctcgaggccgaggcgtggggcggcgcgccggcgctgccggcgggcctccacgtggcggcgccgtcgcccggggacgcgttcgtcgtgccgtccgagcagagggtgcacgaggtggtgctcaggcaggcggcgctc

SEQ ID NO: 52879 - DNA, 415 bp, Zea mays
  unsure (1)..(415): unsure at all n locations
  Clone ID: MRT4577_148224C.1
cgcacacgtccgaaagaaactgcggcgncttttcctgccaaacgataatccgtctgcacgaacaagggtggctgaactatagaggcccttgattacacaggccgatccgtgtgtctggttggatgcaccgggggagaaactgcattcacaaatcctcaaagcacattctgcatgtctcactattctgcatgaccaggctcaacgggtgcaagaaacaacagctagccagacccgttagaaacggacgctcggcgcgtacgcacgcgtgcaggcccggcagagagccaagcccgctagaaacggacgcacggcgcgaacgcgcacttgcaagcccggtgcagccacacccgtacggaccaggctggcacagtgtatgaaaccagaaatgcggtatgtgactgacatggagatgcaa

SEQ ID NO: 52880 - DNA, 1131 bp, Zea mays
  unsure (1)..(1131): unsure at all n locations
  Clone ID: MRT4577_148225C.1
cgagcatcgacatcnncncccacgccancncaggcaaggtcnacatttattcgttttagctcnnccaagcccnccactgngagaagaactaccttcgcattcaagtacagtgtatgtacaggatacatgaaaacatctaacatggacatactaaagcaaaaaacaaaaatgttcttcatataaaacggatgacgaccattgatggctgctattatattggacgccgaacttgtgcattcaggatgatactctgattgggaacacatcatcagtggacatcgcgaccaaggagaacatggagtctctgatcgggatcggccaggacctgctcaagaagccagtggccagagtgaacatcgacacaggtgtgtacgagccctgctccggcgaggggacgaatgcagaggcgctagctcacttcgccaagaagctctctgacgagcgcaagctacgcaagcgcaatctcgactcctactagcaagcttgaaggatgatgtcagcagagaagcttgaaggagccctagctgcacctacactagctagcaatgtgcctcacatagatgcatggtattggtagctagtcatttcttactttttataactatattaatcaggaaacaaacacatatgtcgaccaataaacatgtaagtccaatcatcatttgtttgcctatggtctcaaaagaatgattccattctgatgtgcggttgtttagtctaatgaccttcgtgatgcaagcagcctcctttctggattgctagatcggccaggacctgctcaagaagccagtgggcagagtgaacatcgccacagggctgtacgagtcctgctccggtgagggcccaaatgcccagtcgctagctgacttcgccaagcaactctttgacgagcgcaagttacgcaagagcaatttcaactccaactaataaatacctctttcagtcacagcatgtgctcttttccgcagattccccgcttcttatttttaatttaatttcaattctgggtgtgtgtgattgtgtgtgtgactgtgtgtgtcccaataaacatttaagttcaatcatttgcttgtctatgatcaaaaaaaaaaaaaaaaaaaaaaaaaaaaaaaaaaaaaaaaaaaaaaccac

SEQ ID NO: 52881 - DNA, 703 bp, Zea mays
  unsure (1)..(703): unsure at all n locations
  Clone ID: MRT4577_148226C.1
ttaccttcgcatccaggnacgtacganatatttacttatgcatatatatatcttgttcttgctaatttatactaagaaaaactgagaaaaaaaaacgactaaaagtaagaaataatgacaccaacaaaaaggacaccaacttaaaaaaaaacccatgtactatgtaggatgatactttgactgggaacgcatagtccggggacatagtcaccaaggagaacatggagtctctgatatcgatcgaccaggagctgctcaagaagccagtggcgagagtgaacatcgacacaggggtgtacgagtcctgcgacggtgagggcacaaatgcacagtcgctagctgacttcgccacgcgaagctctctgacgagcgcaagctacgcaagcgcaatctcgactcctactagcaagcttgaaggatgatgtcagcagagaagcttgaaggagccctagctgcacctacactagctagcaatgtgcctcacatagatgcatggtattggtagctagtcatttcttactttttataactatattaatcaggaaacaaacacatatgtcgaccaataaacatgtaagtccaatcatcatttgtttgcctatggtctcaaaaaaaaaaaaaaaaaaaaaaaaaaaaaaaaaaaaaaaaaaaaaaaaataaaaaaaaaaaaaaaaaaaaaataaaaaaaaatttaaaaataaat

SEQ ID NO: 52882 - DNA, 329 bp, Zea mays
  Clone ID: MRT4577_148227C.1
aaaccaaacccggtttgaaaaaaaaaccagcccttgggggttgacggggcctcctaaaaacagaaatttccaccagcgggaacaagcctacccccggggggggggctttttttgttttttgtaatagggggaaccccccgggggggtacttggccttcttgtttaacccaacccaaaaaatttgcccccccccaaaatttttttataaaaagccggcccctcctgcaggggtggttttctatggcccccgggggtggtcaaaaaccaagaattttggtgggcccctttttaacaaagccggcctggacgaggaaaatttaaacgttttt

SEQ ID NO: 52883 - DNA, 890 bp, Zea mays
  Clone ID: MRT4577_148228C.1
cccctcggccggccgagtctgctctgctgctcgatcggatctcccgcgcgccaaaccatgccgacgcagcaagcatgttctgctgcggcagcattgagatcgcggcggccttcccctgcatccacgacgacgacctcccggcagctgcggctgcgtccgcctcgtgccgccaccgcgggcgtgcggctgacggtgtcggacgcggagctggagtcccgcgggttcgctgtgcggcgcacggcggagggcatcgacgtggcggcgctgaacgaggtgttcgtgcgcgtgggcttcccgcggcgtcaggaggagcggctgcggcgcgcgctggagcacagccgtgtggtgtggctgtcggccggggaggaggaagggcggcccgtggcgttcgcgcgcgcggccggggacggcgtgttcaacgccgtggtgtgggacgtggtggtggagccgtcgagccagggcctcgggctgggacgcgccgtcatggagcgcctcgtcgacgagctgcggcgcgacggcgtgggccaacatcgtgctctacgccgagacgcgcgtggtggggttctaccgcctgctggacttcgccatggaccccgacggcatcagggggatggcatactaccgcaagtccgctactaccgccgcttgattcgtctcgtctgtcttgtactcattcatcaatgaaggaagtcgatcgaattccctaaagccccccatgtttgtatgatgtagatatgacatggtttatttttatcactcatctcatagttgctcgtttattacctttcattttatattccgcgaaaacgatctagctagaacatgtacttatatttcgcgcaaatcaagcaatataaaaacctcacttctttcctaaaaagaaaaaaaaa

SEQ ID NO: 52884 - DNA, 285 bp, Zea mays
  Clone ID: MRT4577_148229C.1
gggggggaaaaaaaagggtggtttctttaaaaggaaaaacaacaataatccccgggttggtcgggcatttttggcttttttggaaacaagggggttggggaaagcaaaaaaagggcctaaacctggagcaactgggggcctggaaacaaaaacctgttgggtttagggaaaaaaaatcctataaggatctgggaaaaacccaaggagggaatttaaaccggttaaggggggggaaaccatttttaaaaagtaggggccaactttttcttgaaaaggggggggggt

SEQ ID NO: 52885 - DNA, 292 bp, Zea mays
  Clone ID: MRT4577_14822C.1
ctcgaggtgtctgggggagttttttacagctcattctttgattttttaaggcagagagcagcgccgtgatgagaggaggatgagcggggcccactgcggtgttcatgtcctactagccgtcttcagccgacgcggaagaggtggtggagaacttctgtgcctgtggaggaggactaggagacggtggtggagcatgactactactagctggagctggtgctctgtctcggctctaagcaacagcagctgcagcatccgccgtcgtgtctgatccttacggtccgggacctgc

SEQ ID NO: 52886 - DNA, 412 bp, Zea mays
  Clone ID: MRT4577_148230C.1
gggggttcctttcaattttttggggtgtttattttattcggagagagaaaacagatacccaaccggggccggaaaaaggaccgggtcaacaaaagggggtgggcccaggcacacaagcccggcagaaaaaaaaagagcccgcgttcaatggtccaaaacccaaaggggggagggggggggccccccccgaaccaaagaaaacgggggctagagtgggactccaaaaaagtccccaaagacggaaccaaccatcgccgaaaacacttggtcttgagggaaggaaggtggcccccctccttggggcgggggttcctcttttccaaatgccgggggggacccgccgtaatctcgcccacaaccgggggttccgggattaaggaccgggtgttgggcccccgacgggaaaaggcgg

SEQ ID NO: 52887 - DNA, 522 bp, Zea mays
  Clone ID: MRT4577_148231C.1
taggaaatcaaattgtaccgtgaagcagctttcttgtgtttacacaaagtattcttcttcaaatctcatttactttcattttcactagcagatgctgtaatgttatgttttgttggccagcattttctttactggaccaaaattttccttaataaaacgaattgcaactgctgcagaaatgtaccttttagcatcatgctaaagatttattagttttttcttgagggtgatcaacttattttgccattatctgagtgcacaggtttgtaatgatatagccttttataaacgttacagaattttagaattggttccatttacctacggttttttttttcttcataacttttcaggtgattacggtattgagagatccaggatttctaatagctggtttccaatgctgctctaggtttctaaccaatctcccatctcgaacacaaagggctctgctgaactaaatgaaagtgaacgtgcttactgttgctctggataaagagctcaattgtgcaacatttatca

SEQ ID NO: 52888 - DNA, 388 bp, Zea mays
  Clone ID: MRT4577_148232C.1
ttgtttttttttttttttttttctgtacttggccgctatacggactctaccctgcatttagccttggacggagtttaccgcccgattggggcctggattcccaaacaagccagactcgttgacggcgcactggtggtgtgacagggtccgggccggtcggggctctacaccctcccaggcgcgcctttgcagacaacttgggccagaccgttggtgaggacgcctctccaggctacaattcgggcggggaggccgcccgattgtcaagctgagctgatcccgggtcggtcgccgttactaggggaatcctctgaaggttcttccgctccgcttatttatatgcttaaactcagcgggcagtcccaactgacctggggtcgccccgcgt

SEQ ID NO: 52889 - DNA, 274 bp, Zea mays
  Clone ID: MRT4577_148233C.1
gctgagctagcttaggggggaaaaggcctaacctggggcttctacatctgacattaatcaaggtcaccactactatactaaacataggggagttacacaacttactatgtcgtacacttctatacagatcttgttcaccccatgttacaaacgctccaagcctagctactctaaattacatcacatatacgtgtagttcagtgcttctggagaaaaaaacgtacagttcacaattctgtgcttggcacaaggaaagggaaacaccaaggaatct

SEQ ID NO: 52890 - DNA, 448 bp, Zea mays
  Clone ID: MRT4577_148234C.1
aaaatgggccacccggggggccaaaaaaaacattttcggccccagggacaaaagggtgcccgatctaccaccccaccccaaaagagggaaagataagggggttgccctttaacaacacaaggcctaaaggaattggtttggggaaaacaaaactgaaaacggggctgcctccaaggggggggcccccttgggcaatccgggggccactaacctggggggaaaggatcaacccgggcccccgattaagttgttgatagggaaaaaaataaacctgcaaaaaaacccgaccaatcccatgaggacaaaacccatcgcggtccgggcggggaccttggggaaatcctttggggccgggttggggcaaccctttacaagggggaagctgtccttggggaacttccggaggggggtggcaaccgaggcaacttcgtccatggggggggggggg

SEQ ID NO: 52891 - DNA, 683 bp, Zea mays
  Clone ID: MRT4577_148235C.1
tatttcgccgcaaggcctctagaagcaatcaggcgagcggcggctgcggcgcgatgggagagcaggccgtgacggagcgtatccagcggaagctggaggaggccaacgctaccgtccaacagcacctcgccggcatccaggaccacgtcaacttcaccatgcaggaacggttgaaccggtcattgatggtctgtcaagataagtttgaagctgccaagctccagaagatgaaaacagatgcaactcaggaactggaatcctgtgtcaacagatctatcgatgacagcatcagggccctcccatatgtggtgcagcagatgaagtccaccctcaatatcaattagaggcattattacctttagcatatgaaccagatatagtttgataatgtttcatattcacattcaaggcataagtctacattttcagtggaaaaacccttagaactatgcagagctcttaccgatatcgattgtttcgtagttttttgaattctgctcttaccagcgtcgacattttgaattctgctgagaccacagcttaggcattggaaggctggatgaacttgttctgctacatgtaccacaatatcttttatgtctcgtgatttttcacgttgcttctgtttcaatgcggtttatcttttgccgtagaagaataaactgtgcggggagcatttggtg

SEQ ID NO: 52892 - DNA, 1417 bp, Zea mays
  unsure (1)..(1417): unsure at all n locations
  Clone ID: MRT4577_148236C.1
gtatgtctctcacctggttattgtatcgtgaaatgattattatttatcagtggctgtcagagttattgaagatggttctcttaatgtctggaatcatgtacagacacaatgctacgcatcttgtcactttgaacagaaaaccctttgtaggcaaacaactacatgaataatgtagctgcctaactgtaattcatattctagtaggttcataggaaccttgttttggcatatttagggtttagattatgcatgtgtttctcagaataaactagcatgccacctatatctttgttaatcgtaggccttcgggaaaaaaaaaaaaaaaaaaaaaaaaaaaaaaaaaaaaaaaaaaaaaaaaaaaaaaaaaaaaattttttttttgtccaaaacagacacacgtcactgttcgccttgtcccgccgtttctgttccattcctcctcctgcaggccgcaaaggaataaggcggagaagctcgatgggtcggcgccatttgtcctccaactatttcgccgcaaaggcctctagaagcaatcaggcgagcggcggctgcggcgcgatgggagagcaggtcgtgacggagcgtatccagcggaagctggaggaggccaacgctaccgtccaacagcacctcgccggcatccaggaccacgtcaacttcaccatgcagcaagcatacttcaagtgcgcatatgattgcttcgatcggcgccgtactcaggaagcgatcaacaattgtgtggagaattgtggtatgcctgtccttgctgtcaacaatgtttttgagagtgagatggccaagtttcaggaacggttgaaccggtcattgatggtctgtcaagataagtttgaagctgccaagctccagaagatgaaaacagatgcaactcaggaactggaatcctgtgtcaacagatctatcgatgacagcatcagggccctcccatatgtggtgcagcagatgaagtccaccctcaatatcaattagaggcattattacctttagcatatgaaccagatatagtttgataatgtttcatattcacattcaaggcataagtctacattttcagtggaaaaacccttagaactatgcagagctcttaccgatatcgattgtttcgtagttttttgaattctgctcttaccagcgtcgacattttgaattctgctgagatcacagcttaggcattggaaggctggatgaacttgttctgctacatgtaccacaatatcttttatgtctcgtgatttttcacgttgcttctgtttcaatgcggtttatcttttgccgtagaagaataaactgtgcggggagcatttggtgagacaaatggaaatcattcagacgtgagaatttctcatgataaaaaanaaaaaaaaaaaaaaaaatcccaaaaaaaaaaaaaaaagcggcc

SEQ ID NO: 52893 - DNA, 277 bp, Zea mays
  Clone ID: MRT4577_148237C.1
ggggggggaggacgcgtccggtgtgcgtcctctcctcgacctcaacccccaccccgccctacctacaaccctattggggtggggcttccggcggggagagggggttgatcccctcatcgaatccgtcggatcgggagcgggagagaccactcccaaatcgcgtcgcgtcacgtagagcgagagcggaagatgtgcgcgcgggggaaccgaccgaactgattgatggagtcgacgggggcgcccggcggctgggagatcgcgcgcctggcggatgacc

SEQ ID NO: 52894 - DNA, 1295 bp, Zea mays
  Clone ID: MRT4577_148238C.1
agattacatttagctggcttgtggagccacccaggcgtccgataagattccttcatagagctgctgatttaactttagtaccatctgctgctatcagcaaagattttgaaactgcccaggtcatatcagctaatagaatacgcctttggaacaaaggtgttgattctgcaagcttccatcctagattccgcagtcatgagatgcgagtcaggctaagtgacggtgagcctgaaaaaccactggtaattcatgtcggacgttttgggcgtgagaaaagtttggattttttgaagatggtaatggaaaggttgcctggagtaagaattgcatttattggagatggaccatataggggtgaactagagaagatgtttgaaggaatgccagcagtgttcacaggaatgatgcagggtgaagagctctcgcaggcgtacgccagcggcgatgttttcatcatgccatcggagtcagaaacgctcggccaagtggtcctagagtccatgtcgtcgggggtgcccgtcgtcgcggcccgtgcaggcgggatccccgacataatcccggaggaccaggagggcaggacgagcttcctgttcacccctggtgacctggacgactgcctcggcaaggtccagcagctgctgacgaacagggagtttagagaaaacatggggcggacggccagatccgagatggagaagtgcgactggcgggcagcgtccaagacgatccgcaacgagttctacaatgctgctatctggtactggcgaaagaagcatgcggagctggtgaagccgctgcagtggctggcacagatgttcctgccggcgcctgaggtccgcagcatcatgcaatgctgagtgaggatgctgttgcttgcagacatgatccagacaattgatggacggatgggcagatgcatatgcactccttgtaaattgaaattgtatgatgtatagtgctgtgtcgataggtgagatagttccccgtttttgtatggaaactggtattggactgtgattggtgtggcaattccatcgattacatgtgtcttgtgtagcaaaacaaaattggaattgtgctatatcttgctggacattgtaacctgtaaattatgatcatgccattttatttaaccgaagcggcaggagctttggcataattgtaaataggaaaaatatatttatatagtgtaaataggaaagatatattttttctccaaaaaaaaagaataaaggtggggaccccaagggccgggaggaaaaaattgggccaaacaataaaaggggggggggccc

SEQ ID NO: 52895 - DNA, 315 bp, Zea mays
  Clone ID: MRT4577_148239C.1
aaaaaagggccccttggggttttggaacccttttgtttaatttacaaaaacctcccagggccaacaggggggacataaaaaaaccatttcccaccgggccgggggattatagggcatttttttggggggacaaaatagggggggggcactggggggggtgccctaaataaaggcctttaaattttggcccccccacccgggctgaaactgaaacttttctgttatacaaaaaaaagggggggcggtttgtctcccctccaacgattccggtttaggaaattttctaaacaaaccataccctgggggggacccttg

SEQ ID NO: 52896 - DNA, 215 bp, Zea mays
  Clone ID: MRT4577_14823C.1
aacagactgtattggtaataatcacacagcgagcccctctgaacaagggcacaacccgaagcaaaaaaggtgtgaaccctaaacataaataagaggacccgggccgtaggaacacaaatgggcaggacaaaatgaccaattaggtgtacgatgcaccctgcacaatgctcagcaggtacgatcatttgctatggacagggtgaaagtagaaagca

SEQ ID NO: 52897 - DNA, 326 bp, Zea mays
  unsure (1)..(326): unsure at all n locations
  Clone ID: MRT4577_148240C.1
gaacaagactccagagcagactatacgggggatggagcgcaaatatatgaagaccgnanagccacaccagggggcaagagaggagaggtacagggagacgctggagaagaaggcggaggagcagggcgcacagtttgtgtccttcgacgctagaaagggagagtggaagctcagggagaagcacttcagcgcctacgggcttaggagaaaacctggggagataagtagcttgaaaggactgatggaacaacactttacgctcgtggcaattaccatgcttggatcaagagcgatgctaatggacaaagttgctgctggtaaaaagc

SEQ ID NO: 52898 - DNA, 1433 bp, Zea mays
  Clone ID: MRT4577_148241C.1
aaaaaaaaacctcgtcgctcggctcccgaccgcattgcgatcagtccgggctttccctcccagccttcctcctgcgtctcgctctcgccggaggtcaggcgcaccgccgccgggcgatggacgcctcctaccgccgcgccggcaccgggagcggctccgctccccgctccgtcgaggacatctacaaggactaccgctcccgccgctccgccatcctccgcgccctcacccacgacgttgaggagttctacgcgctgtgcgatccagagaaggagaacctgtgcctgtacggctacgcgaacgaagcgtgggaggtagcgctgccggcggaggaggtgcccacggagcttccggagccggcgctcgggatcaacttcgcattctactacgccgcgcggctcaaccgcagtgatcggaagcgtttgttcggcatgatgaatgatctgccaactgtttttgaagtcgtctccagtggtgtgaagcaatcaaaagagagggatagatccggtactgacaatggtggtagaaataaactgtcggtaaagcaaacaagcgagccacgattagaaaataacgccagggagcctgatgagggctacgatgaagatgacagcaaccacagcgaaaccttgtgcgggacatgtggtggaatatacagcgctgatgagttctggatcgggtgcgacgtgtgcgagaagtggtaccatggcaagtgcgtgaagatcacacctgcaaaggcggagagcataaagcagtacaagtgcccaagctgctgcaattcaaaaagacctaggccgatttaggcctatagcatcgccctcctcccgggaggacggccatggatggaagaagactggacaagcaggtcagagtttcctcttgcgcaaggtcaatgccgccttgcgatgtttactgtaccttttcgattaagcttacatatgacgaacgatgatgatgctaatgttagcagggaaagatcacacattaatttataatctttttgtggtttctccatgccgtggagagttatggtagtctgtatgttgccggagaaggaataggggcagaggaagcctttgtaatctttctataggtggaatgggcagcttatgccaagataataacaatccgtgatgttcatgttaatatattttatttgatacagggctgatggtttgcgtgagcaaccatgtgtgattacgtaagctaccgccgacccattttgtggaataacatacagatgcacttcgacaactagtcgtttctctagtttagaaacctaaaccctcaatggatccccaacatgtgcatttcttggtagaggtatattatggagggttcaaagtcttcctctgtcttttttagaccatgtcttgtgagaagatgtgttcttcaatttgattctgatatatagggacaagaatagagtcagt

SEQ ID NO: 52899 - DNA, 383 bp, Zea mays
  Clone ID: MRT4577_148242C.1
ccaggcggccgggaccacaacaacacccgcacacggcccgactctcctcctccgcccgcgtacctctcggcttcggcgctgcccgggcgcggcaagggcggcaaggggcatgggacaaggcgcgcgcgccacagccgccacacgcaaggcgcctgcgccgacaacatccagggaataacgaagccggcgatcagtaagctggacagaaggggtggagtcaagcgcatttctgggatcatctaagaggagaccacccgcgcgctcaacatcttcctcgagaacgccatccgcgacgccgccacctacaccgagcacgcccgccgcaagaccgtccccgccacggatgccgtctacgcgctccagtgccagagacgcacgctcta

SEQ ID NO: 52900 - DNA, 1177 bp, Zea mays
  Clone ID: MRT4577_148243C.1
ttgggtacctcgaggccggccggggttagattccattaacgtttcagcggtaaaagaacacgaacaaagcattaacaccggcgccaccgccagcacacaccagctcgccggagatcacaagaagatacaggaccgtgctcctcgacgccgcccgacatggcggacgccgcctctggccgcggccacgtcgtctaccctccccgctccgccgaggacatcttcaaggactaccgcgcccgccggtccgccatcctccgcgccctcactcacgaggtcgaggacttctacgcgcagtgcgatccagacaaggagaacctgtgcctgtacggctacgcgaacgaggcgtgggaggtggcgctgccggcagaggaggtgcccacggagctgccggagcctgcgctgggaatcaacttcgcgcgcgacggaatgaaccgccgcgactggcttgcgctcgtcgccgtccactccgactcgtggctcctctccgtcgccttttactatgccgctcggcttaatcgtaatgaccggaagcgcttatttggtatgattaatgaattgcaaactgtttttgaagttgtctccggtgcgagacaacaacaatctaaagagaggtccagtatggacaatggtggtagagccaagcctgtaaagatagaaaataatggaaaagtcacagacgaagcatacgaagatgacagtgatcacggtgaaaccctatgtggaacctgtggtgggatatacaacgcggatgagttttggatcgggtgtgacatgtgcgagcgatggtaccatggcaagtgtgtcaagataactcctgccaaggcagagagcataaagcattacaaatgcccgagctgcagctccaagagggcgaggcagtagcaaaacccatgaacgcaggaagcctccgaatgtgggatgtatggtgcagaagaggcgcattgcaaagtttgcaggcaggagaaggcccagagacctccatttacaagattagaactatattgctatcttccctgtgccttatgcttacttttttacatatgataagctgatgtgaggaaagataagacatttggcaaccagaggcacttagttaaatgccccttgatatacatgggggtaaaagaagaggaactcatgttttgtcgaatatatggaatctttttttcccctctta

SEQ ID NO: 52901 - DNA, 3005 bp, Zea mays
  Clone ID: MRT4577_148244C.1
gccccctctcgagtttttttttgtttatttttttttaaagacattttttttgcaaaaggcatcaggttctttgctacttccaacatattcttacaccaattcattacagtatattttaatacaattccaaaaaaaggtcagaaaacacacaatgaacaagttcatttttcacctgagctcctccatcttcagttctaggtcattcttcccctcatttttcacatcagctcatccatcttcagttctaggtcattcttcccctccaagcactaattctttggcaaggtctctcataagacttaatgctagtgtgttatgccatatgaaaagagtacgtgtatctggaaatgcgagcatcgttattcaattattctataaaatcaatacatcctgaagtcatatctaatatgtacacagtacatccaccaggtacattatgaacgtgcaaaaaaaaagggctatggactcatcccgtgttctatcctaactcctactggaactgtggacacaggccaaaagaatgtgatactatcacactatacgtaactcaatacatacaacgtaaaccaagtttaactaaaatctatcatatctgtcgatttggtttctgaaaagattgtcatggggagttgaggtgatcaaaggatcacgaggaacagcagagcagcggcgacgaggacgtttctgttgcaacgcagcttcggcgaaaaacttgcagaaggctgcaagacattgacttgggtgccattgggcgaggcgcccttggtagcttcaggagtgtagctgttaggtcccaaggcaggtttagggggaacaccagaaggatttgggttcactggaaggttgcttcttgagttgcccacgctgtaacaatcaaagtttttccagcccaagaccttcctctctcgatcaaacacgaccttcagcccagacataaaattctcccctattaagttaacaccttcgctcttcataacagccaagcaatatgccatcggattagatacagagtccgtaatggtaattattggatcattgacaggaaacacgcttccaccttccgccgtgaagcttatgttcggaggattggtagaagcctttggacttatagagtagcaaaattcaaagggcagagaagagtcaagctggcttggcttatcctggacttgtgagttgaagctgctagtgatttgagtgtacatcggatcagacagagctgtgaaagaggtgccagagtcaacaatagcgttgaacttggtgtgaatggatttactccccaccgtagcaccagtgatgcttatgttgtagtatggattttgtttatacatgtttaacggggtttcctgctgatctgagcttccagtgtccccaaaattgattctaccatggccatcttgtgcgaagcacatggagaaggaattggcagcagcaactccctgacttgctagcaaacgggggacccatatagtttccctgcgctggccaagtatactcttgggtgcagccgtgcccagtaacgatcctgtttcagtccgtccacagccgaacgttatgggggccgtaacgattttgggttgccgcccatactccgtgaccaggtacaggacatggtccaccaggtagcagggggttgatgacgtataacatggggccgggtggttgtgaatgcctggggtgctggcgggtgagggtcgctttgctgccccacgcgagaggcttatttttcttttattaaataaaatatattaacatgaacatcacggattattattatcttcgcataagctgcacattccacctatagaaagattacaaaggcttcctctgcccctattccttctccggcaacatacagactaccataactctccacggcatggagaaaccacaaaaagattataaattaatgtgtgatctttccctgctaacattagcatcatcatcgttcgtcatatgtaagcttaatcgaaaaggtacagtaaacatcgcaaggcggcattgaccttgcgcaagaggaaactctgacctgcttgtccagtcttcttccatccatggccgtcctcccgggaggagggcgatgctataggcctaaatcggcctaggtctttttgaattgcagcagcttgggcacttgtactgctttatgctctccgcctttgcaggtgtgatcttcacgcacttgccatggtaccacttctcgcacacgtcgcacccgatccagaactcatcagcgctgtatattccaccacatgtcccgcacaaggtttcgctgtggttgctgtcatcttcatcgtagccctcatcaggctccctggcgttattttctaatcgtggctcgcttgtttgctttaccgacagtttatttctaccaccattgtcagtaccggatctatccctctcttttgattgcttcacaccactggagacgacttcaaaaacagttggcagatcattcatcatgccgaacaaacgcttccgatcactgcggttgagccgcgcggcgtagtagaatgcgacggagacgagccacgagtcagagtgtacggcgacgagcgcgagccagtcgccacggttcatcccgtcgcgcgcgaagttgatcccgagcgccggctccggaagctccgtgggcacctcctccgccggcagcgctacctcccacgcttcgttcgcgtagccgtacaggcacaggttctccttctctggatcgcacagcgcgtagaactcctcaacgtcgtgggtgagggcgcggaggatggcggagcggcgggagcggtagtccttgtagatgtcctcgacggagcggggagcggagccgctcccggtgccggcgcggcggtaggaggcgtccatcgcccggcggcggtgcgcctgacctccggcgagagcgagacgcaggaggaaggctgggagggaaagagatgactgatcgcgatgcggcctggagccgagcgacgagacgacacgagccgcgagagggggcatgggacggggaggggtgccagtgc

SEQ ID NO: 52902 - DNA, 293 bp, Zea mays
  Clone ID: MRT4577_148245C.1
ttttcatagactacacgcccatcccgaagcatccaaaaagtagctagccgtctactgtaaacactcccaacatctccttcatgatgtgcatttttgagtaaactatgacggggaagactcataactatcgacgagatgacctcggatttgttggcgatgtggacggccttgttcatctgatcgaggacatccccgctgaccaggatcagcttgttttcgctgttaagctgctaaaggagggcggcttctactgcactactcttttaagactgaccctccctgggttacttcgg

SEQ ID NO: 52903 - DNA, 218 bp, Zea mays
  Clone ID: MRT4577_148246C.1
ataaggatgtttttaaggcttgggtcatgcctttgagaaagaaagaatatgcttctattttggcctttgattgtaaagtgatgcctgatgcccgggatcttccaaaaaagtcccggtgtgaggatctttggggcagatataaaataccatctggttgatcaatttacagaatacattaagtacctcaaggaataaaagaagaaagaaagcccctaaca

SEQ ID NO: 52904 - DNA, 680 bp, Zea mays
  unsure (1)..(680): unsure at all n locations
  Clone ID: MRT4577_148247C.1
cggggaagtagctgatggtgaacattgcgtgccatgccctctaaacaccattggccaccatgactcgcatgttggtgttgttcatcgtcgctagtccgatatgacacatgacctcaacattgatgaagttgtgggtcaagccaccatctaggagggcaaggagctgatgacatggatgtaggcgtggaggtgcatggtgtcctcaatgcatgccaacgatggcgtggagggagacgattgtggcgtcgggcctgtcctcaaggaccacctcactgcttgtgtcctcgggtgccttgtcaagcaggtagttggtgtcttcaagatagaacagatgttggtactggtggccccaccttacgattcatcacagttgtaacatagctcttgacgacaatgctcggtcatccggtcactgtaaggtggtagaactggcgcgagggagcaagttgggcggccattggaggtggtgcaggcagcacaggcacgtccatagccgcaatagttgcacattgtgggggttgttagcaccaatgacgggcgctgnggaggcagggagacccgcaacaccaaggctggcatggtggctgcggcgggcgctcataggctcatgctagagtgccaggtgcatggccatctgcaggtcttgggattgctagagttcgacattgacccgaatgagc

SEQ ID NO: 52905 - DNA, 1200 bp, Zea mays
  Clone ID: MRT4577_148248C.1
gcccgaagatcttgtcatcttccccttttgcccggcagcactcgtcctagtgtactatcatctcgtcgctcggctcccgaccgcatcgcgatcagtcatctcctgcgtctcgttctcgccggagatcagacgcgccaccgccgggcgatggatgcctcctaccgccgcgccggtgccggaagcggttctgctccccgctccgtcgaggacatctacaaggactaccgcgcccgccgctccgccgtcctccgcgccctcacccacgacgtcgaggagttctacgcgctgtgcgatccagagaaggagaacctgtgcctatacgggtacgcaaacgaagcgtgggaggtggcgctgccggcggaggaggtgcccacggagctgccggagcctgcgctcgggatcaacttcgcgcgcgacgggatgaaccgtcgcgactggctcgcgctcgtcgccgtccactccgactcgtggctcatatccgtcgcattctactacgccgcgcggctcaaccgaagtgatcggaagcgtttgtttggcatgatgaatgacctgccaactgtttttgaagtcgtctccggtggtgtgaagcaatctaaggaaagggacagatccggtactgacaacagtggtagaaataaactgtcagcaaagcaaacaagcgagccacggttagaaaataatgccagggagcctgacgagggctacgatgaagacgacggctaccacagcgaaaccttgtgcgggacatgtggtggaatatacagcgcagacgagttctggatcgggtgtgatgtgtgcgagaagtggtaccatggcaagtgcgtgaagataactcctgccaaggcagagagcataaagcagtacaaatgcccgagctgcagcttcaaagagggcgaggcagtagcaaaacccatgaacgcaggaagcctccgaatgtgggatgtatggtgcagaagaggcgcattgcaaagtttgcaggcaggagaaggccaagagacctccatttacaagattagaactatattgctatcttccctgtgccttatgcttactttttttacatatgataagctgatgtgaggaaagataagacatttggcaaccagaggcacttagttaaatgcccctagatatacatgggggtaaaagaagaggaactcatgttttgtcaaatatatggaactttttttcccctcttac

SEQ ID NO: 52906 - DNA, 1507 bp, Zea mays
  Clone ID: MRT4577_148249C.1
agccgccttactcccacgcagcacgtacggacgccatcgaggaaccctaacagagcacatcacacggggcgacggtttggcgccgcgccaccggcgactggcggctggtgccccctctcggtccccactccccagcacggtgacggcctgctgcagcagatggtaaattatttctcagactcagagtgcaagaaagttggttcgtccagggaagaggaatagaggttatggttttgtgtgagattgattagcatctaccttcaaatcattctcttggtatttattgagcactgcaagtggttgaggacttgaggtaaacatgctgaagtgcatcttgagtctgtcatggaagagaggagcacatatgctacatgcaggaaattcagcaccagctgtactaacttgctggagtcaatttcacagtgggcaggccttgttagtgtggtaccaacacagcagaaacaatcaagcaccagtaggatggggatgatcgctgctgtgccacctgaatatttgcatggatgtgtgcccttacagcacagcttcatgttgaggaacaatggacattgactgtataagcactactacaaagtcgtataagcactactacaaagtccgaacttcattcgtgctggcatattgttgggaatgtcgttgatattgccagcaacattgacagacccatcaactttgacatttgcctcaacggctgagtatgcagtttggctggctcctttctaggcctggttagctgtgacatggcaagcaggctgcagggtttgcctttattctggcacggtgaactctcgtggttcttcaatttgatggtctggagttcttccaggagcttcttcggcgtggaggacttcgtggacgaggacaacagtaggccatacacgtacaagaaggagaagaggtccaagaacccccacaagcacatctcgttcaagcagcgcaccatcgcccacatggagccgttcacgctggacgtgttcatctccaagcgcttcgtctcggcgtccctcacgcaccggtcgacctgcaggcaggtcgcggtcgccgggaccaactccaaggacatcaaggcggcgctcaggtcgaggtccgacgtgccggcctgcctggccgtcgggcggttcctggccgagagggcgaaggaggccgacgtgtacacctgcacgtacacgccgagggaacgggacaagttcgaggggaagatcagggcggttgttcagtcgctgatcgataacgggatcaatgtgaaactttaccttgactgagtttggtgctgtatgagtagtagttctgttggaacttgcgcgtgggtttatctgttgccagggttgcaggttcgaattatttttgtgtccttatgttgataaaaaaattaatttgctcaaatgaaggaaaacacatcattggatacccatcaggctgggcgccgcctccgtcggctgtgggagaacgccatcatcgctcaagcatacattcattgtataattgtccc

SEQ ID NO: 52907 - DNA, 379 bp, Zea mays
  unsure (1)..(379): unsure at all n locations
  Clone ID: MRT4577_14824C.1
ggagaaaaacaaagaggccggggaggcganggcccggccancgacagcgaacgcggaacgacggacccnagcgacagcgngaggcagcacgaccgcgacgagaacagggccaacgaccaggggaaccgcaccacgccctgtgtgggggggggcaccnactccaaccgcctaatacaaaattcanacaataaccacgtctccatgaaccccatcaacaccgtcatttgatgccaagcgtctcatcggcaggaggttcagtgatgcgtatgtccacagtgatatcaagttgtggccctacaaggtcatttctgggcctggtgagaaccaatgattgttggtcagcacaggggcgaggagaagcatactgcagatgaagaga

SEQ ID NO: 52908 - DNA, 190 bp, Zea mays
  Clone ID: MRT4577_148250C.1
gttcttgattgcgagcggccaggtcgggagtgatctatcagatcctgctaagataccactctttctgtatagcggggcgcttgagagctttgcgtaatcatggccaatgttgcacaacgactgaaactggaatccgctcacaccttcatacaacctacgagacgtggacatgatctgtagcgtcattcac

SEQ ID NO: 52909 - DNA, 661 bp, Zea mays
  Clone ID: MRT4577_148251C.1
ctttccgaaacgaaagagaatggagaacagggtaatattacaggaatggtttgaccgcgttgactcggagaaaagtggaagcataacagcggtacagctgaagactgctcttgctgtgggcaacctggaatttccgctctcagttgttcagcaaatgatcaggtgagctgaccctcggatccatcttcttcttctctattttaacttcaatttttgttttcccttaggatgtacgatttcgacaggaatggtactatgagctttcaagaatttgttgcactcaacaacttccttcttaaggttcaacatgcattttctgatctagagaggggtcgtggttttcttgtacctgatgatgtatttgaggctttgggaaaaattggtttcatgctggattctcctgctttttactctgtctgcgagagctttgatcaaagtaaaaatgggaggtttcggctggatgacttaatatcaatctgtatattcttacaatcagcacggaacctatttaattcatttgatacagctaaacaaggcagagttactctcgatctgaatcaatttgtctattgtactgccaattgcagaatatgattcaactatatgacggtttgagaaaatgattcacaaatactgcactttgtaataccataaagtcatc

SEQ ID NO: 52910 - DNA, 822 bp, Zea mays
  Clone ID: MRT4577_148252C.1
cattgggtacctcgaggcaggccggggctatttttccaagagttttgttcagcgtgtcatttttatttttgttgcgcaaatacataacatacaaccagcaaatccctaccaaggaccccaactacactttttttctgaaaaccaaagtatcacaccatggcggacacagtcgaggagagcaagcaatccatttctggagagggacaggctgatgccaatgcttctgtaggagcaaagggcagtgcggaatcatcgagtaagaaaaccgaaaggaagacgccgaagaagctgggcggaaagaagcctcaacagcagcccactcctgacgccactcctgcccctgatagcgatggcgaagggaacgctgagcaagaggacgcagaatcaaagaagcaaaccaacggcggcgacgccgacgactcggacgaaccccaacaagaaaagtcaaagtcgcaatcgaggcgccgccagtctcgaggccgcggacgacgaggcgtggaatctggcgccgagtctgatgcccgatcagatgtctcgcaatccggaggccgtcgtaaccgccagcgccagaagaagggcggaaagggaggcggcccactggacgacattaccgagaacgtgcctggaggcgagcttgttggcggagctggcgacatggtccaaaacactgcttggaaaggcccgttggctccgtcggcgatacagctggcaaaggctctcggtggcctgactggcggcggcaaagaaagatgacggcggcaaagacggcggtgagcagcttaagttgcgcctggaactcatctcgacattgagattcagctc

SEQ ID NO: 52911 - DNA, 516 bp, Zea mays
  Clone ID: MRT4577_148253C.1
ccgacgcgtgggccaaccaagcgatagcgctcagatgtgtgctggccgtaccagaggcccaagtttacgctcgcccacctgctggggctggcgccttttatcaggtgcacggagcccagacgcggtggcccaggcgcccgtagatcgcgggatactacgaacaccgtgccacggccggagttttgctcatttcacgagataccattatctccacgtgcggtcctaggtaacatggcgtccctggaatatacaatcaacaacagactgatgcatgatagaaagggggacgatgctgtgtatgccaagttaatatctttttctgtcaactataccatgaaggccaaccttataatcaacaatatcatgcggccgcttcttttccgttattctcatctgttaatccaatattatgaagattgatgatactgatgcctaaaggatcctatggctagtatgcaactacgaagcgcctaaccacatccgagatccagaaattggttaacaataacggcaaac

SEQ ID NO: 52912 - DNA, 279 bp, Zea mays
  unsure (1)..(279): unsure at all n locations
  Clone ID: MRT4577_148254C.1
gtagactcaggttattgggcctagcccattacacaanggtaaanatgtaattacaaggggctaaccccaaaaccctaaatgggtactctaacacccgcantctacaactctatactgtacaantgttgagactggatcgnanattggtgaatacactcgacggtagccccttggtgatgtcggcgaantgcaacacggtggggncnctganaacctgnntntcaccancaannacacgctcgtggnnnaagtgtaggncgctcnccacgtgcttcgtgg

SEQ ID NO: 52913 - DNA, 213 bp, Zea mays
  Clone ID: MRT4577_148255C.1
ttattccatgacgtacccatacagccacacccctacagcacctacatcaaacgatcgattctaccacacctctttcaaaacgctcctacaaatacatcaaacatggacatatgaactatatactcaacatcataaaccagatttactatctacacatgcgacatacattatactgacgcattatatacaaatttatcatccacactctatcga

SEQ ID NO: 52914 - DNA, 284 bp, Zea mays
  Clone ID: MRT4577_148256C.1
ctattctcttcttttctcttctcttctctcataggaccaggaagatctatctgctctgctctgctctgctttgctgctctgggcctctgccacgagcagagcactggtcctggtccaccactaatcactgaccgaccaaccgaacaatcgcgtgaattctccctcccgcctgtcgcgggggacgctcgtacgccagccacagccaggggacggtagagagagctagggtcatggcctacgctggcgaggtgtgttagggtttgccagatcatctttggtgtgag

SEQ ID NO: 52915 - DNA, 233 bp, Zea mays
  unsure (1)..(233): unsure at all n locations
  Clone ID: MRT4577_148257C.1
caaccaaaggccgnagcggccaaacccggcagcaacccaaaagaagagaccgagggggggggggngccgnnccagccggaacaagagccaccaccaaagaacggcgccccaacgccaaagggcgaaaaaccgcccacagggcgagggcccaccaccggaaccaccaccccaagcaacgcccccggcgccggggcgccgcaaagcaccaaagcggaaccccaaaggcagccccc

SEQ ID NO: 52916 - DNA, 217 bp, Zea mays
  Clone ID: MRT4577_148258C.1
tttcctaacacgcgccggcggaccccaagggggagggacagacacacagccagaggcaccacacagagaggcgaccaaaaccaacccaccacaaagacacaggccgagcgggccaaccacaggaagaggcagaggaaacgaccaacacggcacgcaccaaaccggacagaaccaaccccagaaccgcacaggaacaaccgcacaagcaaaagcccca

SEQ ID NO: 52917 - DNA, 483 bp, Zea mays
  Clone ID: MRT4577_148259C.1
ggaccaacaaccatttggtgggcgagccatcatgatccattaattggacatttacagaacctggcatgtaaaacaaatataggaatagcatgggttttcaaggatcagttctaatgggaatgggggttacattcagtctgggggatactggctgaaacataaatgggcctgcaaaaaacaggcttgcagggaactttaatcaaaatctgaacttctcatgaaaaactgccagtactttagggtagtagcatgaaccacataagggggtttatcaaaaaagttgaaaaataaggaaatcatgggacccctaggctttaatgggcttttactacagttcaaccggaaaggccttattttctctatttttttataaaaaggaggaaaaaaccggagcaagggctgttgagccatcattaaaaacaacctctgataaaaatcatcatctccaaaagcagaaggaaaaatcttttgacttgatttttt

SEQ ID NO: 52918 - DNA, 323 bp, Zea mays
  Clone ID: MRT4577_14825C.1
cccacccgacccacgcgtacccagaccattaccactaatattacacattcacaacaacccaaccgccacggggagggggatgttattcgccctcgctctcctggctctcgctgcgagcgccacctacacgcatacaaacgcacaatgctgatgtcatccatagtcgacgattcatctaccgccgccaccacatatgtcaactgcgcttcaaacaccaacttcggcgcatctataacctacaacacacctgtccgcgtagcgccatataacaacgaatttccatatgccgacaacgattcatgtcacatcgaaaacatgacact

SEQ ID NO: 52919 - DNA, 500 bp, Zea mays
  Clone ID: MRT4577_148260C.1
ttttttttttttttttttttttttttttttttttttttttttttttttttttttttttttttttttttttttttttttttttttttttaaaggggaaaacatggggcccgaaggaacccctataaaacaattggcccccccaacggggggggggaaacatgtttccaaagggggcccctaggagaaaaagcaactctttactagcagcatttttgcccaaataccgggggggggcaaaagtctaatttaagggggcccatacaatacccaaaggggaaccccctcatacatccatgggcccttacccctacaaaaccaatccatgatcatttggtcggcaacaaaatcccccccgggaaaaaagccgaacccttggttggggccggcttcaaattgagaatggaagccctgaccttgtttatccccacattcccaaaagggggcccagttctacccccctgaaaacgaggcccatgggcgggaaatatggccctcattgg

SEQ ID NO: 52920 - DNA, 884 bp, Zea mays
  Clone ID: MRT4577_148261C.1
cattgggtacctcgaggccggccgggattactgacaggcgccagagagagagacacaccacaactccacaagggcaagggaggcgcgctcctctcgcctcgcctcgcctcccccggggaagaagaggaggagagggagctgagcagcaaccggccgacgcgggaatgctcgtcggcggcgggcgggacgacgaggaggtgctccggaagctcaagagcatggacgtggacaagctggagaacggcggcggcggcggcgacgcggagagcccgcgccccgccgtcaagtaccacggctggaaggccatgcccttcatcatcgggaacgagacgttcgagaagctggggacgctgggcacgtcggccaacctgctggtgtacctgacgcaggtgttccacatgcggagcgtggacgcggccacgctgctcaacgggctcaacggcaccaccagcctcgcccccatcgtcggcgccttcctctccgacgcctacctcggccgctacctcgcgctcgccatcgcctccatcgcctccctcatcggcatgttcctgctgacgcttacggccggcgcggacagccttcacccgccggagtgcgccgtgggggagacctgcgagaaggcgacgtcgtaccagttcgcggtgctcttcgtcgccttcgcgttcctggtgctgggctcggcggggatccgcccctgcagcatgcccttcggcgccgaccagttcgacccccacacggagtccggcaagcgcggcatcaacagcttcttcaactggtactacttcacgttcacggcggccatgatgatctccgccaccgtcatcatctacgtgcagagcagcgtgagctggcccatcgggctgggcatccccacggcgctcatg

SEQ ID NO: 52921 - DNA, 341 bp, Zea mays
  Clone ID: MRT4577_148262C.1
gtggtattcctgtacccaatacccaagagacaagcggttaacttttaaatttagcacgaccttttctaaaatacatggccgccatgtatactaggaacggactctctgaattcagaggctggactcttgctattatgggtattgggtacagggattccgcgagggctctcattttatgggatccaagattaccttcgcgttcatgcgacgtgatttgtagccttggagagacctaatagcaaccaagggccggccgttgtacacgacttgactaagaaaacgcttgcgttacctaacttaatcccctcttaccacatgcccctttactcagctgacataat

SEQ ID NO: 52922 - DNA, 887 bp, Zea mays
  Clone ID: MRT4577_148263C.1
cggggtcgttgtagtatagtggtgagcgttcactactgacaggcgccagagagagagagacacacaccacaactccacaagggcaagggaggcgcgctcctctcgcctcgcctcgcctcgcctcccccggggaagaagaggaggagagggagctgagcagcagccggccgacgcgggaatgctcgtcggcggcgggcgggacgacgaggaggtgctccggaagctcaagagcatggacgtggacaagctggagaacggcggcggcggcggtgaggcggagagcccgcgccccgccgtcaagtaccacggctggaaggccatgcccttcatcatcgggaacgagacgttcgagaagctgggcacgctgggcacgtcggccaacctgctggtgtacctgacgcaggtgttccacatgcggagcgtggacgcggccacgctgctcaacgggctcaacggcaccaccagcctcgcccccatcgtcggcgccttcctctccgacgcctacctcggccgctacctcgcgctcgccatcgcctccatagcctccctcatcggcatgttcctgctgacgcttacggccggcgcggacagccttcacccgccggagtgcagcgtgggggagacctgcgagaaggcaacgtcgtaccagttcgcggtgctcttcgtcgccttcgcgttcctggtgctgggctcggcggggatccgcccctgcagcatgcccttcggcgccgaccagttcgacccccacacggagtccggcaagcgcggcatcaacagcttcttcaactggtactacttcacgttcacggcggccatgatgatctccgccaccgtcatcatctacgtgcagagcaacgtgagctgggccatcgggctgggcatcccca

SEQ ID NO: 52923 - DNA, 558 bp, Zea mays
  Clone ID: MRT4577_148264C.1
gtaccggcgcccctcctcgagttttttttttttttttttttttttttttttttttttttttttttttttttttttttttttttttttttttttttttttttttggggagaattaagggttttcttcccctttaaaacctaaaacttttaaataccgggggccacaagctaaaaccgaaaccctttgggaccaacaaaaataatccctttgggagaagggaaaacgggccccccgaataccccgcccccgttaagaggggggcccccagggggaaccccttcccccccttttcccaaagggggggagcccccccccgggggggggctccctttggggttacccccagggctcatcaaggagggggggggagacccctccccccagggtttgggggccccccgggaaaacggccctttaagggaccttcccaaggggggaaacgggcgtccccccagcccagggcccggttttggggaaaagcccccgggaaaccccccggcaaacccaaccgtgggtggaatggacccgggcgggtctttaaaaaagagccctccccca

SEQ ID NO: 52924 - DNA, 257 bp, Zea mays
  Clone ID: MRT4577_148265C.1
ccggccgggggggcgatgtggggcctagcgtcctatggcgtggttggttctagaggagcatgggcgatgagattggttgattgtatacttgtttggatctagtttgacaaatgcgaaatatacgaaaaatatatatatgttgttgtaacttctagcaataaatctgtgttcttctattctcataaacaatgtagcgaaacatatctatctatctatctaattaattaatgatcaaaaaaaaaaaaaaaaaagcggcc

SEQ ID NO: 52925 - DNA, 487 bp, Zea mays
  Clone ID: MRT4577_148266C.1
acgattgtgtacctcgaggccggccgggacctgctccaatccaagcaagcccggacgacacgatttcaagtcgaggagctcgagagggcaccaataatggccggcgtgaactccagcgtctgcgggctcaagcccgccgcggcagtgccgcaggtcgccaccgcctcatcgccggtgaagcggctgcagctggacgcacccgaagtgcgccgtgccactctgctctcactggagcaagtcatccggtcttgtgcaccagcgctcaaggcgaccagatcatctctcctcacagcgtctatgagctctcgagcagataagaaacctatgccgacaccatcgtcgaggtgcccgaaatgcccgagttcatcagcgaaggaccctctccagcaatggtcaaaacaggctggcgactttgttgagcaagacgaagaaatcgcaaccattgagactgacaagattgacggtgctgctaatgcgcccgaggccg

SEQ ID NO: 52926 - DNA, 540 bp, Zea mays
  Clone ID: MRT4577_148267C.1
gcgtggccaggctcgtggacgcgtacctggccgaggccgcgctggaggccggcctgcgccccgccgagttcgaggagctcgcgcgcgccgtgcccgcccacgcgcgccccgccgacgacgcgctgtaccgcgccgtcgacacctacctcaaggcgcacccaagcaccgcgaaggaggagcgcaagtcgttggcgcggctgatcgacgcgcgcaagctcacggcggaggccgcggcgcacgccgtgcagaacgagcgcatgccggtgcgcgctgtggtgcaggtgctcttctcggagcacggcaagctcaaccgcctcgccgagctgagcgcctccttcagcggccagcgcagccccagccccaacccagcgctggagctccccggccgctgcccctccaagcgcgaggtcctcgcgcagcaccaggaggtgcgccgcctccgcgacgacgtcgccaggctccaggtgcagtgcaacgcgctgcaggcccaggtggacaggctgggctccgagaggcggcggcgtggcggcggtggcggct

SEQ ID NO: 52927 - DNA, 348 bp, Zea mays
  Clone ID: MRT4577_148268C.1
aaaccgagctcatcccgagccatccgtctcgctaaggattctccgacgccgctactacgtggatgcctcaccggaggtcatgaacgactgccgcagtcccacttcagcgtgctgcgccactgaggagatcgatacagacatcacgcgacgatcctcctcgaggtcctgtacgagatgatggaggctccacgtgtggaggaattgcatctacgattgatcatcgtaccgcgtttgacatagatagaggcaagggaaataggcctgttcatgctgtcggaggtcgggggactagttagaatggtagtggtggatcagaagctggtgctgcagtgactgctgatcgaatgc

SEQ ID NO: 52928 - DNA, 736 bp, Zea mays
  unsure (1)..(736): unsure at all n locations
  Clone ID: MRT4577_148269C.1
cggtttgtcatttctaaaagattttatatacaattcgttgagaaggcattctagaaacactagtgcttccaaaattgcaagcaaatcttcctttggtggtagtgcccctttgaagaatggtgaatttcagaagatgttggaaatggaatcacagaaaactatagtggtaaattgccctgatgtgagcacccctgtagtggaagagacaaaaccactcatatgcggaatcactgaaatggatgatggccttttcaaggacaagcaactttccactaaggagattgcaacgtatggattgtatctttgccccttatggtttgtgacagaggtaaactttgcatgttaatttgtaattcctggggactagaaatgttcatctgaataacatttgtttctcaaaaactactgacatatgttcctgaaagcctagatttcaatcataaaagcaatactttgatagttaaaggtaactcatttttctcttatgctgaatgaatgcagtatttatcgaatgcagcgcttgcaagaactagtgttgccagtaccacagtgctgtcttcaacttcaggactcttcactcttttcattggtgttntacttggccaagactccataaatgctgcgaaaattattgctgttttcattagcatggctggcgttgtaatgacaactgtgggccagacttgggcatctgatgaatcagaagcagggcaatctggttttacacagaggactc

SEQ ID NO: 52929 - DNA, 469 bp, Zea mays
  Clone ID: MRT4577_14826C.1
ggggggggggtttttttttaaaatattttttttttttttttattttttttttctttttatttttttttttttttttcatttctttttttttttttagacaaaaaacccccccctagattcattaaaaccaaaactttattaaacccccccgtggggggtgggggaacccacacaaaaaaataggcgccccctccccgccttattccaaaaatagaaaaaaaaaaatggataaagaaaattccccaaaaatcaaaaatcaatacaaagccggaaatggcaccccaaaccccacaagggttggccccgtagcctgccccctcggtcccggtaaaacccacccatggcccccattttctcccccaacatcatggccaagaggtaaaaaccctcggctcccaacaacttttacttcctctaaaaaaaaactgtctccaacaagcttcttttgggggcaaccccacccccaaac

SEQ ID NO: 52930 - DNA, 1914 bp, Zea mays
  Clone ID: MRT4577_148270C.1
gcccgaccgcccccaccccaccccgcccacgcctccctccctcccgccgggacaaaaccgccgctcctcctcctccgcccctccccgctctttctgtgaggcgggaagcgaggcggatgccgaggcgacggggctcgcgcaccgcacgcgtgtgcccgccgcccgggggccaggcgaggtggtgaggtgaggccgagcgcggttttaaattgttcacccggccgcccttctcgccgtagttttcagtggtacaagcaagggaggaacgaacgtgagggctgcctgcctgcctgcggacatgggctccagcctcaagtaccgatctggcctgtgcctcatcgtcgccgtcgtgctgatctgggtcatctctgccgaggtcacgcaggggatattcacaaagtacagacatccatttgcagttacttacttgggggcctcccttatggtcatatacctccctttgtcatttctaaaagattttatatacaattcgttgagaaggcattctagaaacactagtgcttccaaaattgcaagcaaatcttcctttggtggtagtgcccctttgaagaatggtgaatttcagaagatgttggaaatggaatcacagaaaactatagtggtaaattgccctgatgtgagcatccctgtagtggaagagacaaaaccactcatatgcggaatcactgaaatggatgatggccttttcaaggacaagcaactttccactaaggagattgcaacgtatggattgtatctttgccccttatggtttgtgacagagtatttatcgaatgcagcgcttgcaagaactagtgttgccagtaccacagtgctgtcttcaacttcaggactcttcactcttttcattggtgttttacttggccaagactccataaatgctgcgaaaattattgctgttttcattagcatggctggcgttgtaatgacaactgtgggccagacttgggcatctgatgaatcagaagcaggcaaatctggttttacacagaggactcttctaggtgatatgtttggtcttatgtcagcaatcgcctatggtctatttactgtgctgcttaaaaaattttgtggagaggaaggagaaaaggttgatgtccaaaaactgtttggttatcttgggctttttacccttgttgctctatggtggattgtctggccattaaccgcactaggcgttgagccaaagttttcaatgccccactcagctaaagtggatgaagtggtggtggcaaatagcctaatcggaagtgtattatcagactacttctgggctctttctgttgtttggactactcccttggtggccactctaggcatgtctctcacaattccaatagcaatggttgctgatatgatcattcacggccgtcactattcagcagtatatattcttggttctgtccaggtattttcaggctttgttatcgcgaaccttgcagatcgcttttctcgttctctagggctatcatagtctcataaaacagaacaggcccttattagagcgtgcatcaggaagctccaaggtcgggttggttaggccaatacttcagaaaacctggatcgggagataccaggaattattttccctttgcttctttaaacatagtggaggtgaattttgccgtggtgaatagtgaaaggcagcagatgaagaagaaaacatatgttatagcaaccctttgcaactgtaaattctcttactacaaattgcgcgacagtgtagactgcggccgttctcggcccatgtcaacaggcttgctcgatttcaaaaaaaaaaaaaaaaggggcggccttatttaaaaaaaaaaaaaaaaaaaaaaaaaaaaaaaaaaaaaaaaaaaaaaaaaaagaaagagaaacaaaaaaaagaagagaaaaaagaaaaaagaa

SEQ ID NO: 52931 - DNA, 731 bp, Zea mays
  Clone ID: MRT4577_148271C.1
ggagcgtatacaagatggattactaaggcatcctgcagattcacctctctggaaggattttgaccaaaagcacccagtgtttgcttctgatagtcgcaacattagacttgctttagctacagatggttttaatccgtttaggtccatgaatgttagctatagcatttggcctgttattctcatcccatataactttgcaccatggttgtgtatgaagcaaacaaatttcataatctcattgctgattccaggccgtagatctcctggtagtgatatagatatttattttcagccactaattgatgatctgctagatatgtttgttgaaggggtaagaacttatgattcttcaaagcatgagtattttcaattgtgtgctgcaataatatggaccatatctgattatccaggcctagggtacattgcagcatgtagtacatcaggtgacgtagcatgtattgaatgccactcatatacatgttctctacgattgaaacaaggtacaaaaaattgttatatgggacaccgtagattcttgggcccaaaccatccatatagatttgatctagattcgtttgatggtaaagttgaggataagccagcgcctagaccactttctggagaggaaattttattgcaaacagagaatatgcacacagtgcatgggaaaggttgccaaaaaaaaaaaaaaaaaaaaaaaaaaaaaagtactctgcgttgttaccactgct

SEQ ID NO: 52932 - DNA, 352 bp, Zea mays
  Clone ID: MRT4577_148272C.1
ccggccgggaacgctttccatctcatcatgagttgcctaagcaatcccgtgccgcagcgtcgagttgccttagaacgacctctctgggacgagatggttacgcttagggggcatgggcggaacactacgaccggtgagagcaaccaggacaaagttgcgagtgaagatcaatgttcggcgccgatgagctgcgcgaatcctcgactacgtgcactccctgatgattcagatctgatatgaggatagacatttgacccaacatggaacacagctgcggagcgcccgacgagatctgcccacctctgtcagcagcaccacacaaacaaatttttttttttttccaccccccccc

SEQ ID NO: 52933 - DNA, 942 bp, Zea mays
  Clone ID: MRT4577_148273C.1
cctaggctcctagcaagtgaactccccagagtgaaaaagctaggaatttggatgtgatattaactctcttggatttggtgcaaatatatcgtcgatctgtccaagaaggaaccatgacgatcgtagagatgcatgtgagcatcgactgcgacggctgcgaggacaacgtcaggaaggccctggaaaagctcaaaggagtgcaccacgtaagcatcgacaggatgcacggcaaggtgacggtcactgggtcggtgagccagaggaaggcgctccgcgcggcgcggcgcacgggcaagctcgccgtgctgtggccgtccgcctacaacaacccgtcgtaccaccaagcccacgcgatgccggcctattaccagtaccagtaccagtaccaggccaataagcccgcgcaagcgcagcagcaccagtactacagcagcgtccagcgcgcaggcaaaaacagcggcggcggcggcggctcggcggtggctacgaagccggcggggcagtacccccaatccaaggccagctcctacaactatcgtgtccacgggtactatgactccgagctgtacgggaactaccacgaccacgagcagcccggcgacgtagtgccagccaccgtgaggtcctacttcagcgacgagaacccgagtgcttgctcgatcatgtagtcatcatcgatccttccatgagatcggtacggcgtggtcgttcgggtgtatgattgatcatcggcctcgcttgtgtccgggtttatgtttcccttaattcatcctgtatgtataaatgcacaatacaatactgtattgtttgtacagcgctgtacagtagtgtaaatttgtgacgtggcaggcagttgccgttcaaaaattaggcactttctgtattaaattccgaatataaatcattatcaataataaataatctaggtgtctgtttcaccat

SEQ ID NO: 52934 - DNA, 450 bp, Zea mays
  Clone ID: MRT4577_148274C.1
gggcaaaaatcagggccctgggggtagggaagaccggttgaaaaaaaaaccacgggttcccttcctttattattggcaaaagaaaaaaaccaagagggccctcagttgaaacggtgggggggtttttccccattttaaaattggggggcgaccccacagaatttttttttaacaaaacacagaagggttttgacatcttcccgaaaaaccccccttcaaaacggtaaatagggtggttaaaagacccccggcccaaaggggggaaggttccttttccaagccccaggtaacattgggtttttctttaaaaaccctagcaccaactttgggggtgggcgcgagggaccccctaagaggggggaatttttaaacccaaggcgggatttggtttctctggaagaaaaaccccccttttgtttttggggggacccggaataaaagggggatatc

SEQ ID NO: 52935 - DNA, 670 bp, Zea mays
  Clone ID: MRT4577_148275C.1
cttgaggatggagaagatacggttcttgtagttggtggcacaggatacatcggcaggaggattgtgcgggcgagcctagcccatggccaccggacctttatcctgatgcggccggagatcggcctcgacatcgataagctccagctgctgctgtcgttcaaagcgcatggagcgctcctcgtcgaggcgtcgatggaggaccaccggagcctcgtcgccgccgtgaagcaggtggacgtggtggtgtcggccatctccgggcgtcacttcctgctgcagctcaagctagtggaggccatcaaagaagctggaaatatcaagcgtttcctaccatctgaattcggcatcgacccagcaaggatggggcacgctctagaaccaggaaggatcacatttgacgagaagatggagataagaagggcaatagaagaagcaaacatcccacacacctatgtttccgctaactgctttgctgctttctttgttcctaacctctctcaaatgcgcacccttctcccgcccaagaagaaagttcacgtgtacggagatggcaaagtcaaagtgatattcatggacgaagatgacgtcgcaacatacaccatcaagtccattgatgatcctagggccttgaacaagacaatatacctaaggccgccggaaaacatcctta

SEQ ID NO: 52936 - DNA, 543 bp, Zea mays
  Clone ID: MRT4577_148276C.1
ctcgaggccggccgggtcctagattaaattgattatcgtcatgatggtgtactgttcaagcttttattaacgacttttaatttacttgctacgtacagcacgtacgtcctacgagaaaaaaaaaaaaaaaaaaaaaaaaaaaaaaaaaaaaaaaaaaaaaaaaaaaaaaaaaaaaaaaaaaaaaaaaaaaaaaaaaaaaaaaaaatttcattccggcccggtcccgcgggaaaggggaagggagggacccccgaacaaagaaaaacgggttgcccccaagttagggccaagggcaaggggggggggaatgctcggggcccgggcccgggggttaatcggggggggggaaagcgggggtgttttggggccccaaaagggaaggggggcgaatttgggggggggccccccggggatcttaagggggcccccgcccacggggtggggttgttccaacctgggggggaaggagccgggtttttgccagaacgggggaaacccggggaaaagaagttaattaaaaagccccaaggcccgcggaaggtt

SEQ ID NO: 52937 - DNA, 690 bp, Zea mays
  unsure (1)..(690): unsure at all n locations
  Clone ID: MRT4577_148277C.1
gttccaattccccacacgaagcncaattctggataaaagctcctcgcgttcgcctcttccctacgccgccgcctccctcacttctccacaaaatcgccacctcttcccagtcccaggaccaggagacggacggcgagcagcgacgttcggtcctccagctcggacgacgagcagcgacgctcggcgctttcgcatggacgacgaacaggggagcagcaacgctcggtcctccagctcggagtccgatccgagttgggcgtttcggtctccggcggctgtcgcagcaaggaaagctcggggaggtcgtcgtcgtgctgcccgcaaggctccccgcaaccccatccgccaccacatcctctactacccatacatcagaaaggggcaacgccgaggtgcgaagctttgggatcccgacgaggtggatctgtctgataatactgtggttgaagaagagaaggcagatgggggtcaggttggggtcaaagaagagggtggtcgcgcggcagcaagtgaagatgtggttcaaccggcgtccaagcaaggggagaagaaagcagatgcggaggaacaaggggatccagccgcgtccagcgaagaaagtgatgaagcgacatcaaaggagaacaagcaatcatgttggggatggtgataggagacagctaatctatcccaactgtcgctaatttctgg

SEQ ID NO: 52938 - DNA, 780 bp, Zea mays
  Clone ID: MRT4577_148278C.1
gccgggagtttaagactaattattcaaggacatcctcacataaacttaaattattagacgccaatatcgaattataatcacgatgggacgatgtagttctagtagatgaacgggaaggagtaaatagaaagctagagttatggcgtgagacactggagtcaaaatgatttagaattagcagtaccataaccgagtatatgagatatgactttggtactacaattagtgaggatggagatgtaagtttgggaggccaggtagtaccaaagaaggacaccttccgttatttgggatcgatgctacagagagatggtgatattgatgaagatgttagccatagaatcaaagcggggtggatgaaatggcgtcaagttctataggacacgatcaggcctgctatgttatatggggctgagtgttgacctactaagagcaacaactaagtgtccagagatgtgtatgttgcgttggatatatgggcgcacaagattggaccgagtgagaaacgatggcatacgcgatcggctaggagtagcgccaattgaagaaaaacttattcaacaccggttgagatagtttgggcatgtccaccggagacccccagaggcgccggcgcatagaggcatcataagacgggacaataatgtgaagagaggtagaggtcgaccaaacttgacatgggaggaggcaataaaaagggacttgaaggaatggaatatccaatgggagttgtgtttgattagaagtgcttcgaaagagttattcacgtgccgaaccatg

SEQ ID NO: 52939 - DNA, 174 bp, Zea mays
  Clone ID: MRT4577_148279C.1
cgcgggagtaaactaggatcctcctagatctggtcggccgggtgttttttttttttttttttttaatatttaacactcttaaattattaaaatagggataactgtgtctcctttttgcctcgaaaaaaccaggagttgaggagaaacacccggtcgcccggatctacctgaaac

SEQ ID NO: 52940 - DNA, 590 bp, Zea mays
  Clone ID: MRT4577_14827C.1
ctctccacccttcccacccccatccggcggcggcgccccaactccgtcaaccaccgcctggctctgccgaccagcgtcctcccccctccggtggatcggcggcgagctttctgaagccaatatgctgttcttctcctacttcaaggagctcgtcgggaaggaggttacggtcgagctcaagaacgacctggccatccgcggcacgctccactcggtggatcagtacctcaacatcaagctcgagaacactcgggtcgtcgaccaggacaagtatcctcacatgctatcggtgcggaactgcttcatcaggggatctgtggtgcgttacgtcctgcttccgcaggacggggttgacatcgacatcctccatgacgccaccaggagggaggcacggggcggctgattgatatagtttattcccttttctcggccgtgagataattctaatctgatttgtggaactggaacatgtatggactgacatcggcattgcttaactccgctcgtggtacacttgcagtgcaaattatccaatgttacatatgtcaatgtgctattatcaaagagcaacaaccaagcattgccatgcg

SEQ ID NO: 52941 - DNA, 1705 bp, Zea mays
  unsure (1)..(1705): unsure at all n locations
  Clone ID: MRT4577_148280C.1
ccgggaaaaaaaaaattccttatctaaatttcgtcataggctctacgccgcttctagcgccccgatacgcggcgccggcgcaggcgtgcagccatggcgatgagctggatccgatcggttgttaggagggccctcatcgctccgaagccgcggggctcccgccagtttactgtcaccgccgccggcggcggcgcgacgcagaccgaaagggtggcggcggagatggtccgctacgccctcggcggcgccgtgcaccggagctcgccagaggaggcgatgcggatactggagcaaggcgcctcgaacctgcagggaggaggcgagggcagtgccgaagctgttgggttgctcatgctcgctatgtccacgctgctttaccggagtggaagacgtcaagacgcagtggaaaagctcaaagcaacccaacaagttgccccttctgcagtttttagagttgcagcgtgggaagcactaatgggattacacatggaggcagggcaggagatgtcatacttgatttccccaaatgattcagttgatctgtcaatcaaatatgatagcaaatggtctgatcaggaccatcttaaatttcgggttaatgctgtcagaggacttgttacacttctgaatggagaaacagaatcagctgcccagctgttcgatggttggtgcagagacttttctagaggcgaaaaccaaacagaaaatgctgccgtttcatacggtgaatatttgcattgtgttggggattttcaaatggcagcacaagtgtatgagaaaattctcgaggcattttgcatggatgatatgtctggaaaccttttagcagctggaaacatggttcccgaggaggcttctcttggggccacttgctcatatggccagcttttatctcactctgggaagtttgctgaggcagaggattatctcacaagagctctacagaaggctgaagaacaatttggtgcaaaccacccaaaggtcggcattatattgacctgtgtagctagaatgtacaaactaaaggcaaaatctgaaggttctacttcaattatggtccaggaggggctgtacaggaaggccctagaagtattgaaagcccctgctattaattctgagggtaccagcaaacaggttgactggagagatatcatctccctcgctagaggtgagtacgcggagctgttattaattcagtctaataggaaggcggaaggtgaacggatgaagcagtgggcagaagatgcttggaggaaccgtaggctaacgctagcacaagctctagagttttcagaaccttcaaagccgactgtcgttgttgacacccgaatcggcagggtcgtgtagcttcagtcaacaatctcgtgagatgcacaaatgaagcaatccgtggatgcacctcgtgtcgtgtatattttcgaaagtgttgctccttgcgggctgcatccggtttgatccgttcaagtcccagcacactcgcctgcttgtttttcatatcacctttttgaatagggggacattcgaggatcacaaagcttgtgcatgtgatcactttaaacatttaatagcatatgtatatgttattgtacacagaataacaccacttaaagcatctttacattttgattgctatatacatgaagctcttatattttttaaaaaaaaaaanaaaaaaaaaaaaannnaaaannnnngggggcggccg

SEQ ID NO: 52942 - DNA, 198 bp, Zea mays
  Clone ID: MRT4577_148281C.1
catactcctgacacattcattccttatcaaattaaaggcccactaaatacttaaattgggagggatacaccctgtgaaggatagactcttaacttttgcaatcaactcttctattttgaccatgagagttatattctttctgattaaataaatccccaattccttgctcataaatagaccttctaaacgtacattaag

SEQ ID NO: 52943 - DNA, 1794 bp, Zea mays
  Clone ID: MRT4577_148282C.1
ccgcttctagcgccccgatacgcggcgccggcgcaggcgtgcagccatggcgatgagctggatccgatcggttgttaggagggccctcatcgctccgaagccgcggggctcccgccagtttactgtcaccgccgccggcggcggcgcgacgcagaccgaaagggtggcggcggagatggtccgctacgccctcggcggcgccgtgcaccggagctcgccagaggaggcgatgcggatactggagcaaggcgcctcgaacctgcagggaggaggcgagggcagtgccgaagctgttgggttgctcatgctcgctatgtccacgctgctttaccggagtggaagacgtcaagacgcagtggaaaagctcaaagcaacccaacaagttgccccttctgcagtttttagagttgcagcgtgggaagcactaatgggattacacatggaggcagggcaggtttggtactagaagctcatttagtctccagtgtcattatgtgaagttttatggtattttgaatacaggagatgtcatacttgatttccccaaatgattcagttgatctgtcaatcaaatatgatagcaaatggtctgatcaggaccatcttaaatttcgggttaatgctgtcagaggacttgttacacttctgaatggagaaacagaatcaggtttttttttaatgtcatgaatattgtcgttagatcaaactacaaaatttggcttacatttgctctttatcagctgcccagctgttcgatggttggtgcagagacttttctagaggcgaaaaccaaacagaaaatgctgccgtttcatacggtgaatatttgcattgtgttggggattttcaaatggcagcacaagtgtatgagaaaattctcgaggcattttgcatggatgatatgtctggaaaccttttagcagctggaaacatggttcccgaggaggcttctcttggggccacttgctcatatggccagcttttatctcactctgggaagtttgctgaggcagaggattatctcacaagagctctacagaaggctgaagaacaatttggtgcaaaccacccaaaggtcggcattatattgacctgtgtagctagaatgtacaaactaaaggcaaaatctgaaggttctacttcaattatggtccaggaggggctgtacaggaaggccctagaagtattgaaagcccctgctattaattctgagggtaaaaacaacgatctcctatcaatgataaggttcctcttgatatgttgatattatttttattctgtaggtaccagcaaacaggttgactggagagatatcatctccctcgctagaggtgagtacgcggagctgttattaattcagtctaataggaaggcggaaggtgaacggatgaagcagtgggcagaagatgcttggaggaaccgtaggctaacgctagcacaagctctagagttttcagaaccttcaaagccgactgtcgttgttgacacccgaatcggcagggtcgtgtagcttcagtcaacaatctcgtgagatgcacaaatgaagcaatccgtggatgcacctcgtgtcgtgtatattttcgaaagtgttgctccttgcgggctgcatccggtttgatccgttcaagtcccagcacactcgcctgcttgtttttcatatcacctttttgaatagggggacattcgaggatcacaaagcttgtgcatgtgatcactttaaacatttaatagcatatgtatatgttattgtacacagaataacaccacttaaagcatctttacattttgattgct

SEQ ID NO: 52944 - DNA, 279 bp, Zea mays
  Clone ID: MRT4577_148283C.1
attggggggcttttataattttaggggttcccaaaaacctaacaatagttaaggggggccttaaacacatttacacgaattagacttcgcccacaagcaccacttgacggccaaaaaaccttaaaagggggccccatcccaaggacctttgggcgggtttccaatgaaatgggtgaatggtacgccccccgagggaatgaaacaaggtaaagccaactgctcttaaaaggggccggggcacccccaaaatttggagggttttatcgaggcggagggcca

SEQ ID NO: 52945 - DNA, 606 bp, Zea mays
  Clone ID: MRT4577_148284C.1
aatctgatccctctattccaaataagcctaatctagtctgctgctctgagctgaggcagccaaaaccatggttttggccttctgcttctggggatggaagagatagttctccgccctttcctcctctcttcttccggatccactatttttgccttcttttgcgcgcgcaggcagccaagttcttcttcggaagttcatgctttcccttcttctttctatcttcgcatgcagatgcaggcctgttcctgaatctttgaagggacaagggagtcgtctgcaatatctgaccatgcatgaagccaggggccagggatgagaagaaagaagctacaagtaaacagctgtttcaatccttgcacaactatacacttgaatactgctcgcgaatatgttttgcatagtacttactagtaaatatagctagggttttgtgccagtgactggtgatggtcatgatgagatgtgccattctttttttccttagcttgtcattttcccgtagcccccgtgtgcttctgctccttattttttttttgcttgttccgatagattttggtgtcaatgcatgagctcaagttgccacgcaaaaaaaaaaaaaaaaaaaaa

SEQ ID NO: 52946 - DNA, 360 bp, Zea mays
  Clone ID: MRT4577_148285C.1
atacaaggaggagattgttttttttttctttttcacccgtgtgtaggtgtgagccactactacacaaatacaagccgtggaatgattttaccagcaaaaagaccctttttttttaccagaaaacagagtatctgccagctggggacaacctgccacctaccaaacaggggtgagcggcggaaaatatacccccgacagggcagctagaagctgcactccatgtgccgccacaggttcatcacctggccgcattttttcatacgcgaaaacaaccgccccgagacaaactcgaacagagcctgacccaagaacttgccaaaaaccccaatgagctggtgcaagatggcgggaacaaccacc

SEQ ID NO: 52947 - DNA, 505 bp, Zea mays
  unsure (1)..(505): unsure at all n locations
  Clone ID: MRT4577_148286C.1
cggcgaccannnncccacaaggcncacaagcnccnanagcnncccnncnncccccgnaccncncaccaacggggggaagaaggggngaaaacccaanncnncaacccaacagganccaacaggcaancgcagcnggcancnaaccnnnancacccnngnnccnccaacaancancagcccnannacagcagnnaccngnggngcannnannggcacaaaacancagggcacaacaacnacaacaacnngngcnagcaaaccnngcngccnacncncagcaacagcagnnncnnccanncaaccaacnagcngcanngaacccngcnncnaaaangcaacaacaacaacnaccanncagccagcnancngcngcccacccccagcaannncnnccanncaaccaaccgacagcanngaacncnccggcnnannnacagcagcaacaaccaccaccanncagccagccagccggggggagcccngccaccnncnngacacaaccaca

SEQ ID NO: 52948 - DNA, 295 bp, Zea mays
  Clone ID: MRT4577_148287C.1
ctccaacaagcaatcgcagcaggcatcataccttaatcacccttgttgttggagcagtcgccagccctatctttggggcagtcatgggtccaaaccatcagggcacagcagttgcagcaactcgggctacctgtgatcaaccaagtacttttggcaaacctttttccttactttaagaacacacacaatttcttccattcaaccaactgtatacactgaacccgtgggcatattggcagcaacacctattaccattcagccagctagctactgcatactctgagcaacaacaact

SEQ ID NO: 52949 - DNA, 838 bp, Zea mays
  unsure (1)..(838): unsure at all n locations
  Clone ID: MRT4577_148288C.1
atcatccagctcgtgccattcccccaagccccaagcaagcaagccagccagacccttgcaatggcggcgtcctacaccaccagctggcgttgcgcattcctcgcgctactagcccttttcgtctccggcgcctacgggcagctcagcccgaccttctacgcctcaacctgcccgaacctggaggccatcgtccgcagcatcatgaacaccaccgtcaccaacgagaaacggatgggcgcgtccctgctcaggctccacttccacgactgcttcgtcgaggggtgcgacggatcggtcctcctggacaacgtgcctgctacggcgactgctccggctttcgttggcgagaagaacgcctttgggaacatcaactccctccgcggcttcgaggtcatcgacacgatcaagactgcagtggagcaagcatgtcccggggtcgtctcctgcgccgacatcctcgccctcgccgcacgggacggcacctttcttcggcgggccgacctggacggtgccgctcggcaggcgcgactcgaccacggcgagcatggacctggcgaacagggacctcccgccgccgtttgccaacctcgtcagtaaccctcctgacaacagcgaccttatcgcgaggtttcaaaggaagggcctgagcgcgaccgagatgaccgtgctctccggggcgcacaccatcggctccgcgcagtgccagaactaccggctccgcctctacaacgaagaccgcatcgattntcagttcgcccaggggctcaagggcaactggcccccaaatggccccgncggcgacactttcctggcgctgntggactcgacggaaatgtct

SEQ ID NO: 52950 - DNA, 233 bp, Zea mays
  Clone ID: MRT4577_148289C.1
atttctaaaaaaaaaaaaaaaaaaaaaaaaaacaaaaaaaaaaaaaaaaaaaaaaaaaaaaaaaaaaaaaaaagtttttacctagcccagggcggcacgttaaaagggcgattttttgaaaatttccttttctcctggggccgggttcccccttgcatggtaaaggtcctcaattttccctttacccggttcggtttacaggtccattggcctacggttcccaattccccttt

SEQ ID NO: 52951 - DNA, 183 bp, Zea mays
  Clone ID: MRT4577_14828C.1
gctgctctcttagtaaccaaaatgacattaattatcgtcctttcaaatagccgctctccactgaatgaaaacatgtgacgccacctgtcattaatgaattaagccaccgcgcgtgtgagaggctacgctgcagtgttgacccgcttctatttgctatgctccctcactgcactctccttttct

SEQ ID NO: 52952 - DNA, 464 bp, Zea mays
  Clone ID: MRT4577_148290C.1
atcgggataaaccccaaccaaaatatgggttatttctaggaaacccatgcccctttgggggccccattatcggggccctcccaaatggaaacaaaaaaaggcccccccaacgggggggggcggccccaacaaggggggggtcaacaaaaaaaaccgggtggagggcaacaattggtgctgctgggggaaggccccccccaaggggttacccccccctgggggataaaaaaaccggggcccctgttggagggccccaccaaagttccacccaaccagttggttgaaaggaaacacctgttgcaaggaggcaacagggtttgccacaactagctgagtcaaagctgggccaaactggtgcaacaaccggtgttgcaggtatgtaggggccttaaccacagcgggggggctaaaaaaaaacacttgttgctgttgtagggaggcggcagggttcaccctggctagtt

SEQ ID NO: 52953 - DNA, 719 bp, Zea mays
  Clone ID: MRT4577_148291C.1
atctcgtgccattccccaaaagcaagctagacccttgcaatggcggcgtccttcaccaccagctggcgttgcgcattcctcgcgctactggcccttttcgtctccggcgcctacgggcagctcagcccgacgttctacgcgtcgacctgcccgaacctaacgaccatcgtgcgcgacgccatggtcacggccttgaacccggcagtcggcggcgagcgcaggatgggcgcttccctgctcaggctccacttccacgactgcttcgttgagggatgcgacggatcggtcctcctggacaacgtgcctgctaatgggagcactccggctttctttggcgagaagaacgccttcgggaacatcaactccgtccgcggcttcgaggtcatcgacacgatcaaggccgcagtggagcaagcctgccctggcgtcgtctcctgtgccgacatcctcaccctcgccgcacgggacggcacctttctgctcggcgggccgacctgggcagtgccgctcggccggcgcgactcgacgacggcgagcatggacctggcgaacagggacctcccgccgccgttcgctaacctcgtcactaatcctcctgacggcagcgacctcatcgcgaggttccaaaggaagggcctgagcgcgaccgagatgaccgtgctctccggcgcgcacaccatcggctccgcgcagtgccagaattaccggctccgcctcta

SEQ ID NO: 52954 - DNA, 829 bp, Zea mays
  unsure (1)..(829): unsure at all n locations
  Clone ID: MRT4577_148292C.1
aggccggccgggccgggaatccaacgaccccaatctctgtctcgcgctggcgcagcgcagggcaccgccacgcgcgcctcatccggtaccggcatgacgagcgcctccgagctcttcaccgcgcgccgtgccgcccgtggggcccgcctctccgacctcgacctggatccgcacgccgacgcgctccgggaccagcacggacttggcgcccggcaccggcgccgcgggtgccgcccgcgacgccagctcgacgccgccggggacgtgcggcagcacctgcacaccggggccccgccaccgcgtcgccgcgggtcgtacaccgtgaggatccctcgccccagtctctctcccgattgattattctcgtatccgttgtgttgtggctggatcggagaatctccggcgttggcttatagaattcgtggacgctattaggatccggctcccgcgaaattcaatgatgaccggaaatgccgattttaatatcataattacatagctcgggaaatgggtgtcaatagggattacgcacttgcacttgttagtgtggaacttttgtttttgattacatacttgggttaaacttcaacgttctaattggtgaaattgtaccggattgtaatcctatctgaggttctgaaccaagcttctttatccttcgaattctactagaaataattgattcatcatccatggtaatttggtattttgggttgttggctatgtgtagttgtaacttanaactataaacaaactggtgcacatatttggccctagtggttgtctataaccatatagtctataccattaccaacccagcttcatttca

SEQ ID NO: 52955 - DNA, 415 bp, Zea mays
  Clone ID: MRT4577_148293C.1
cacccaaggagacgctgttcaatggtgtcatttcgataagcaactacgacactgatgaagcaccttcgccgcaacctgtatcgttggtatctgatgagatagacatttctgaatcatcaccttcgccatctccgtcgccacatacagtggatgagatggacaactctgaggagtcaccttcacctttgtctcacaccatagaactccaaatgtttgaggtaccaaccacctcatgcaataatgaagaggacgaggaggatgacgattcttttagagaatgggagagtgattaaatgttgtcatcagttaacaacacctcaattgtagataggcatcagcgatatgatgtaatataagtggagacatgtctgtcgcatggatttgcttgaaatggtcagacatgtttgatgcgtat

SEQ ID NO: 52956 - DNA, 587 bp, Zea mays
  Clone ID: MRT4577_148294C.1
gtagattcagatgtggataactgacaggatatagaattccgaacctgcagctgcagatcacttggtctggttttctaactgtaggacattatagtgcatgtttatcaggcttaaacccttgacaacatttcccacaaggtgaaggacctctcttgtacacattcttatctatccccacacccctattttgcatgcttgtcagtccttaatctgcaaaccattatctagatttttaaaatgtgaattgaattattctgcgagttcatttagatatttttgaaaaagcaaacccaatatagattgcagtttcacaatttcaacaaccaattcaactgcataatattctgtttagtttatttgtcaattatttgatattaatttgccgacttcttcatgaaagttgagtatctcaagtctcaacatgtcttatagacacaatggcgaaatggccactagccgagttggttaggtggtatgagtagcactcctcaggtcctgggttcgactcctcgtgggagtgaattttaggttgtggttaaaaaaaaatcccctcatctgtcccacgccaaagcacaggtttaaggctc

SEQ ID NO: 52957 - DNA, 249 bp, Zea mays
  Clone ID: MRT4577_148295C.1
attcccggtcgacccacctcataagaccaactatgaagtctatacacactaaaggcaattaatcgaagaaatatccgagcaagatctcattttgatcttctcatacttaaaaagacaaatcaatatattaactctatatgggataagtcaatcttactctcattaaagatacgccaaactaccctttctcaagtttgccatacaaaagtaaggactgatgaaaccaaacttgacttagatatctacctt

SEQ ID NO: 52958 - DNA, 353 bp, Zea mays
  Clone ID: MRT4577_148296C.1
gcctgcacgagccgggccggaattatacttgccgggtcgacgagtattttagtcggcggccgccctgatttttcttttggttttaaaaacgcgggcggctgcacaatagccggggagtgcaagatccagcgaaaacggctacagcgtctgtcattcatacaataggacttctactgtatctggtagcagtgaaaaaactctctagacagatccaccggtggggcttccagcctcgaaccacttcgcgagggctgggccaaaccaatgatggtcccatcgaaggaaacggagcgtcggcacatatgctaagacagactggcggcggatggcagcatccacgacgccagcagggg

SEQ ID NO: 52959 - DNA, 446 bp, Zea mays
  Clone ID: MRT4577_148297C.1
cccacgcgtccggtcttaaattttatgccatgattgtgtgttttaagtcgtattttgcagggttttccggcgacggctcagagaagctcagctacgtagaggagctccgctggagaggacgaccaccagagataggcgctttgttgcggtggctcatactcgctcgacgacggcggcagtgtggatctcggtcggggagtacgcgcggaggcgctctgctgcagtgctgcagattcgctcgtcggctgcggcggcggtgatgtggatctcggccggtgagtacgcgcggaagttctctgctgcagattcgctcgtcagccgcgacgtggagaaggtcgacggcagggctttgaatcctctgtggtgcgaaatcgctcggcgggacagagtcgctgttccaactagctggacgagagctgtacgaacaaggaaaatcccattttctc

SEQ ID NO: 52960 - DNA, 373 bp, Zea mays
  unsure (1)..(373): unsure at all n locations
  Clone ID: MRT4577_148298C.1
gagctcattagtcggcggccgcccttgggctcggtgatgccctattgcccgcctggcgtcccagtcccacagtcaaggtcaccgagggcggcacnnnnaggccggcctctaggttgcttttcacgaggtcactcccgagcctcttcgcggagtccgcgatgacnncnagccccgccgcctccgttcccnagctgctgtccagggccccgccgggcctggcgggcgtgctggtggcggaggaggccgaccagcgggggcccttggtgaggaacgggcgcatggtgctcctcggggcgcggctcccggtgcagctgacgccgccggcgacgatcgagttcggcgcgaagaacaaggaggcccaactggcgctgct

SEQ ID NO: 52961 - DNA, 704 bp, Zea mays
  unsure (1)..(704): unsure at all n locations
  Clone ID: MRT4577_148299C.1
gacgcctgcaggtatcggtccggaattcccgggtcgacccacgcgtccgcccacgcgtccgctcctccccccctgcctcctagcgtcgccgcggtcttcgagcccagtgtcccgtcgcagcggccactcggagctctcggtacagtgcagagccaaggatcgggcgagcggtccgagggtcggggcggccaaggagaggggcaggagcagcggacccaagacgaagcgagcgacgctctcacaaacttccacgagcgccggagctatgaagatggtcgctccctggactcggttctactcccacagctgctgtttgtgctgccatgtccgcaccggcaccatcctgctgggcgtctggtacctgatcatcaatgctgtggtcctgctgatcctgctgagtgccctggcagatcccaatcagtatcacttttcaggctctgaactaggaggggagttttgagttcatggatgatgccaacatgtgcattgctatcgcaatctctctcctcatgatcctgatatgtgccatggctacttacggtgcatacaagcaacatgctgcctggatcatcccgttcttctgttaccagatcttttgattntgccctgaatactttggttgcaatcactgtgcttgtctatccgaactccattcaggaatacatacgacagctgcctcctagctttccctacagagatgatat

SEQ ID NO: 52962 - DNA, 388 bp, Zea mays
  Clone ID: MRT4577_14829C.1
aaaaaaaaaaaacgaccggccctttccccattaaaattcgaaggaaccaaacccgacacgttttgggccatatcccaaaaacccttcgggggggacaggctgcaacaaatgtttttggggcccttaaaaaggggccgggagcaactcatgcccaccccgggggtttccgggggccggggtcaggccacaggcatttggaagggctttggggtggggcccacaagaggggccctttccacaaatggtcataagggggggggccgggtggaacaataattgttcggccacattgggtttgccggagcaggacccctgagggtcctatccgggggaattgggggttcggggccccaacccggttgggcctgccctaaaacagaaccaaatt

SEQ ID NO: 52963 - DNA, 325 bp, Zea mays
  Clone ID: MRT4577_1482C.1
cgaaggatggaaatcagaacgatgcaaacacagggctcttcttgagggccgctgttcggccattcacttacagaaatcttgtcaaggaaattgttctgatgagacaccacatcattgatggggaaatagtttagtttgcatgaggctgtattctcacatcattgatggggagatagtttagtttgcatgaggctgtattcagtttttcagattagggatttgcccatttcaatttacaaatgcagagcttgcatttcgaaggtctaaggccatctcccgcagatcttgtaaaatactgttttacagtgtaatccctgttttgcag

SEQ ID NO: 52964 - DNA, 104 bp, Zea mays
  Clone ID: MRT4577_148300C.1
agcagctaaggagcctccgcctcgtcatgaatcatttgagcgtgttactgagccagtgcaagacattttcaataaatggagaggacctcttttaacgttattac

SEQ ID NO: 52965 - DNA, 326 bp, Zea mays
  Clone ID: MRT4577_148301C.1
ttctttttttgggggttttttgaggtgctcacttctgtttctttttttgccgggcgaaactcctgctttgttttaaaaaagggggggagttactatgagttgtggctcacatcccaggctggttaaacatttgtcttgcacgagtggccctttcgggatccctgaggtcctttcatggcaaccctcttatttatccccgttgaaggtttacggggaaaagaactcccacccccccctagaacccattaacctctggcggcaaaacaagtggataaacccgaggctgaccgggttctagactgtgcggtaacttcccccctacccag

SEQ ID NO: 52966 - DNA, 245 bp, Zea mays
  Clone ID: MRT4577_148302C.1
atacataacaaaatataaataatagagtgaaatggttaaaaggttaatacaacaattttgtaacatgggagaacataaagaacaggaccccggatcaaataacaaaataaattgacaagactactcacaactaaggcacaaacacagtacacaggatttagcacaaactattctggttgtgatgaaaaatataatcgctaaattatcgcaggatcgtatattactgataaacaccatactataac

SEQ ID NO: 52967 - DNA, 342 bp, Zea mays
  Clone ID: MRT4577_148303C.1
attggctaacattctgactctccaatgatatcgctggaatagcggtcgtcgtagcaagggtccagatgcggacataggacgaggatcttcctcgcactctgtttctacttctcttcctgtcgagctagctattcaatcacctcgactgtgcgttcttgaccattgccactgtgacactgagacgcgtttgaggtttctatgtcttcattatctgtactctctatttcgacttcaagctgggctggtttcttttccggatgatctgttctgctactgttgcgactacgtgctatagcagatccgcttggagcattctgctttcgtgccacgcggtagtgatcc

SEQ ID NO: 52968 - DNA, 247 bp, Zea mays
  Clone ID: MRT4577_148304C.1
ttttaaattcttttttttttttttttttttttttttttttttttttttttttttttttcccagccgattacggccgagggcttaaacattttccaattttagtggacagggaacaaacaaggctgccaggcacctaattcggtttttgacacacaagcagatacagaaaaagtatttttctagggccattcacattccgataaaaacctatcccctatggagctctacagttcagatggcaactcct

SEQ ID NO: 52969 - DNA, 1544 bp, Zea mays
  Clone ID: MRT4577_148305C.1
atccccggcccccgtaacgggaaatgacctgttgaaagactcgcgaagcacggcacggccgcggacacgaccgggtcccttccgcgtccgggtcgcggtcgccgaagaaccctcgctcgagaccgaagaagacaaaatcgcatctcctcgcctcctcccctcctcccgagatccgggcaaagcgcgccgcgcgagaaccaggatatcaatttaggtatatggacaaggtgtctgaaggtactaagtgagatggataagaagaaagcgaccgatggcaccgaaccaggaccagctccttctcgtgccgtcgacagatttggttttataaagccagaacaaggcaattcacctgatggaattccaaaaggcaagtctatacatgagcgtgaaagggaggaaagaaggataagaaaatggaggaagatgataggtgttggtggtaatgactggaagcattatgttagaaggaaccctcatgtggttaaaaggcgaataaggaaaggaattcctgattgtctcagaggacttgtttggcagttgatttcaggcagtcgggacctcttactaatgaacccaggggtttacgagacactggtgatatatgagacatcggcctctgaattggaaattattcgtgacatatcacgcacatttccatctcatatattcttccaacaaaggcatggtccaggccaaagatcattgtataacattttgaaagcatattctgtctatgacagggatgttggatatgtgcagggaatgggatttttagctgggttgctgcttctttatatgagtgaggaggatgcattctggttattagtcgcattgctaaagggagctgtccatgcaccaatggaaggcttgtatcaggctggtttgccgcttgtgcagcaatatttgtctcagtttgagaaattagttattgagctcatgccaaaattgggacaacactttgttgaagaaatgataaacccaagcatgtatgcaagtcaatggtttatcacagttttctcatattccttcccatttcatctaactcttagagtttgggatgtgtttctttatgagggtattaaggttgtattccaagttggattggctctattgagactctgtcacgatgatttagtcaaattaccttttgagaaactgctctatgccttgagaaatttccctgaggaagcgacagatccagatgtattattgccgcttgccttttcatttaaggtatcgagtcgtctcgaggagcttcagaaggagtatcagaagcgacaggagggcaccagtgaaacttcaagcggcgagcggctacagcccctcgtatcgaagacgatgagcagggtcggtagccgtgttgtgtcgaacttaacgaccgctgacagaaaatgacagacacgttctcttgtttgtttgtaactcgcatgtacactgtacagaaagaacggccttataatccatccatctaacagtaaaaaaaaaaaaaaaaaaaaaaaaaaaaaaaaaaaaaaaaaaaaaaaaaaaaaaaaaaacaaacccaa

SEQ ID NO: 52970 - DNA, 294 bp, Zea mays
  Clone ID: MRT4577_148306C.1
ctttagcctctctaggacctttcctaattagggtgggttctgacttgaggggatcctgccttattcacaacgctagatccctatcaaattctgtttctggcgtgatggcttgttatattcaccaccaccgcaacaagctccacatttgccaagctatcatgtgtgctaacgcactggaaaacagcacggtgctttttccactgccagtatcgcgaatcaaaccaagggcgtgtttcttaggaaatcaaacaaaattgctttagcttatatcagaggcccgtattcatccgctat

SEQ ID NO: 52971 - DNA, 376 bp, Zea mays
  Clone ID: MRT4577_148307C.1
ctcacgcgtacatatatcaacgcaggaccaccgcagttctacagggagccctggagaaggccccagtagacccgatgccctatcctactctggcatcctcgaggaaggacggtagccgccacactgtgccactttgacaaggactactacctggtaaaattcacaagtcaaccgctgtgccgggagcatacctgcagcaagttgctgatccagcccctagactcgaaaccatctccagcatactagcaaaatctagaccatcactggggcacgaccatgcagcgacttcgtacaacgagtgagcatctccaacaggtacatgacttagcgacacccgtaagggcaaggcatggaccgacaccacctaagactggaa

SEQ ID NO: 52972 - DNA, 367 bp, Zea mays
  Clone ID: MRT4577_148308C.1
ctcatataaacgccggatatatgcttggggggtgtcttacttcaacaaggcaggggtcacttatataaacccccatgcaacaataagaaaccgatgggctatatgaccacccttggagatcaacgcgcgcccctgcatccttctacaggcacccaccggggtgctgtcttgacaggaacttgctaccgggcggcacaaagacatgatctttccgtaacgctcaggggagacaatcatgtcatacataacttgcctggcataagagcatctttctgaacaccactgctcaggagggggagggccacccgcctggcggcccccctggggagctcagcttcccccatgccctggtgcgttttttcttgcg

SEQ ID NO: 52973 - DNA, 355 bp, Zea mays
  Clone ID: MRT4577_148309C.1
ctcgagccggatctgacatgccacatatctgggacttctacgttgcccctatggcttttatgttgtgcctgtgggatgaacatgtcccaacatttgctccatttttttactgtcggctgttggccataattgtttagctgatcattaagaatgggaaatggttaaaagtagaattttcttgctatgttatatgttctgcttgcctctgcttgagcacatcttatttgaaataccatgtttttgggactaatacgctgccccgatggcaataacagtgcctgcggaatgaacaggtcccaatatttactactattttgctcactttgtcagctattattcacattattagctgatc

SEQ ID NO: 52974 - DNA, 498 bp, Zea mays
  Clone ID: MRT4577_14830C.1
ggaaaagcaacaggggtttcccttttttctcacaggtccgggcaaaatcaggaggggggggggcccttacaaaggggtcttttttttggggaaaaggggaaaaataatcccccccaaaaaaggaatgggaaggggaatttagggcccaaatcgctgaaaagggtgaaaaggcaacagcgatgctttgacctggcagggaacagcacccggcccaacaggcccagaaaaagaaagaagtttattccaaggaatagcaaaaacattttcaaggccccccaaaataagggggaccctttttctccacccccttccaaacacgaaggcaagcttcctcgccggggggcaccagagaattattctccaggaggggtaaaccatgaaccccccccaaaggagcccccttgatagggacccaacgggctactggcttggctatctcgaaacaattgcccaggggtccagggggccaggggcaaccaatcgactgtccggggacca

SEQ ID NO: 52975 - DNA, 462 bp, Zea mays
  unsure (1)..(462): unsure at all n locations
  Clone ID: MRT4577_148310C.1
ctgggttnnnnnnnnnnnnnnnnnnnnnnnnnnnnntnttttttttttttttttttttttttttnccctttaaagcaaaagtaactttcctagttacaggccctccgatttaagattctgccagaaaaccgggaattaattacccacccaaatttactggcccatttttttaacaaatgctcatttcgttgcagttcatgggggggggagtaaatgtaaattttaaagttttcgctaagctaaaactaccaagagttcctccgggcaaaaaccaccggtttcaattttaactgggccgaactttaagtagatcaacgtttttttttgtttctttttgagctgtttttagaggggctcgcaacggggtaattaaactttccaccaattgggacaccggacccaggtgacccttttttcgccacaagccttttagccctttaaaactttttttaaggaagtttt

SEQ ID NO: 52976 - DNA, 290 bp, Zea mays
  unsure (1)..(290): unsure at all n locations
  Clone ID: MRT4577_148311C.1
gggatgttatagggggtccccctggtcctagaccacgcggagaatttgtgtggggctggggttcnccanattcaacttgagaaaagagagacagatcacaggatcgcacaggcatgtacttcgttccacaccactgttgtcaccatgattatgaagatttccagcagactaggcgtcatagcacccggagacatctcactctctcttgctatgcacgttcttctcggtgtcctggaggtcacttggattacatcagttccagcggcagaaacagacctttcactccattc

SEQ ID NO: 52977 - DNA, 352 bp, Zea mays
  Clone ID: MRT4577_148312C.1
ctaaaataaaaccccggaaaaaaatttggggttttagggcaaaaaaattccctgggtaacaggtttcaaggcaaaaaaaaaagccaatttcattaaaactttaaaatggctaaaggaaaaaccttcggctatattcaaatattttttttaaaaaacccggggggattggccccccttttggcatttatatagaaaaaaaacgggggccaacgggaggggccattgtattccccggagaggttttccctttgttccccgcccccaagggtggccaaagacgggggggaaagccccccccatttttttaaagggaaatgccctggagacctcaggaaaaaaaaaatttgtgtat

SEQ ID NO: 52978 - DNA, 143 bp, Zea mays
  Clone ID: MRT4577_148313C.1
ctggggtttgtttctttcaattcttcacaaaggaggaggaggtgcggacgggccttcttgcaattttgacagcgaccgctcattggcagatggaaggccaggatcaagtctgtgcatcagtgccctataccctaaacgcgcac

SEQ ID NO: 52979 - DNA, 258 bp, Zea mays
  unsure (1)..(258): unsure at all n locations
  Clone ID: MRT4577_148314C.1
gcgtctcgcgctcccccgcttcctgnaactcgcttcgcncgggaacctcctccaactttgccgccgccgcggcaaccggggctccggtggtgggggaggactacgtccgtccgccgccggcgcggtgccaccgcaaggcactccttagcctcttcctttggagcaagaaagaggagtccgggggggtcggcggggggcancanntncacatttntctanctnnaaaaaacacatgagaataacatgggttaccaatga

SEQ ID NO: 52980 - DNA, 176 bp, Zea mays
  Clone ID: MRT4577_148315C.1
tcgacgactgggccatcgaggactctttacgttgcgcactacacaggctttctgatcgcggtgaccaattgcaactctaagcggcttgcccttaacctggatgccctcacgaacatacgtctaaacttcataactgttggtacgctcacgagcatggttgacacatgtgagtactc

SEQ ID NO: 52981 - DNA, 523 bp, Zea mays
  Clone ID: MRT4577_148317C.1
tttttaacactggccgccagctccagtccggcttccctttctctattttgttctttttttcgtcgcttggcaaacagcttcgtctggcttccttgcctcggctaacggctaaaaaaaccagcgagcacgatttctcctctctctctaactggcgagccgtggacgctcggccagctctgctggccgactaaggagggcgtcgtgggcctcaccgccggcgagtgcgtccctgcgggtgggcacactgccgtcggtcgggtccgtcggttgtccagcacagctacaagttgaggagctctgcagtaaaggaagtgtgtagtcaccatggtccatttcaagaataggtacatggtggtggagatctttatagatgcaggtagaggtgaacaggaccctgttatctccacccaattttatataacataaggtataaaagacagcattcagcttaactttgtgagtgtggcctagctggatcttcttgatcaatgcagttaagatgttatcctgtacgaactttgat

SEQ ID NO: 52982 - DNA, 465 bp, Zea mays
  Clone ID: MRT4577_148318C.1
tccaggcttttccggataggtgacactgagacgaaaattgtcccctaggtacggatatgagacaaaatctccacccattgggtaaacgggtatgggtttgggaagcaataatccgaacccgattacccatgggtatttcatacgtgtgcatctgtcgtgtttgtatgaatgagttgaggtcgagccaaccaccaagcccagcacggcagcgcaccaggccccaggtcctagcccaacaaagcaacacgacaaggcaactagcagactagcaaaaaacaaaatcctaaaataaccagccatatgctacgccctacccaggtgacggtggcgaccatggattcttaggcgccaacgaactcagatggtaccaaggaaggtgatcaaacttcatttctccatttcttatatcggtcccgaagtacttatttcttttctgatggatggatgaatggatcatggttcagg

SEQ ID NO: 52983 - DNA, 1435 bp, Zea mays
  Clone ID: MRT4577_148319C.1
gcttactttctcaaaagtattgattagtcttgcatctgttgcaaatcagttctgtcgaagccgcccaaaacactggccgccagctccagtccgacttccctctctctattttgttcttttttttcgtcgcttggcaaacagcttcgtctggcttccttgcctcggctaacggctaaaaaaaccagcgagcacgatttctcctctctctgtgagtgtgttttttttttacgtgctctcttgtctgcggccaacatacagctaactggcgagccgtggacgctcggccagctctgctggccgactaaggagggcgtcgtgggcctcaccgccggcgagtgcgtccctgcgggtgggcacactgccgtcggttgtccagcacagctacaagttgaggagctctgcagtaaaggaagtgtgtagtcaccatggtccatttcaagaataggtatatggtggtggagatctttatagatgcaggtagaggtgaacaggaccctataatcctcacccaatttaatataacaaaagttataaaagacagcattcagctcaactttggtgagtgtggcctagctggatctcttggatcattgcaagttaagtatgtcaatcctgtaacgaagctctgcattgtccgcgtgtctcgcgaagaccaccagaaagtttgggctgctatgacgatggtgcggtgcattgggaagatccccgtttcgttcaacttgctcgacatgagtggaagcatcagggcttgcaagaaagctgcattggagtgcgatgaagcgaaatttgagcaatacaagctggttgcaggtgattgtatcacggcagagatcacccagtctgtagagaagtgctttgagaagatcagaggactagagagctaagcagaagaattgacatcatgtccacccacactcggatcctaaaacctgctgaccctgcaccacatccgtgatcacgtcacaccacaagttgtgtgtccagcgcccaccacagcaacggcctcttgctgccagcagcctccgtgcctccagctgccagcagcctccgtgcctccatcagctctcctttccaaggaaaagtctgaagtctgcaaccaaacaagtgttctgcagctgctctttgccgttggttgaagtctgcaaccaaacaaatgttatgcagctgctctttgccgttggttggagttctcggctccacactttcagaaagaattcatgtatacataaaatttattatatagagagtttgcttcgtatattagtaattttttaccaaacatgtgccacggtgtatatacagcaaattataccgggtggctcagactctggatgatggtacagaacaatgatattgcattgcctttttacgtggttgttttcaatcaaactggcgcttgctttggtgcacggcgaacattccaaaaacaacatat

SEQ ID NO: 52984 - DNA, 229 bp, Zea mays
  Clone ID: MRT4577_14831C.1
aataaaataataaaaaaaaaaaaaaaaaaaaaataaaataaaaaaaaaaaaaaaaaaaataaaaggggtggccgttttatattataaaaatttacatacctgttcatgaaacgaaatagattttttttagttgaacttaaattaaatcaactgtgctgcatttaaaaaagtcataacttgaaaaaccatatggttcacaaaataaatgggtttgtaacaaatctccttt

SEQ ID NO: 52985 - DNA, 432 bp, Zea mays
  Clone ID: MRT4577_148320C.1
gggaggggggaaattgggttgttttgtattgttttaaaggggggggtttgggtgaattcgacccatgggaacaaaaagggccttggctagagaaagtccgggggggaaaaaagtacgtaacttgggaagggcgggggcgggcctgaacaggggaggttgcggctgggggggaaagctgggccgggccaagcttatgatccgcaggaaccaggagccccccaacaggggggaccccggggaaccaaaatggattaagaagggggaggccggcggcaatgggactgaagagaaggggggtcccgcccccaaccgggccgaagggaaggggggggccaaaaccaaatcgggggggaggaaagggggcgggcaagaacacgttgaaaaagggggggatttccgaccccggcccgggggggtaccccgggaatctcg

SEQ ID NO: 52986 - DNA, 433 bp, Zea mays
  unsure (1)..(433): unsure at all n locations
  Clone ID: MRT4577_148321C.1
cccacgcgtccgcccacgcgtccgcccactcgtccggccacgcgttctgcggattctgcgggagatcaagcttatgagactcctaagacatccagatatcgttgagagcacacatattatggtgcctacatcaagacgggaattcaaagatatttatgttgttgatgaacttatggagcctgatcttgaccacgttatcatggctaatgatgacctgacactggaacattatcagttctctctgtaccaactgatccgtgctgtgaaatacatgcacacagctaacgtatatcaccgggacctgaagccaaagaatatattagcaaattctaactgcaaactgaaaatttgcgattttggactagcacgagttgcattcaatgataccgccacaaccattttctcgacagattatgttgcaacangatggtac

SEQ ID NO: 52987 - DNA, 259 bp, Zea mays
  Clone ID: MRT4577_148322C.1
aatggtaactcaaacgtgcctttttgtattgacacaacatgttcgatttgatccatggtacaattcatttttactgtcgagaccttttattttaattatttttatggggggggaaccttcttgcgtgcacgctataaggtaaacccccatttgttggagaggaccgacggatcaaatggatatgcttttggggatgcccctcccggtgactcccgacttggagaaaggcttgtgcattttgttcggaacgatccctgtt

SEQ ID NO: 52988 - DNA, 931 bp, Zea mays
  Clone ID: MRT4577_148323C.1
aaaaatacggggattcagatttgttcatcactgaaatatcacctgtgcaaatatccagaacagtgccatcctatcttcacctccctcccttgccctggataatcttcaccctgcagcaccggcgtgggcttccttgagtaagccacgactgcaccccatgcacatagttatcccccctgtaaactcaagaatccagtcccttgatcttttccctgcctatataaagagcaacagggtgagggaaagaaagcagaagccagtgcagtgatccgtgcctcgatcatcaaccatagtgagtagcttcagtcagcagtattgctcttccttccccaaatcataccctggacgcgcacaattccatcgatcaaggcactgaatgtgtctggtgaccacacctgcagatcttccactttaccgtggccagaaaacgaagaagagagtaaagtgactgaagagaagacaccaccacctttggaatctcaggcagggacttggctctacttcgacatctgcggatccgagcctgactcacctgtgaacaaaggtgaggaagcgacaaatttttgttgcttttgctccaaggtggtaccaaatgaagaaaaacaagagtgaagatgcgggaggacgtggtcctccataagaacctttgtttggttagttatcgggaggagtttttgcctcccctggtatgtgtaataatactaccctgcactcgttttataactctggtctgtaataaataacttgatcttactttctaaataaatgtaagtttatataattgcttccgcatttctatatctccgatgttctgtaatgtctgcaagacgggtgaaacgctcttgggaaggtgagaaagaagaaccgaacttgtcaagtgattcaggaacatctacagggttgtctgatgtctgttggaaaggacaactgt

SEQ ID NO: 52989 - DNA, 209 bp, Zea mays
  Clone ID: MRT4577_148324C.1
aaaggcaggcagccatcacgatggcgcttggccacctccccttcgtcctcctcttggtgtcgtccgtcgccgctttcgccgtcgccgaccacggcctcacgcacatccagctgtacgttcacgatacgtacaccgggggaacgccaggccggcggcgtctgcaatccccgttgggggcaacttcgtggttcggaacattggccttgttg

SEQ ID NO: 52990 - DNA, 583 bp, Zea mays
  Clone ID: MRT4577_148325C.1
ctgcactcattaatcgggtcctgcaaaaaaatgagagtctctgcatactgaccttctgctcccttgatttcatggatggttccggtgatgataataaatggccgcctcaaactctcaaaaacctcgagataagtcacagcgcatttctggataagctcccaagttgggttgactcactttccaccatctcctcgttgacaatcgaggtcaacaagttatcaaagaacatcactgacactctggcaaagctgtctgctctaagatccctttccctgacatccatagaaaagccagaaccagaagtacgctttgtcatcggctctgctggtagattcgagaatctagaaagcttaaagtttgtgtgtaatgaaatggtaaatttgcttgaaagaccggaatcgaatgctacccaacagttaacagggcttactatcgtgtttcatgcttcacgaacagaacgcagccgaaacaaagatttcaggtttggtttggacaaactgctgtccctacagcacgttcgtgttgaaataaactgttccaatgcgacgcagcggacggtgaaaaatgcagaagctcgcattgg

SEQ ID NO: 52991 - DNA, 398 bp, Zea mays
  Clone ID: MRT4577_148326C.1
ttttttttttttttttttttttttttttttttttttttttttttttttttttttttttttttttttttttttttttttgggacccctttcaataaaattaatgttcagggcccaacctgtacactggtttttttgggcccctgaaacccaaaagggtttaggggggtttttttttcctgttgaccaaagggaaaaaaacccggggggggggtatcaaccctagggggttttcactttcggtggtttttaattccccggttttaaaaaaaaaaaacaccctgccatggatgcctttgggatgataactttttgcaacttggaactcccctgcggggggggattttgctaaatttgaaatgccgcaaaaggggtgggggccaaaaaagaaatatgggggc

SEQ ID NO: 52992 - DNA, 1434 bp, Zea mays
  Clone ID: MRT4577_148327C.1
aaaattggcacttctttggctgaaaatgttaggtgtagatcgttgctaagcattgtcttccaaactcgtgtcgacaattacttaattttgtgtggtaattgggagaatagtttccagatcatatctctaagtgatggaaaaattgtgcagagcatccggcagcataaagatgtagttagttgtgtggcagtttcatctgacggaagtgtgattgcaacgggaagctatgacacaactgttatgatctggtatgcatttcaagggagatcaaatgacaaaagatataggaatgcaaattacgatctatcaactaaggatcatgtcatcattgaaagcccttgccatatcttatgtggccatgatgatattatcacatgcttatttgtcagcacggaattagacattgttatcagtgggtcaaaggacgggacttgtatgttccatacactgcgtgaggggacatatgttcgatcgattcgacatccgtcaggtgctggtttgtcaaaaatggtaacatcacagcatggcaggttagtgatatactctgatagtgacctttctttgcatatgtattccataaatggaaagcatattgcttcttcggaatccaattgtcgtctcaattgcatggagctaagttgctgtggagagtttatggtatgtgctggtgatcatggtcaaattgttctccgctccatgcattctcttgatgttgtttggaggtacgagggagctgggaaaacaataacttccttagttgtgactcctgaggagtgcttcttggcgggaaccaaggatggtagcttgattgttttttcaatagaaaaccctttgcttcgtaaaaacgccatgcaacggcacaaggcaaaaccttccattggtggttagaggtgtagatcaaaacagtaccagaacttcttgctgcatttcaaataaaggttatcaatccgcaataattataacagagaagattctataactcctgtataaatgtacatacgtcatcagatcgagtttaccattctgaagagtgcatgtgccgatcacaatcaagaggataattcttctaactgcaaaacacatactatggtaactaaagtagattgatgtttcatgttcaagacaagagcaaggggataggaccttcaatatgatactcttgatatttgtagggtggtagctagttagtaatgggggtgcatttgagtgtaatataaacttattttgtgggggcattcttgctagataagagcgagccacagttttcctagatagaatttttaggtaaataggttgccactgacctgtaactattaatctgaacattgtaaatggaactgatgcgggttcataatagaaggcttgcaactttggaaaaaaaaaaaaaaaaaaaaaaaaaaaaaaaaaaaaaaaaaaaaaaactcgagagagggc

SEQ ID NO: 52993 - DNA, 951 bp, Zea mays
  Clone ID: MRT4577_148328C.1
taccgtgtcatctcgcttctcttcagcccgtgattggaattttgagtctgacggtgcctatcagggtagtttcgccctgatcgtgcatttggcgattcagatggtgagaactgtccagttgaagtgcaaaggacagagagatggaccccgagctccgtgttaaaaccccaaggcaatttagtccatgctaagttggttgcctggaaggatgcgcagattgcaaagctcatagaaaagctgaaaaagaaagaagccgatattgatgattggcagaggaagaagaccataaaggccaggcagaagatgagaagcgctgagttgaagctggagaagaagagagcggaaatcgcagaaaagatgcaaaaggcaataaagcgtgcacaaaaaaaggctgataagaagaaagtcaaggagcaggtagccactaaagttcagattgatgatgttgagagagcattggataagatgtcaaggacaggaaaactcccctggtcactggcttttctgtgatccagctcttcgtatgtgcctgtcctagataagctggtttgccaaactgtggaagctactggcgatggcagcatggcaagagcaatacgagtgaaatcagctgctaaatgattgaaatcggcagattgcgtattaaggataagagaagaggatatgctggtgattgaccattctttggcaatgaaagttttggcttatgtaacactatgatttgtttgaggcaatagtaagtagcaatcgaacactgtttttgaacacgacatggatagataactcggggtgaacttttggtacattactgtatgttgtccgataactcttctagtgttctgacatctgagacaaacattcttgatccttacagctttgctgtgatagtgtacagcacttcaactttgtgagtatgtgcgatgaacaaatgaacaatgctttgcttattcc

SEQ ID NO: 52994 - DNA, 643 bp, Zea mays
  unsure (1)..(643): unsure at all n locations
  Clone ID: MRT4577_148329C.1
ctcgagttttttttttttttttttttttttttttttttttttttttttttttttttttttttttttgggcccacggaccacagggccccctttatcccacgcagaaaaccaccaggaggcccccaaattggggcccttccttacaattcgaaatattccctataaccaccaggggggggggggggggggnggggggnnnnagggtcccccccccgggccggggggggggaataccccccccccccccggggtggggaaaccccccccccgaggagtaccccttaacccccgggaagccccccccccccccggaggaccactttcttcttcgggcggccccccctggcgggcccccgcgacccgatcaaacttacaacatcccccccttccaggaccgggccaaacccgacaggccttccgcccaaccaagggggcttgcccgggcaaaaaaaaaaccggctgccatgggggttcggccccacattacccctgcggccccccccagggccagggggaaccaatttgaagctctcatctttgagggggcccccatatatgcccttccccccgggcccatggcccttgtcaaaacccccccccggagcccaagaggcgcccggtgaccccaaggggaaccgggccc

SEQ ID NO: 52995 - DNA, 2141 bp, Zea mays
  Clone ID: MRT4577_14832C.1
gggagaaataaattcttgaattcccacagcaatgcacaaggttaattatactagaaatagttgggagtccgggactcactaaatgcttatttggaagcaagaataccggagggagtcgaggagctcaaatcccttttttaatttcagtccctacaatcctctccagtatcttcgctcccaaacaagtcctaagggtagtaactgagaggtaaggcgtgcaaattagggtgtgtttagttggatgtacatggagggatggaatagagtgaccacaattacaatagtgtttggacgagggtcacgtatgagcgaggtaaacccgtatgagcgaggtaaacctcgaagtagtttttagtggcgacgtgatcctaaaaagtcgagagaacgatgtcgtccccgactcatccactttgacctcaaaccaaacacacccttagtggcaccatctgctcgtgaaactggcacacacgatccatctacataagttagctactcaagccgagaaacaaactgaaacacggttcacatccagctcgaaaagagacacgctgaatcctaccatctctccctcttcctcttccccttcgctggtcctcctcgtcctttaaggcatgaactatgtgattccagcttttcttcaacgacaatctcagctgctgaaaaatcattttcatgagaagtcagatccacagtggatgtagccccttgattaaccatctgtttactggatgcttcctgctggatctttttcagcttgtggcctctattcattagtccaccacttggcattccaagaattttgccacttcgtaatctcctgtcagtactgtcagctccaatctttggggtcatcccttcagttgatagttctaatgcatctgtagtccaaaggttcactgaatctttcccaaattttggaattcctggtgcacctagttgagaggatgtacagttaataggaagattaaccattccatgctcacttgcacagctgtgctttttctcttgctgaataccaacgtcttcctcagcctgaccacaacctactgtgctcctgtaactttcattcacaactgacataattttagatggtgcaattctgttgccatctacttttgagttagggcggatggcacttatactttgcttaactgaaacagaactcatggagcgattaactaactcttgtttacatgcatctatttgcatactttcatgttgatcactttcttgtctattattacacgcttctgcaggtggtgtccaaggtttctcagacatgtccatcccgaggccatataatccccaagatacagttatgtttcctgcattatcatctggtaagtttgaaagggtttgggtagtaagtccatttctgctgccagtacacactacagatgtgtaagaatcattctctgtgaaagaatatctgttagaattggaaaaactgtcacttaagaacttctctatgtaatattcaactgaatgacttggtgcactagcagttgtttctgatggtgacagtgcatgtttattatcgggcaccatctttggattaacaagcctgtgccattgaattggaaaaccaaactcaaagcattcacacacctcttcagaaaatccattgttacgtgtttttggaatattcaagagacagcatatccgtatgaggtaaccatcctcggacataattctgaagtgatcatagcgcctcacaatagcagatgatttaaacactcggcctgccactttcctgcttccctttgaggacgatgcttctctcctcatttgcgggctcatttgcggggtgtaggtgattccagcgacgcggatcttgccctcctcgccctccaccctctccaaacaccaatcgacgagcgcaatgcttctccgcgtgacgcgggggacgggttgagcggagagcgtcgccggggtccgggggcttccgacggtggagacgagcgcggtctggaacggcgccggggtccgggaggttccgccgatggagctcggctgaggctgggacggcattccggtgagcggcggaatagcggcgccgcgcggcaagaaaggagagtagacggcggcgctgcctacgagaaccccgtgttatttggaggtaccggccggctcgaggtacc

SEQ ID NO: 52996 - DNA, 298 bp, Zea mays
  Clone ID: MRT4577_148330C.1
attcggctcgagagaaagcctaaaggtttttataccggacccactgccagcgacaggtgcctttattgagccgatgaggcagatggcggaggctgagatcgacgtactgccgaccaatgggcttcccaacgacaacggccgaaaggcggtgtgatttaagctcatgcacgaaagaaggggtgaatatctgcaaccaggggaatctcttggactaaggatcgaccatgagatgggtgtccaggggcagaaagctcacaatctgtaaccctcgcatcaagttgtcctgtggcgcggacac

SEQ ID NO: 52997 - DNA, 417 bp, Zea mays
  Clone ID: MRT4577_148331C.1
tgtgctcgagcatgcgaccacttacatgtactatagggtcttctacattgaatcaactgtccgtggctttacagatgccggtctgaaaaaaccctggggtcactaaacttattggactggcatcgcatatctgtttcttgacctgatgtaatagctaacaggccactgcagatcgctcttccgatcagtggcgtacactgactggggaatgggacctgccttgtacctgggcattatgctccttgagcgcgggggttacgcgcaccgtgacaaatacacttggcagtgcactagcgaccgatcttttcaatttcttaccttcttttgtggacacgtacaacagctttctcctgactgatttaattctggagctcactgttgggttcctactgattgatttacaggacctctatcaca

SEQ ID NO: 52998 - DNA, 558 bp, Zea mays
  Clone ID: MRT4577_148332C.1
ccggccggggagtggagaatccattcgccatcgagagacccaaggaacaacgacggcgacgatgcggaaaactcgtcgtggccgccaatcctcgctcgcatcggcaatggggactggggtgtcaagccagggggcttctgcccatcgcctccgatgggcccgcggccaagttggtggggaaacgaccattatggggaggcctattgcacaccgaagattgtaatcgcacatcgaatccgcccttgaccccgacaaagatgctcgtgcgcccctattctccgcgacgaggatacgagccacctgaagagcaagttggcaccgtggaatctcaagccccatttcaagaacagataccggaggatgatgcgtcatggaggatgctgtgacaagcacgtgagaggtctaggacgtcctctcccaggcaactttgggatgttggatcgtgtcttcatatgatgtaactatttattcattttgtacagaactcctattatataggatagatgtgacattcaggatctagtaccactattcatcatatgtgtgagacttgttccc

SEQ ID NO: 52999 - DNA, 280 bp, Zea mays
  Clone ID: MRT4577_148333C.1
cgcagggctgggcgggagagactgttctgtaccttgggtaactgtgttgctgaaagactacctcgttcgggtcgtgatgtgtcaccgcggcaactgcctggaggcggggatcggcgcagggtggaagcggctccccattttataccaaaggtgctacatctatgtgatgggtggggtggggagggaatcactggtgctatagaaattgagatgcccccccaggccagcaaatgttcctttttgttcaaagtctatctttattccttgatatttgtctttc

SEQ ID NO: 53000 - DNA, 373 bp, Zea mays
  Clone ID: MRT4577_148334C.1
agtacccattgggtatttatctgctcccttgctgaagctggaatgtgcagctcgatcggttagcgctacgagtcctcgctgaatccagccaaatgatccccttgagcttgccagttagagcacggtgagtcagcaaagattaaaatagcctccggtgagtcgatgactgttcccagtttaatttcttagaacaagattaaaatagcctcaccctcacagcaggcttttatacgggtcagatctgcagatctgtctgtctcccattaattcttctttgctttttttggattttttttttggaagcgcagcacctaatataatgctggccttccgtcagaagttacagctagctaagagaagcacaagaaaaatc

SEQ ID NO: 53001 - DNA, 630 bp, Zea mays
  Clone ID: MRT4577_148335C.1
tcgcacgcgccgcagctttcccacgcgccgcagcactgcagcagccgccgaagtcgaatcggtcggacgacggagaagccatcaagccagaagcctccgcgcacgaagcagctgttgctgctagcctgctacttccactggccggtacgtatcttgttagcttctcaagcacgatctggtcggatactcggatctggtcgtcgttagcattcttgttagcttctcaagcagccgccgtcatgtaggatctggtcgtcgttagcttgtacttctttaggtaaatataaatattaaaagcaaccaaactccatgaaacaaactgaataaaatcacttgtagtcgttaacttctttagggttataggttattgtcatttttttggtaaataaaaatattaaaagtagatacttctttaccggttaatatacaattatttgagattattgtagtaacgcatggcatttgaagttgaggaagatgatgcacatcctagagggcgtttaaatgcaactgtgacagatgaacaagacgattaccatcacaaaggaaatagtgtcattgaagcatcatcaagcggcgttgctggtatgagcacaatgcctataaacactgttgaggtggtcacacaaa

SEQ ID NO: 53002 - DNA, 414 bp, Zea mays
  Clone ID: MRT4577_148336C.1
aagcaaacggaaaagggggtcccttcaaaccctagacaaagcaccaacaaccgaaaaatgtaacacaaaaaagacgccttagactttggcgggagacccggaaacgcacaagtccctacaaggagaacacagagtcccgatccaggaattgggccacttaagcataaagatcccccacttgaaagaggctcgcgggggcccccatggaggcaccaaaaaacccccttgaaactgcggaaaagggacacacaaaaagctgacacaaaaggtgaatcaagaagggtttcttattaggcaggtaaaaaaagcccatcttgactgcccccaaaaactccaggaaccaaaattttgcaaaaccccaaacaggattcgggcaaccgaccgcaaaagaaaacaaccttttgagcacccata

SEQ ID NO: 53003 - DNA, 631 bp, Zea mays
  Clone ID: MRT4577_148337C.1
cggacgcgtggggaacaagtcgtcgatcgacagccgtgctcatcgtaggcgcggcggcatccgggcatggacaggtgcggcggcggcgccatggcgtcgtacctggtggcagtcgtcctgctcgttgcgctcttcgcgtcgtctgcaaaatgtcgtcctgagccactcgacggcggcggcaacgttaacggcaatggcacggcgccgccagtcaacggcggcggccccggccccggccccggcgccgtactgaagctgcagttctgcatccagaggaattgcgtgtacgaaggccgtggcaacgccccgtgcttctgctgcggggccttgaagcccaaccagtgctacgaaacgagggacgggtgcagcggcaactgcgtgtagcggtgtagccgccgccgccggcgagggcgagtgatgggagatcgatcgatcggtccgtcgatctcagccgccgccgccgccatcgaatgactaaacaaacaacgaactgcgtgttttttgtttttctgtcttgaagaataataaccatggtaaattgcgctgttatagtgctctatgatcttctctgatgtaaaagcacccttgcgttcaatcaaatgctaccatgcatgccgatgttgcgattggg

SEQ ID NO: 53004 - DNA, 428 bp, Zea mays
  unsure (1)..(428): unsure at all n locations
  Clone ID: MRT4577_148338C.1
gncncgccggaagacacaagctcttttctttttttttttttttttttggcattgtgattaggactctcgccctatacactaagcagacctttttcagtggataaataagatttgctttgtggcatacctttctagaccccgcccccgacagcccataaggggaaagccaacctcaacggagaccataccagaggggtcccaaagcgcggacccatctgagcgctatacaaggcagaggcctgccctccggggagaaaggagatccacccacaatcacacaaaaaaaaaaaacccgaagcaagaagagtcaagcccgggggggcaaaggagggcaccctccaaaaataaaaggggtggacccacagcccccatagcggagggaaaaactgaaccgcccgccctaataaggatagccccaaccccagggg

SEQ ID NO: 53005 - DNA, 232 bp, Zea mays
  unsure (1)..(232): unsure at all n locations
  Clone ID: MRT4577_148339C.1
gtgtgattatgcgtggttatctanaccattagtaaataccaagatgtttagcaaatgtattatagcgtgcttgtttgaggaatgagaaagtacatcttcttaaaaaaaaaaaaaaaaaaaaaaaaaaaaaaaaaaaaaaaaaaaaaaaaaaaaaaaaaaaaaaagggggggggctgtctagtaaagctgggggccccctgatttattttcggtcggtcccctgaatgaatcc

SEQ ID NO: 53006 - DNA, 203 bp, Zea mays
  unsure (1)..(203): unsure at all n locations
  Clone ID: MRT4577_14833C.1
ggtagtgtctttcacttccactgtaagtggaaagagagancanaancacccacgacgggggaaacacaaaaggaagcacaaggaagggagcacagacggcngggaagcncaaaagaaangacagncaacaaaaccaagacgcacgaccccaanacacnggaagaccagaagagaacgccacacaggagggcgagagagagaca

SEQ ID NO: 53007 - DNA, 284 bp, Zea mays
  unsure (1)..(284): unsure at all n locations
  Clone ID: MRT4577_148340C.1
aaaagccataccccaaaattagctttttcggggccccgggtaaaacaaggaaagccctaaggggttttgggggacataaaggagggagaacttttacccttaaaataattacgatgggttccgggaacccaacggggactgaaaaaagggttcgaaaagggcaactttttcgactagggccaagggagtatccatcgggtttaggcgctatttcgggttgccatgaacaattaaggggggcaaaannnnaaaggccctccaataaagctttcttaaaagccccc

SEQ ID NO: 53008 - DNA, 2112 bp, Zea mays
  Clone ID: MRT4577_148341C.1
ggactgaaaccaccccatataatggtctatcaggtttccataaagactcctgctcaaatcgacatagtatttttggcagggtccgcctcaaagtctccagtgattgaagagcggattagcaagctaacaggtcccatgctgagtgaccgtcttgaatcaaaacaaaaggaatttgaagagagatatgatcaaatctttaatgtgaacaataaggttgattccaaagagttatctgttggtagagctgccttatcaagtcttctgggtggtgttggctacttctatgggcagtccaaaattgcactcccgaaaggttttacacaaaaaaatggggataagtacatttcatattggcctgctgcattatatacagctgtccccagccgctctttcttcccaaggggatttctgtgggatgagggcttccatcagttagtcatttggcgttgggatgtgcatatatctatggatatcattggacattggttagatctgcttaattcagatggatggattcctagggagcaaatcttaggagctgaagctttaagtaaagttcccgaggagtttgttctgcagtatccttccaatggaaatcctcctactttatttcttgcgatacgtgatttagcaagtggaatacatgcacagcagttttcagatgaggaagcggaaaagatttcaagttttcttgaaagggcttatatacggctaaatgcttggtttcagtggttcaacagtacacaatcaggtaagtatgaaggcaccttctattggcatggaagagacaacataacgacaaaggagttgaacccaaagactttgacatctggattggatgactatcctcgtgcatctcatcctaatgatgaagaacgccatgttgaccttcgttgttggatgcttctagctacgaattgcatctgttccattgcagagttccttaaaatggatagtgctcttgagaaggattactataagatgtcaaatcaactttccgattttggaacacttaacaagttacacttggatgacacaattggtgcttattttgattatggtaaccatactgaaaaggttcgaatgagatggtttgatgtgaaagacaacaataatatgagacgagagttcttgcgagaaacattacaagcccctcagctgcagttagtaccccatgttggctatgtcagcctcttcccattcatgatggggactattccacctgaatcatgggttcttgagaagcagctcaatctgatatctaacacatctatattgtggacagattatggccttcgatcactttctagaacaagttcaatatatatgaagcgtaatacagagcatgaccccccttattggagaggtgccatttggataaacatgaactacatggttctttcggcactacatcactatgcacataaggatggtccatatagcggcagggcaaaggaattgtatgacaagctaagatcaaaccttatccggaatatagtgcagaattacgatgcaacaggtttcttctgggaaaactatgaccagaaggacaaaggaaagggaaagggtgcacggtcatttactggatggacttcactcattgttctgatcatggcggagtcctacccaacattgcacaggtgagatatagatcgcgaacaaccacagcagaagatagctatggcaattggaatggaggggctggcagctggcgcttgtttagcccggtttgcaaccagaacactgggatagtttgattcgtagcatctgctgccttaatcatgaaaattttgacaacacctcctggtcaatctgttcagcatcatttatagagtgttagtggtcatccctgttcactctcatactgtaaactagctcctcgaagaactgattttggggggccaaaaccaccccaggaaagcatgagcatatggaaaacatgttcttgaaagctgacactacgtggagctgttacttgctattgagtgtaatctactgctactcttactatgcttggccatttgcacccccaatgatccccgaagaaacctgcgtggtccgagcatgtgacctatacctttgcatttacttgctagagaatcagttcccccc

SEQ ID NO: 53009 - DNA, 337 bp, Zea mays
  unsure (1)..(337): unsure at all n locations
  Clone ID: MRT4577_148342C.1
ggcaaaaggggtttacttggggcacaacccacagcccttcctgggatacatacggggggtgccgagcatccatgggttaatgggggttgggaccaggagtacaatttatttacctcccaaattagctagggtggcacccgccgggttttattagaatttgcaattggacccatgaaccaacgcgtggggtccaccaatccggactcgcattggattcacacattccacgttccagcaggggcctgctgtttattcccggcaggatgggcgcctgaactgggcccaaccggggccggggccgttncccccccccacgaaaacctcctttttctcctcc

SEQ ID NO: 53010 - DNA, 1876 bp, Zea mays
  Clone ID: MRT4577_148343C.1
tggaagctattgttctttttcgttggcatttcaaaatgatgatcaaaagtcagaaggcagcatggaattgctgaattcagtgaaagctatttcgatccatcctctttccaataacaagtttttggtactggattcatctggagtgttgcatgtcttcattttttcaacaacacaaatggtctcaagaggtgccatcaagcaatattctgaaaatatccatacatatcgcttgcattatcccatgaaagtgcaattatctgctgtcttttcagttacctctataaagacacaatttttttgggtttcagatggtggacatactgtacatgttatgtccgcagttgagactgaatcccctaacggtgataatggagacgttactggagaaagagagttagcgcctatcaagctttcagctattgaagcaatctttacaagcgaaagagttgaggacattgtatctatctccaaggattcagttcttatccttggtcaaggcaacatgtttctgtatggaacttcttgaatttggttctttatcatgcatgggcatggttcaagactttgcagctttggatggtcttttggctaaagacaggatgagttttggtgattttgaagatgaacttatccaccagtccttgaagtcgtgagctttactatttattaatcacagtaagcagatgaaaaaagctcatgttttttcagaggacagcaagaatctgaaggtgacgccagattatggacggaccacgccgtaatgaccctattgctctgcatgcgtactttacatgcaaagactggcacaattcttgttgatatgacttggaaagagcaatgctgccaaatctattcccagtctcagttgtcgtggaaagtggatcaccatgaggccattcagctatggaataatacagctggtgctagactgctagtgtaattcagggactggacttgcggtgtagtggagtcgaggtttgggcatgttacttactgcatactacctctgttcttaaatatttgtcacccgctagtcatttttgaattaaacggtgacaatttaaaaagaacggagggagtatatcaaaaaaggaataatgtagtactcttgtaagagttaagatggaatgttgaaaggcgcgactttgagccattcttatcattggttttttattgctgtatttttttttgtgacattccactattccggtattcccgaatttgcagctttggatggtcttttggctaaagacaggatgagttttggtgattttgaagatgaacttatccaccagtccttgaagtcgtgagctttactatttattaatcacagtaagcagatgaaaaaagctcatgttttttcagaggacagcaagaatctgaaggtgacgccagattatggacggaccacgccgtaatgaccctattgctctgcatgcgtactttacatgcaaagactggcacaattcttgttgatatgacttggaaagagcaatgctgccaaatctattcccagtctcagttgtcgtggaaagtggatcaccatgagggccattcagctatggaataatacagctggtgctagactgctagtgtaattcagggactggacttgcggtgtggtggagtcgaggtttgggcatgttacttactgcatactacctctgttcttaaatatttgtcacccgctagtcatttttgaattaaacggtgacaaattaaaaagaacggagggagtatatcaaaaaaggaataatgtagtactcttgtaagagttaagatggaatgttgaaaggcgcgactttgagccattctcatcattggttttttattgctgtattttttttgcaaaaaaaaaaaaaaaaaacccgcggcc

SEQ ID NO: 53011 - DNA, 247 bp, Zea mays
  Clone ID: MRT4577_148344C.1
tcgttttttcaggggatgtgctgaatgagtacagcaggaacggggaaacgatcgaccccagcaacacctctcagagggctagtgctggatagaatctataagcactgagtctgaagtaccgactagacgagaatctctaaggcatagtgagagagagagagctgcgaatacgctcctcgtatctgtgtagaatatagcgcagatgtacacatgcacagctttggggtgagacgggcaaaacctgcat

SEQ ID NO: 53012 - DNA, 368 bp, Zea mays
  Clone ID: MRT4577_148345C.1
caggaggaggtaaccactaatagtttagttaccaaataaacccactattatcttgcatgctatatatattattattattaatcggtttgtgtaattcatctaatctaaatgatgaatacgttagtacatgatgaaaaaactcatatttccagtaagcagccaataacattggcataaccgaccgaaagggaatgtggcaactaaacactactaatcaatctttcttcttgactaaaactacatgtgggggggtcttgttcccgcaacccaccgtacttgtggcgctcatgtccgcgatcccaacgacagccataccgttctcttaccacatatcagcggcaatggccccgtcaatatagtaagcttcg

SEQ ID NO: 53013 - DNA, 1056 bp, Zea mays
  Clone ID: MRT4577_148346C.1
ttctagagacacaatttttttgggtttcagatggtggacatactgtacatgttatgtccgcagttgagactgaatcccctaacggtgataatggagacgttaccggagaaagagagttagcgcctatcaagctttcagctattgaagcaatctttacaagcgaaagagttgaggacattgtatctatctccaaggattcagttcttatccttggtcaaggcaacatgtttctgtatggaacttcttgaatttggttctttatcatgcatggtaagtataatcaaatcaccgtttttgcgtgttactaacaacaattgcttcagcatacgcccttgagtttcatttgatatcaggtggatacctcactgttctttaaggcatggttcaagactttgcagctctggatggtcttttggctaaagggctgctgagtttaggtgaggatgctgaagggcttatttgtgccagttaatcgtgttagctatgggggcaatggtgaaggtgattttgtttcgacttgtaagctcacaactctgagggtaaaacagagttcaggaagctattgttctttttcgttggcatttcaaaatgatgatcaaaagtcagaaggcagcatggaattgctgaattcagtgaaagctatttcgatccatcctctttccaataacaagtttttggtactggattcatctggagtgttgcatgtcttcattttttcaacaacacaaatggtctcaagaggtgccatcaagcaatattctgaaaatatccatacatatcgcttgcattatcccatgaaagtgcaattatctgctgtcttttcagttacctctataagtgagttcttgttctgaatttgctgtcttatttcacattatggtttaattcattaataaatatgttcagagtgtttgtgcagagacacaatttttttgggtttcagatggtggacatactgtacatgttatgtccgcagttgagactgaatcccctaacggtgataatggagacgttactggagaaagagattagcgcctatcaagctttcagctattg

SEQ ID NO: 53014 - DNA, 373 bp, Zea mays
  Clone ID: MRT4577_148347C.1
cgaatgggaccctcgagccggccgggacagcctccctttgctgcaaagcgggcgtgaaggggcctccgacatgtcagcgctcgtcatccaatatttgacacccaaccaactccgaactctcccgctacgccaccaagcgcccaccgcgagggctcaaaagatagactaccttttcagcaacaagcctgcccagaagggcaagctcgatgcggcatcaacctcttatccagacatcaacgacgagctcaccaagccgtatggtcctgacaggaagatctacctgaccaacgggctcatcaaccggacgaaggagcccaagaacctcaccagagaaaagcttgaaaactacggggggggggctaccgacccgaac

SEQ ID NO: 53015 - DNA, 1746 bp, Zea mays
  Clone ID: MRT4577_148348C.1
ccacgcgtccgcgttttaggagagggttttaagatgtcatgaaatgattcaagagaagattgctgtgggaagcattgtcctaaagtctgctggatcatcaatttcctctgtgccacgaagccccataggcgtcctggatgccgctgcctgtctgagtcaacaaagcgatgatgctactgttggatctcctgcagtatgctaccatagttcttccacgagcaagaggagaaggatcactagacgtctactctagttgtggtatgcttcaggtgtgctcctcaccgttctaggagtttttgattggttcattcatcttaaatttagtttggccgctcaaggattatggtttcgtcaagtagttgcctgaatggaacaacaaaacatgcacactactcagtgttccatataaagagagagagagaaaaaaaataacaagcagcgtcctgcgagccagtgttgcgattccagttcatgcaattggcatccgtaaggggaatgcaagagcaaaaccctagagtctagggatgctggtgtaggtagagagggggaacaagggatttacatacggcatagagatgagagctctctcgtaccattttgtaccttcaattcgcaatgaactttaggcaaggattgccttgggcaattgaacatttgtcgggtgagaagaatccaaagatggatcggtagaggaatagaacaatttgatatatttccataaactacagatatgttttatttttcttaaaaaaaaaaaacaaataagggtggacgttttaaaggatccaagcttacgtacccgtgaatgctacgacaaactttttctatagggccacctaaattaaattcactggcccatgttttacaagacgggcaccaacgagatcgtcgcgctcaagaagatccgcatggacaacgagcgcgaagggttcccgatcaccgccatacgcgagatcaaaatcctgaagaagcttcaccaccagaacgttatcaagctcaaggagatcgtcacctccccaggcccagagcgggacgagcaagggaagccaattgacggtaacaagtacaaggggagcatttacatggttttcgagtatatggaccatgatctcaccgggcttgctgatcggccaggaatgcggttcactgtgccgcagattaagtgttacatgaggcagctgcttacaggcctgcactattgtcatgtcaaccaagttctgcatcgagatatcaaaggatctaaccttttgatagacaatgagggtaacttgaagcttgctgattttggccttgcaagatcattctcgagtgatcacaatggcaaccttactaaccgtgtgatcactttgtggtatagacctccagagttgctacttggaagcacaaagtatggcccagccgttgacatgtggtcagtgggctgtatttttgcagaacttctcaatgggaagccaatattgcctggaaagaatgagccagagcagctgactaagatcttcgagctttgtggtacccctgatgacacgatctggcctggtgtcacaaaaatgccttggtacaacaacttcaagcctccccggccattaaagagacgagttaaagatttctttaagcattttgatcgacatgcactggatctgttagagaagatgttgactttagatccatcacaggtatgctacattgcgtgaattttactgaaagtttaatttgtttagtcatttaaatggttagttcctattccgc

SEQ ID NO: 53016 - DNA, 346 bp, Zea mays
  Clone ID: MRT4577_148349C.1
gcaaaaacaagggggaagagggccttcttagctgcttttcaggtttgctgcaaattgcaaggcaaactttatacaaagttccaaacaaaaacccaaaaggggccaaagcaggcaaagggcaacacacacctacctaattttgggcgaataaaacctgacaattgggcatcgacggggaggcacaaatcaccatattgaatcacacaaacattaaaaccgaccatacccggacaggacccaaacaaaagctgccactgggcacccactgtttttaaaaaaacccaaaggccaggtattttccggccgacttcacgtttggtccaactacccgcttgctggtgctccc

SEQ ID NO: 53017 - DNA, 492 bp, Zea mays
  Clone ID: MRT4577_14834C.1
gcggccgcccgggcaggtacaagctttttttttttttttttttttttttttttttttcttttttttttattatattttttttttttaccatcgctatttaattggacaaaccaaaaaaaaaaaggggagacaaaaaaaaaaaaaagggccaacccaagggggggggggggggcacgggcggccggcccgaggggggccgggggcgaaaccaggcgggggggagggggggacaaggggggtcccggggggaaacaaagatgcccgcacaagggcacaatcgggcgcacccgttagcataaatattaaccccaggggtgacaaaggagggagccgacggccaaaaaggggggggcccggacggcctgggggcgagccaacaaaccgccccggccggcggcatcatggcctcgtcccccccggggaaaccggcggcccccctggggggaggaagttcccttactgggggacagactggttgcgctctgtcgcccg

SEQ ID NO: 53018 - DNA, 752 bp, Zea mays
  Clone ID: MRT4577_148350C.1
gacgcctgcaggtttcggtccggaattcccgggtcgacccacgcgtccgccgtgctgccggtgccgcccattgagttcggagtcagtccaaaagactctgatttcagcctgccacccgggtctgtttctggtcctgtagggaatccagtggccaagcttcaggacgtcttggctagtaatgcaggactgacgcagagtattcccatcctgcggcgggatcaccacatgcagagagccatcggcctctctcccatgtctttccccaccgcagacctcacactaaagatggagtctgcacgcaaggcttgggaaaactcccccagtttgccagagcagagctctccaggaggtgcaggctcgggcatccagcctccatcctctgtgggcgcctccaatggggtcaactacagctcctttggtggagtgtcgatgccgcccatgcccgtggcttctgtagcgccttctgcttcgataccaggcagccacctcccacctctgtacctggatggccacgtgtttgcaagtcagccccgactggttcctcaaacgatacctcagcagcagagctaccagcaggccgccactgcccagcagatcccgatatcccttcacacgtctctgcaggcccaggcccagcttgggctgagaggtgggctccccgtctcccagtcccaggagatcttcagctccctgcagcccttcaggtctcaggtgtacatgcaccccagcctgtcaccacccagcacgatgat

SEQ ID NO: 53019 - DNA, 444 bp, Zea mays
  Clone ID: MRT4577_148351C.1
ctggaacatgtttgctttatatatatatgtttcttagttcacaaagagaaaaggaaatagtactcttattaataccatagtcaccgagcttaatttgactctatcaataccataatcaccaaaagcttgatatgcataaatatatgtgtgcgctttatatatgtttcatagttcatttgtgcgtggaagagctggatcataaggaaaagaagcacagagcgtgtcgctctcattctcctaaaatcttccaaggttggagttttaatgatgtggaaggaggagaggctggaagccgtggctgagacaggcttcccatacttggtccaaatccgagagaagaagggatgtgccacactcatgcatttcccatccttctaaggcgtgcaatatgccggccactctagttgcactcatcgcctttctcgggacccgttctcacaggag

SEQ ID NO: 53020 - DNA, 152 bp, Zea mays
  unsure (1)..(152): unsure at all n locations
  Clone ID: MRT4577_148352C.1
ccccggtcgacctcacgcgtccgtacttgctgcttgcagtaggctctatttgtgtatgtctgcngntatacaaaagcaaatcacggggggggnncaangcnnnnggggggcggcagacanacancaaanagagccccggcaagcagcaagga

SEQ ID NO: 53021 - DNA, 369 bp, Zea mays
  unsure (1)..(369): unsure at all n locations
  Clone ID: MRT4577_148353C.1
cccggcaggtccgcttcgcggtattcccggggtgtcacacgcgcgcgatanttgcccaactctgcatatcaccgcagcccgagtcctgttgttgagggcggacccccgactagtcgcgccgcgcggcccttggcttgatcgaaccggccgggatggcggtgtcggaagacctctgggcgagagctgtcagggtgcgcggccatcgactgcggggatggccccagctcgaggcgctggctgctgacgttaccacccgctctggagcgcccatgggctcatcaccaggccgcacctcgttaaggaggtacatatgcacccctcttgcaagctggtgcgggacggcatcacttcatcacggtaccaggcaac

SEQ ID NO: 53022 - DNA, 300 bp, Zea mays
  Clone ID: MRT4577_148354C.1
cccccttttataattaacccccctcaacagaaaacactggggggatttttgaatcacgtagcacgggtaccaacaccctggacctctagtaccacaccttgcatttcacgcctacggcttcctttctcccccatcccattgtccatgggtcacacgcaaaaccgtgcccggtacgccgagccctgagagaagcctaatgctgcaagcagcctagctcaaagactaacctaaagtcaagtacaccaaacataccagccatggggcctaaaccgaaccgttatgccctgccattcacctggc

SEQ ID NO: 53023 - DNA, 343 bp, Zea mays
  Clone ID: MRT4577_148355C.1
ggagttcgttgaggagtcacagagaaagtttggtgctactggtgaggcaaaggtttccttccagggttcgtcaggaacgaggcgtgtcgcaatctgaagcctttcgtcggttccgtctagctgcccccctctgattcggccatggagcggcagtccagcatccggctggtcgcgctggagaagctgaggagcttccgggggatggagaagcagaagagcttccgcgggatcatgtccctggagcggctgaacaaggacagcccggtgaaacgcggcgacacgccgctccacctcgcggcgagggccggtagcgtggcccacgtgcagaagatcctcgcggagc

SEQ ID NO: 53024 - DNA, 611 bp, Zea mays
  Clone ID: MRT4577_148356C.1
acttgactatgatacacggattctagcgaattactaacagaccatgttggtagtttctaatcgttagaggtctagagaaatggcataggaagctgattatattctgcactatttctttacaaccactcacgcctgtacaacataacttattttactcttcctacatacctaactcccacaggttcacgtttatccgacatagaacactacgaaatagcgaaggagaacccatattgaaacctaactataacaggaccggtatggatcccctcaataaatactatgaagaacaatatgctgcgtagaactatagctggaatccagtgccataaagaatgtaaatctatatagaggattatatacagaatctaacttaagaataaaagaactgccataaacataggaaacttctatatggatagcctatactctccattgatattgaatccgattctaaaataattctttataaagccacacataagatgaccgatttataagcattatgaatatagatctaacctgacttgctccttctgtatgcatatatactctagctacgccataatataaaaaattctctctactacaactgtaggatgctgatcata

SEQ ID NO: 53025 - DNA, 361 bp, Zea mays
  Clone ID: MRT4577_148357C.1
aaggcgaaaatgcaagaaaatttctgaatatttgatctaaaaaacaccagggctctttgctcgaggcccgcaggcaaagggaaaggaaagtctactatggtgtggcttcaacaagaattttaaccacactttacctcatgggaaactaggaccccatattggaccaacaggggctcaaacaaaattaggaattgagttctcaggagctgatatggcccaccatctggatggataatcgagtgcacctgttcacctacaagcatgggccccttggcaaaggtgaaaagggcatctggacggaaaactgggaaaatgatttccctgacccacaaacccatcgaaaagaaaagagaggggctcg

SEQ ID NO: 53026 - DNA, 698 bp, Zea mays
  Clone ID: MRT4577_148358C.1
gcaacgcgtaagcatgcttgctggccagcttgcgtggcccatggaatggtttgccgctggctttcttgggcctgggcgtagtatcgatcactcttacactcttgctggccaggatttgctggttcagcggagctgagggaggactccatccggtgaataatgacaaggatacatggcttgtcaaggatatgggacctgatccttaggcgaccactgtgaaggcaaacacccttatcgctgcattgtccttgatgtggatcaatgacggtatcaggtctcagacagtgtctggaggcatccagatgataccttgatccgtacccatagtgaggagatcgaaagacctaacaagcctataacggtagcagggtgagcggactgatgttgctcattacaatacagccatattcttgcattttactctgacggatgcgatgtgcacgtggtggtctgatggagaaaatttggacactgactgagatgtaaagaacataattatttttatgggaccatactttcaagtccaagatgactatctggtgtgctattgtgatcctgaatttatggccaagattgcaacggacattgtagattactagtgactgtgactagttgtgcatgcgcttgagcgtgctgatgagagccaaacgcgcattctatttgaatattatcggactgaaagatctagcctgtgtggc

SEQ ID NO: 53027 - DNA, 530 bp, Zea mays
  unsure (1)..(530): unsure at all n locations
  Clone ID: MRT4577_148359C.1
gtacgactctaagctccaaatgatcagctgcaataattggggccacgctccatacataactgagtggccaaacgacatcggaccactttggcgcccagttccatgggagagcatcttgagggcccttggcgatgttcctgatgagtaacaatgaatgcttgggtgcccactagctctnacggtagtcgtaagaatacagattccttacatcacaccaagacgtgctataggctgggacacatgttcactgcactgacagaatctgaatgacattgctgataatccctgcttccacataaccttaatcagatggacttaaccaagcattctttctactaagatcactaaacatatctccaataaacaggtacctataactcaatctatcctctaaaatatgtgaaccctcacccaactctgctttcttatctggccaggaacgcattatatggactccctactaactagcgctatatgatagctggtccctataactaagaggcagggaaaaacctctacaagaggcgagc

SEQ ID NO: 53028 - DNA, 1295 bp, Zea mays
  Clone ID: MRT4577_14835C.1
agcgtggtcgcggccgaggtactttttttttttttttttttttttttgtaataaattacaagtaaagcattacgcatgaagtgtgcatgcacacatagtagtagtataaaaacatgattttgacgacacacatatactgaactgcttattaaagcattattacattaatatagcttatttataaatcacaccgaccgaagtttatcgagagactatggacgatatatcgctcagtcatcgtccttggagagcttcctttccgtgacctcggacttgaaaccgaagctgttgacaccccgcgtacctgcccggggcggccgctcgagccgcccgggcaggtacacacgagggtgctaacaaaaataatctgaaacatatatggttcagcataacagcgacaagatagtcatacagagccctgagatacctcactcgctaacagaaagagacccctgcctatgaggagacctgctaacaatggggcttgcactccttgatctgttgacagctggggaacgcgacaaagatctctcccgaggtcgaggagccggggaccttgaatagtgctttcgcttaggtgctggcgagtagcttcggctttgggaccgtgatctacccctaggagaaccgttcaacccaggtgaccttgagcgcaacctcccatcataagaacggcctctgccacttattttttccctggccctcatgtcagaaggcttcttcctgttttcctctgcaaaaacaacagcaatttcccttccaagcagcatcttcccatccatatagtactttgcatcagaagcatcctcaggatcaaagtattggatgaacccaaatcctctaggttcccgagtgtagtaatcctttggcagatatatgtctttaacggggccaaattttccaaatggtctacgaaggtcatcaggcctacaatcccgacgaagattcctcaccaaaagactagttgggaggtccctatcagtatcacggcctccataccgaccacgaggacttgggctgcgagttcttctcctgtagcctcttggtggcgatggactgtgattatagcttctccccatgttgttctcggcggagcaaatcgggcgagggcactggcggcagactatcagcaatcgccaatcaggcggcgcaatcctctccgctctggaaccggaggcgtacctttcctctttgtctagggcacgggggagggggggggggggagcggctggttgtctcctgtctccggaagcttccgaggccagaaagcgcgacgggtgtgtgaaagaggatta

SEQ ID NO: 53029 - DNA, 688 bp, Zea mays
  Clone ID: MRT4577_148360C.1
cattgggacctcgaggcggcgggaagaagtcaaaaaagggctcagtgtcattggcctgtgcgcgcgtcaagcttgcttagctagacggcatggcctccctcggcgccgaatgagtgaattccgcggccatgaatgtcttcgccaggcagctccatactccggaaggaagctacgcgtcgccaggccgtgcttccgctccatgcgaaggccccgcacgagctgctgggtggacaagaacggcgactagagcgcctactttgacctctacgacatcaggaacaccaccggatagagtgaccactaccgctctgacgcgccgccaccctacaacccactacaaagaaaggtctacgagacgttagcggatccgtacaccaagagaggactgctgctcaagttcctgctgcagggagtgcggctcacttcatggtctacgtcaacgtatcggtgttactggacctcctgtcgatcaagaagggacctcaggagcagccgcagccggtactcgcgcggaaagatctaagctcagcttctccatttgcatgggctagtagctggctttgaactgctagagccggtcgatccgacgcaatcgccatggatcatctctctatcttgatgttacgctgctcataatctggtatatttgccattcagctattgtgaactctttggcatacatacaata

SEQ ID NO: 53030 - DNA, 126 bp, Zea mays
  Clone ID: MRT4577_148361C.1
gcgtggccggcgatgcggctgtgatcacggtggcgaaccagtgcccgttcaccggatgttctttaaacgtgccggagcgcggcattcggcggctgaaccgcggctagagctggcggatcacggccc

SEQ ID NO: 53031 - DNA, 370 bp, Zea mays
  Clone ID: MRT4577_148362C.1
ccgccaagggatgttgctttctcagtcctttaaggatagaacattacaaggcatttccctttaaaaacctttaattttggaaacacccccctggcggccaaagttttacaccctccctaaccagggggggcctaaaaatccggcaaactggttttgctgctgggggggcagggcttgcaattccgttgctggggggctgaggctttttgccccaataaagttgtcggggggacgggaagcccaaaggttgctgaaagctttgaggcggttgtagtcctccccaagggagaggaagccccgcccaccctgccgaggggtcaggatccggcccatttgatgcaacgtttggggccttaaattgccggcctgt

SEQ ID NO: 53032 - DNA, 343 bp, Zea mays
  unsure (1)..(343): unsure at all n locations
  Clone ID: MRT4577_148363C.1
aaaaaaagggatgataaaaacatagtacaagattaattgaaaaccatttgattaaaagtgtttgaaggtacataaaacatgattaattaaactatttttttttgcaaaaagtagggggtgggggggaagaaatagtagatggggcaaaaaaacaaacaaaaggattattatttagnaagaattggtattttnntttgccgacagaaaggaggggtattttacgcttgatggttgtagacgtaggtgaggttatatttaccgcagtagtggaggtagaagtggttggtcatgaagatttttgtgttgaaattggggttggggtattttttgaggaggngggtga

SEQ ID NO: 53033 - DNA, 156 bp, Zea mays
  Clone ID: MRT4577_148364C.1
gtggacaggaggcatatttttgtaaaaggacaacaacagatgagtggtcatttggtccttctcaagggtcatgctagtttgcgtactaggttacctaggagaatatatgctttatgattcacaagcaatgggattgcttttttgttaatatgattt

SEQ ID NO: 53034 - DNA, 249 bp, Zea mays
  Clone ID: MRT4577_148365C.1
gaacccagggaaaatacaggggccagattgtaaccacagataatgataagtcaggtaggtccgacacccagaaaccccttgcacgctttagcaaaagccagcttaagccaggcgaatgcctcggcagcaatcctttggggacacacttcttttccgattaaagttgagacagcgcggggttcctcctccaaagccaaggaagttccttggggcccaacatccttcagcgcgcaaatcttgtttctcccc

SEQ ID NO: 53035 - DNA, 284 bp, Zea mays
  Clone ID: MRT4577_148366C.1
taattcccatctcgacgccactcatacgcttgcctactcatcccactccacagctttttcttaaccattactatctaaaacatatggacaggtatacaaagcaacatagctaaggcacactaatacatataacaccaaccctcatttcagcttcctctcctagacctctgacaaccattccctctacaatctctcgttacccatcgacgcgtatatagaaatcacgatcatactagcaacaacaacacgaacgtacagcgtatcttggctcctgacattcacca

SEQ ID NO: 53036 - DNA, 414 bp, Zea mays
  Clone ID: MRT4577_148367C.1
ggccgctttttttttttttttttttcttttttttttttttttttttttgttttctttttttgtttttttttttattttttttttttttttttttttttacgacgccacctgacgtggtttgcccaaaaaacacgggggtagggttttacacaaagatacactgaacagggctgcacacgcacacgcggggggaagggacctttcccaaaaaaaaaaaaacaacgcgaatgacggccacacaattgggtgacacaaaccagcccaagttcaatttttaaatggatggggctccaactgtgaaactactccgggcacacgcgttatttttcaaggattgtgcccccctgttgtgttttactcgaggctgacggggaggggattgtggatgcactccttcgggcacttttaaatggg

SEQ ID NO: 53037 - DNA, 410 bp, Zea mays
  Clone ID: MRT4577_148368C.1
atagggggttgggtttatttttattgtataaccccccaacccctcctttggtgatgtgggagaaaaaactaatacacaggcgaaaacacacacaaactaaaaaaggcaagcggccaaaaccaaacaaaaacaagcgaaaaagcaaagtcccaccaccccacctggatccgggaaaagtgcacaatctaacaccacaaagacaaagaggaaaagaagaaaacccccacaagccaacagatgcctatatcaaaaaggcaaagggatgctggggcgggcgctgaaacacattaaaggaacaggaggcccatggtgaaacagaaaaaaaggggatgggggaagaaggagacacacactcctcatttgcaaacggggaaacagccggtaataccgaaaaagaaccgggagaccca

SEQ ID NO: 53038 - DNA, 387 bp, Zea mays
  Clone ID: MRT4577_148369C.1
atccaaccatacacacttcgaccaccgctttcttatacacttgactttctctcaccccagtcttcctaaaataaattgtacttctcatacccatctacaacctatcactcccctattccaatccctcttattcttaaacctctaacggtccttctatttcaaaacttcctcctttttcccccacccaaaccaaaacttcaccactgcccaacctctactttatccaatcatacctactcatgcatcctacataacaactcttctatactctcacctaaaacactttccccttcccttactttacaccccctccaccactaaaactttgtaattacctaacttaaacccctatccctacattcccctttttccacattccttaacacc

SEQ ID NO: 53039 - DNA, 256 bp, Zea mays
  Clone ID: MRT4577_14836C.1
tcgtcattcatttcctcactcatcgaggctaggcaagctgtccgtcaagctcaggcagtctggcgatacgactataagccttcagtgcctaccccttcgccgtctatagagaaggatgccatcgctgatgatgacgatgtcgtcggcgttcgtgtaccggttcagcacggccgtcgagtgtgctgagtgtcagcgcacgggcgtcaccctttgatgcgaactcgatagctccatcggctgcatccatctcagcgac

SEQ ID NO: 53040 - DNA, 254 bp, Zea mays
  unsure (1)..(254): unsure at all n locations
  Clone ID: MRT4577_148370C.1
gtctgcaaccaaacaagtgttctncanctgcggtttggcgtttgttggagtgtggagagcaaacaaatgttatgcanctgctctttgccggtggttggagttctcggctccacactttcagaaaggattcatgtatacataaaatttattatatagagaggttgcttcgtgaaaaaaaaaaaaaaaaaaaaaaaaaaaaaaaaaaaaaaaaaagaggaaaaaaaaaaaaaaaaagggccgccaaaataaatttg

SEQ ID NO: 53041 - DNA, 240 bp, Zea mays
  Clone ID: MRT4577_148371C.1
agcacatatggcctctgcaggatgctcgccccctgccacttccctgccttggcctactgaatgccataatcgtaatctcatagagaagtgtattcaggagcgctacaaagacctccatctctcttgagctgccttttgctatgggctacaccagtgctaggatagcatgggtgttgctccatgcctacattatagcggcacatctctggactctgcattgtctatgcctccatgccctta

SEQ ID NO: 53042 - DNA, 260 bp, Zea mays
  unsure (1)..(260): unsure at all n locations
  Clone ID: MRT4577_148372C.1
gcagacactgctctctctctcgccgtcggcgttggagtcgtgcggagatcgtcggctatcgatcgccagcggtcccagtggcatgattcacaagacgtgtcgagatgtcttacaataacgcgtcccacctggtctcctgagacgtgatcgacgggcgcatcgggtctaagacgtgggtgatcatgaagggggagaaggacgtcgttgggatggtgtgcgcgtttgatgtgtacgctaatatggtgntggaggacgtgagg

SEQ ID NO: 53043 - DNA, 313 bp, Zea mays
  Clone ID: MRT4577_148373C.1
ttcttaagcagtggtaacaacgcagagtatttttttttttttttttttttttttttttttttttttttttttttttttttttttttttttttgaggaacccaccaaaaaaagggttggtccgggagcaccccacaaccaacaaaggggtgcatggcacaggtaatacccccgggcgggggggggcggacaaaacctttgtaattgaactgggccttaattcaggtccaccgcgcccttgtaaacctttctggcccgcccgggttccttcgggccacccaaagaggggagggctttgaatagactgaaacctgg

SEQ ID NO: 53044 - DNA, 846 bp, Zea mays
  Clone ID: MRT4577_148374C.1
ccccgcgtccgccccgcgtccgcccacgcgttcggtcccccctccccaggccgggagcgccggccgacaaattactaggtgcttaatttaactagtggccctaggcgtgaaacttcaccagctccgccactgcccatggccaacggccttccggaccctcgctgcgtcgtcctcaccgccgacgctgcccgatccctcgtcgattccgtcgacgccttcctcttcgactgcgatggggtcatttggaagggagataagctcattgaaggggtcccagagacgatggagctactgaggaaactgggaaagaaattagtttttgtaacaaataactctagaaagtcaagaaggcaatactcaaagaaattcagatcacttggacttgaagttactgaggaagagatttttacatcatcgtttgcggcagccatgttcttgaagttaaataattttcctccagaaaagaaggtttatgttgttggtgaagatggaatcttggaagagctcaagttagctggttttgaatgttttggtggtccggaggatggcaagaaaaacataaagttggaggcggatttctactttgaacatgacaaaagtgttggagctgtcattgttggacttgatcagtacttcaattattataaaatgcagtatgcaagaacatgtattagtgagaaccctgactgccttttcattgcgaccaaccgtgatccaaccgggcatatgacatctgcccaagaatggccaggagctggagctatggttgctgcagtaagctgctcagtacagaagaaacccattgttggtggaaaaccttcaggctttttgatggacttcctctga

SEQ ID NO: 53045 - DNA, 470 bp, Zea mays
  Clone ID: MRT4577_148375C.1
cgtttatccgagaacaaaccgtcgtccgagttggcatctttggccaaacccagtatcattgcccaatcacagatctcctcccccctctctttctagtccctctttcttcccctctctctctctctctctctctctctctctctctcgcattacccactacctgctcctgctgcttgcttgcttgtgcggtggacgctgcggtgcggagcggagaggtgaagaaggggatgaaggaggagatggtggtcgggctgtcggcgccggggccggtggtgaggtggggcgcctcgccgccgcaggcgatgctggagaggatgaaggactacggccaggagggcgccttcgcgctctgggacgatctctcgcccgaggaccgagagctcctcgtccgggacatcgagagtctagaccttttaaggatcgatcggatcaccggcgcttctttggatcgcaaggcatcccgttgcctg

SEQ ID NO: 53046 - DNA, 163 bp, Zea mays
  Clone ID: MRT4577_148376C.1
gagaaccctgaggacatgggtcggcctaatattgtggtctacggttactgcaaaaagtgactatgagggggcaaagtgattttgtctacaggatcccagtctgtgggacagagatcagttactacattgcttaagtctgcaccatgcttgtcgtgtagataat

SEQ ID NO: 53047 - DNA, 1944 bp, Zea mays
  Clone ID: MRT4577_148377C.1
atggccctcgagaccgaagagtccgccatcacacaaagatcatctggttcctctatgggggacacgatagaggaattcagagatctcgataaattaggacaggggtttacatcggccgatcctttggaggagatcgacataggagatggtaaaactccaaggccaacttttgtgaacaaaaccctggagaccgatcctagaaataaaatgatcggtctattgaaggaatattcggattgctttgcttggaattacactgagatgtcgggattaagccgagagatcgtagagcatcgactgcccattaagtctggtttcagacctttcaagcagaaagctagaacatttcgtccagaccttctcccacgaatcaaggatgaaatccaccggctgctagaagctaattttattaaaccttgcagatacgcagagtgggtctccaatattgtgccggtggagaaggagtcaggcttcattggtttatttgaatgggttgtcatgacatttggtctaaaaaatgctagtgctacttatcagagggctatgaatttgatctttcatgagttgttgggaaacactgtggaagtctacattgatgatattgtagtcaaatcggctaagtttagttctcatgtagctgatttgcgtaaagcctttgataaaatgtgtcggtatggtttcaaaatgaacccatgtaaatgtgcttttggagtgtcggctgctgaagacaaggttattagggctgttttgacacaagagactggaggaaatgagcatgtggtgacctatctaagtcggaggttggtggatgctgaaacaagatgttatttactgtctagtcattgcactgtttccggtcaagccgatgtgatcaaatacatgttgcataacccaattatgagtggtagaatggggcaaggaattggcatcgttcttgtttcaccaagtaatgtctccttcgacttctctagccgattgaaaacttattgcactaacaatcaagccgaatatgaggctcttttcttcggcttggagcttttaaattgtatgggagtaaagcatgtgaaggcatttggtgattctcaactggttgtccaacagttggtccctgcagccgaattacatcctatcattaagcattggccttccagaggatggggattggactttataggagagattcatccttcatcatcaaaagggcatcggttcgtgttagtcgccactgactactttaccaagtggactgaagctgttgctctgaagaacatgacacacatggaggtaattgagttcataactgaacatattattcataggttcgacattccccacaccttgaccacagatcaagggacttcttttatgtcaaaggaggaagcagtgttgcatgtggaaataagtttaaatgctttcaggtttgccaggcaaaatgatctaactgtcggtgattattataattcaatgatggacaatattgatgaagtaaccgataagagggtgacagccttaggagaaatagaaaaggacaaaatcatggtagccaaggcctacaataagaaggtcaaagctaagtcgtttcaggtaggggacctggtgtggaagaccatcctgcctctaagaaacaaaaaccgaaagtttgggaaatggtcgccaaactgggaggatccatacaaagtaaaacaggtaatatctggtaacgcctatttattgcaaacattacaaggcaaagatttgcccaaggctttaaatgggcgtttcctcaagcaataccatcctaaatggattaggctctccgacgagctcaattcgctgaatgagcccagcacgggaagggtcgaaccgtacgaggccggtccgcccttgagccaaggaccgagcgtgttcaccttgatccctagctcaaatcctaatgaccccattgaaaaaattgtgcctaactaa

SEQ ID NO: 53048 - DNA, 435 bp, Zea mays
  unsure (1)..(435): unsure at all n locations
  Clone ID: MRT4577_148378C.1
tcgaggccggcncgggaaccctacccacagccaccgccgccggcgccgctctctgacccctagtgtccggatttaacttcaaacatgggggatgtctatcgcctagctgtgctcggtcgtcagctgctgagggacggtgtcgtacgagccgaacaggccgctcgcgatcgaagacgtgcaggtggcgccgccgcacggccggagaggaccgcgtcaagatcctattcaccgtgctctgccacacctaccactacacctggagcggtaaggatcctgagggacttgtcccttgcattgttggccaccaaactgacgtaattgtggagagtggcggtgatggagcaactgctgtgcaggctgcggatcatgtgattgcttgctaccaagcacaatgcaaagaaagccacttttgcaagagcgccaagaacaacctct

SEQ ID NO: 53049 - DNA, 555 bp, Zea mays
  Clone ID: MRT4577_148379C.1
ggccgcttttttttttttttttttcttttgttttttttttttttttttttttttttttttttgtggtttttttttttttttttttttttttttttttttttaatttttttttaaaaaaatcccccaaaaaaaggttgtaaaaattccccccaaaatcccctaaacgaaaattccacttccccgggggaagaagggaaatccaacccccaaaccccccccccctggaaaagcccccccccccctccccacccaaaagggcaacccccccccccccaaccaacccggtaccccccccaacccaatccccccctttaacgccaacctccccaacccccctttaattggcaacatttccccccccttaaaaccctacaccccctttggtcaatttttttccgggagccccctttttcccccacccccggtgagtccccctttttccaccttctttgtgtccccaaccgcaacctttcccctggggggaccccccgaaaatctcccccccgcaaaatccccgggaaaaattcccccccccatacctgggggggcaatttt

SEQ ID NO: 53050 - DNA, 275 bp, Zea mays
  Clone ID: MRT4577_14837C.1
gttttaatgtagaacctcaaacaggatggaacatcagtggatggcaggaggttgggaattcttgctgttaaaaataattacaaattttgcacttttttgtttgaatgttagatgcttagtgtgaagttgatacgcaaggaaaatggtccatgttacccacagttttcaggtactcctagactttaaagatgtcttgaacatttaagttcttcagcagttcacactacaccgtttttttgtttttttttcccccccgggagggtttttttgtaggg

SEQ ID NO: 53051 - DNA, 3079 bp, Zea mays
  Clone ID: MRT4577_148380C.1
atgccgacatcaatggaggaggacgacctgctgggagaagacctggtcgactacgaggcttctccagaacgcctaggtatggatgtaaatgttattacattttccgccaattgtactattatcggcgatgatgaacctgttgttgcccaatttgattttggtcctaaagaagccgcctttactaaaccaaaggaatcggtaaatcatttaaagccgctcttcgtgcacggtcacattgatgggataccgattgctaagatgttggtagatggaggggcggctgtaaatctaatgtcttattcattgtacagaaaattaggtaaacaagatgacgaacttgtcaagaccaacatgaccctcagcggtgttggaactgatagttcaatcaaagccaggggagtcacgtccgttgaattaaccatcgggactaagacccttgctgctgcattcttcgtcgctgatgtagaaggaaattacagtttaatcctaggcagagattggattcacaccaatcaatgcataccttctacattacatcaaatgttaatacaatggcgaaaagacagtagtacggataacccggtccccgagaccggaaagtccgccgtcacacaaagatcatctaattcctctgtggggaacatgatagaggaattcagagatcttgataaactaggacaggggtttacattggccgatcctttggaggagattgacataggagatggtaaaactccaaggccgacttttgtaaacaagaccctggaggccgatcctagagatgagatgatcggtctattgaaggaatattcagattgctttgcttggaattacactgagatgcctggattaagccgagagatcgtagagcatcgactgcctattaaatctggttttagacctttcaagcagagagctagaacatttcgtccagatcttctcccacgcatcaaggacgaaattcaccggctgctagaagctgattttatcagaccttgcagatacgtagagtgggtctccaatattgtgccggtggagaagaaggagtcaggtaagctcagagtatgcattgattttcgcaatttgaatagagaaactcctaaagatgaatatcccatgcccatagccgacacattgatcaataatgtgtcaggaaatagaattattagctttcttgatggtaatgctggatataatcagattttcatggccaaagaagatgcgtctaaaacagcctttatatgtccaggcttcattggtttatttgagtgggttgtcatgacatttggtctgaaaaatgctggtgctacttatcagagggctatgaatttgatctttcacgagctattgggaaacacctggggaagtctacattgatgatattgtagtcaaatcagctgagtttagttctcatatagctgatttgcgcaaagcctttgataaaatgcgtcggtatggtttgaaaatgaacccacgtaaatgtgcttttggagtgtcggctgcggaagataaggtcattggggctgttctgacacaagaaactgagaggaaggagcatgtggtgacatatctaagccgaaggttgatggatgctgaaacaagatgttatttactgtctagtcattgcactgtttctggtcaagccgatgtgatcaaatacatgttgcataacccaattatgagtggtagaattggtaagtgggcttatgcactcatagaatatgacttggcctatgaaccattgaaatctatgaaaggccaagtcgtagcggatttcatcgtagaacatcggattaatgatattcataaactagacatgtcatacctcactattactccttggactttatattttgatggatcggtttgcaatgaagggcaaggaattggcatcgtacttgtttcaccgagtaatgtctccttcgacttctctagccgattgaaaacttattgcactaataatcaagccgaatatgaggccctcttattcggcttggaacttttaaattgtatgggagtaaaacatgtgaaggcatttggtgattctcagctggtcgtccaacaagtgttagaagaatataaatgctttgatggtactctgaatagttaccttgaaaaatgttggagcataatccattcttttgacgaattcagtattcggcatatttcgagagttgagaatcatagagctaacaatctggcacaagatgcatcaggttatcggataaagcgagggagattccacgacactgaaaatctgataactggtgtagggccaattccccaggtcgcggaccgtccgcgtcgagacgccggaccgtcgggggttaccataaatgttctcttaattgaatcggctgataatgaagccgatgcaagtgattggaggacgcctatacttaattatttacgaaatcccaatatcaggacagataagaacattcggcgtacatctttcaagtatgtcttgatgagtgatgaactctaccgccgaacaatcaacgatgtcttgcttaagtgcttgggcccaaatgatgctatattggccatggccgaagtacatgaaggaatttgtggtacccaccaatcggctccaaagatgaaatggctcttgcgaagaggatggggattagactttattggagaaattcatccttcatcatcaaaggggcatcggttcgtgttagttgccactgactatttcaccaaatggactgaagtcgtcgctctgaagaacatgacacacaaggaggtaattgagttcataactgagcatattattcatagattcggcattccccagaccttgactacagatcaagggacttcttttatgtcaaaggaggtcaaagctccgtccactcaagggacgcaatctcgcctcgcccgagcccagcctcaggcaggaacagcagacccaggtggattcacgcctcgcccgagggccccctcgagcaacaggcgcaccctcgactcgcccaaggcccagttcgggcaggcttcacggagaagcgaccttggccagatcgccttgccaaccgaccagatcgcaggagcattcaatgcaaggatcgcctga

SEQ ID NO: 53052 - DNA, 1245 bp, Zea mays
  Clone ID: MRT4577_148381C.1
cctcgaggccggccgggattccccaattggccctcgcctccattaccttccccgtccccctcgtacatttcgacatccccttccccccgactctcccgtcccgctcccgccgctaccagcgattccaatccgccctcccttccgccgctcaccgccgcggccccgccgcaagcgtttcgcctcgatatctccaccccgccttgctcgagccacgctcccaccgtccaggcgtccgctgcggaggtgtcggtggcccatctgaacaggctctcctcgtcggggcttttttgcttcggagggagaggcttcctgttcggctcgccgtgagaagagcaccggccatgtcgcagactaactgggaggcggacaagatgctggatgtttacatatatgactattttatgaagagaaatttgcaggcaactgcaaaggccttccaagcagaaggaaaggtctcttcagatccagttgccattgatgcacccggtggctttcttttcgagtggtggtcggttttctgggatatattcatagcaagaactaacgagaaacattcagatgttgcagcctcatatattgagtccttcaacaaagagcaaattactttgtgattgtaaaagtacatctagatatggatctttcggttggacagttgatagactggagagaagagggctggagcacccggatgcttgccctctctgcgaccaggaacagaaaccgctcaacatcttctagcttcttgcgtcttcgcccgacatttctggcacaatattctttcaccttttggtttggggcacctctcctggggcacatgtgttgtcttttgctgattggtggaaagaggtgagcagcaaagtacataagaaatggagaaagggcttcaatagcgtcatcattttaggagcttggtacttatggatgcaaagaaaccgggctgtctttgatggtgaatctcctaccattggaaaagtgcagagatccctgcttgatgagctagcatgttgggtgatggctggggtcaagaatctggaaagtttaggcctagcaacagcccttagctctgcaggaatgttctagtgggtagtgtgtggtcgtgtttcttttgtgcctcctgatggatcagtttctgtttttgtgtttttggccgccttaagtggcctaggatgcttgtatctgtccgcttggacttcttttccccctctacttaatataatgatgcgcagtcctcctgcattttccgag

SEQ ID NO: 53053 - DNA, 297 bp, Zea mays
  Clone ID: MRT4577_148382C.1
aaaaaaaaaacttggtaataaaattacacaagggtcattatgcccattttaaattatgccccccccctcccaacagttaaattacaattttctgtaattaaaaaaaaaaaaagttttttaatttggatccccgttggggcctgcggcttacttaaaactttattaatcaaagggggcctttccgggaaacttaacctcaatggggttgacctttttcccaattcttcaaaaatttttgcccaccccctccctgccgggttgaccttttccgggtaaaccccctccttggggtggagg

SEQ ID NO: 53054 - DNA, 431 bp, Zea mays
  Clone ID: MRT4577_148383C.1
ttgggtccctcgaggccggccgggccgggatttcctcctctctcgtcgatggtcgaacgcctcttctcttcgcccacacgatgagagtaccaaatggccggtgcataccaaaatcaccctacaggcccaagaggctgactgaggaagcgatgcgtttcgtacctgtgcttcgcggacaatatggtcctccggctcatggacgagccgaacgagctcgacaaccgccagatcatcttctgcctacccgatgaatgcgccgaggaagaccactaccgcgacaaggagcctgcgtctgtccccctacaggtcccggagcttcgagcgctccatgtcagacctcacgtcaaatttccgtatgaggctcgcctccgtgcgatcaatgccctgccaccaccacctcgcacgactctctggttctgcgactgatgcct

SEQ ID NO: 53055 - DNA, 374 bp, Zea mays
  Clone ID: MRT4577_148384C.1
ggaaaacttaaaactttaaattggagccgccctaacatttcaaattttcacattacagaacaaagttccatttagggggcatgggaatacattttggggactagcaaggggggaggtggtttcatttagctacaggcatagccgaaaacaaaacaacccctttcttttggaacctagggatcgaccagcattagatttcattttcacaatagcccccccagggggactaccactggccaaggggatcctggggcatttggataagtttgggattctgctctaaaaggggggagagcttttcacgatcactaagtagactctggatgggttctggagatgaaaagaacgggtttaaggtgacccctggggcttgg

SEQ ID NO: 53056 - DNA, 389 bp, Zea mays
  Clone ID: MRT4577_148385C.1
ctccatccgttctctaccaaaacaacaaaaacggggaggggctacactattttttttccagaaaaaaaaaaaaccacccacaatagccttaaaaaccaaaaaccaaaccgatcgcccacaggatcaaggagagccgaccctacaataaataccgctccataccccaggaccttcccaccttttaccattaccagcgagaaaatcaactcccccaaccaggagtacaacaaggtgcctcctggcaaattagttatcccaagctaattccaccccataactcgactccctaaacaaaaaggacaaaacccccctgcccatatgatgaagagaactgacaataactccaccggtgccaatagccaatatccacaagaggaacagatgacacc

SEQ ID NO: 53057 - DNA, 663 bp, Zea mays
  unsure (1)..(663): unsure at all n locations
  Clone ID: MRT4577_148386C.1
aattcggcacgaggcgcgtcgtcggccgatctgccgcgccgtgttcctgccgccgtgtcctggccatgacggcggtggagctcatgatcgggccgctagagtgggcgatggatgacgagagcccaggtgtgggcgacgaggatggcaaggacgaggactgggctctcgatatggagaggaagggaaggggaaagcggaagatgtccgcgcctcggagacgctcgggacccaagcggcgcggcgccgctgcggcgatggcgcctcgggcaccatcgcccgcgcgatcacagtcagagccgtgcccggggacagccgagccttcgccagaacatggcttcaatgctgctgctgcggcggcgggagttaaggaggaaaccgggggtgaggaaggaggaaggggagaacgtggctccgagcaccagtggcagatgaggaggcggcgggaggaagccgggggctaggaggtcgtgccaccagtgcaagatggtcaagcgtctgaaggagatggtcaggtgccagtgctgtgacgagaggatctactgcgacctctgcatcaggaacaggtacgcgatgatgtcaccggatgctgttagagagcagtgccccttctgccgtggactctgncattgtacgcgatgcccttacaggatagggataagcagc

SEQ ID NO: 53058 - DNA, 381 bp, Zea mays
  Clone ID: MRT4577_148387C.1
attcggctcgagcgcacgcgatcgcgcggagatgaaccagtgcgtgccgagctgggatctggtggacgacccgacggcggcggtagctggcggcggaggcggcctaaaccatcaggtctcgacgaccgggggcgcgcaccggggcctgctcctgcaggcgtcagctggaggagcaggcggcgggggcgcgttcgctcccgtcgtcgtgcccatgtcgaaccagtactacgaggtggcggagctgacgtgggagaagggcaacatctcctaccacggcctgctcaaccgcccggcgcacaataagtacccgaccgccgtggcgccgtcgtcggctcagctgcatgccatagcaggaggaggcggccgacgactagtgagctc

SEQ ID NO: 53059 - DNA, 296 bp, Zea mays
  Clone ID: MRT4577_148388C.1
ctaccaacatacaaagcgcattaagtaccttcatgctcagacggaatattctgcatggcttatgcgacctggtctttctgccaggaggctaccgcaaccattgttctcacaatgctcatcagctacgatagcttgcctacttgccccatacctctcaccatcggtgtcgtccatgagtgaaaacccagtcgcgtaaccctacaggatccaacaggtctagcgcaacacgcgtcttaccattgtgacccttagtgctacaacaacccatactcctatgacaccagatacctttggtc

SEQ ID NO: 53060 - DNA, 278 bp, Zea mays
  Clone ID: MRT4577_148389C.1
aagtaatttgaaggtcattggcactgatgtggaacgctgtctgtccatgtgtgttgaggagaggttacgggggtttataagaagtataataaggttctctaaacagagggttgaggttgaaaagtcaagacatcatttttatccattatcctcagatgttcgcagtcatattatgagagtgaatcgagaagcaagagaacagtgggagaaaaagcaggctgaagatgctgagagaattaggaaacaaaatgatggagatggcaatgcaaatgttgatc

SEQ ID NO: 53061 - DNA, 276 bp, Zea mays
  Clone ID: MRT4577_14838C.1
gcgttccggatatagacgccaggaaaaaaagggagcgggcgtgacaccgaatatttaacgcgccttcatagataacatgctggacccagggtcccacaagggaggcacccctctcgcaaaccacaagaaagggcccggcttttttatttatgcaaaaacaggtcctggacaaaagttatgagaaaaaaacacgaacataggaacacctgaacacttaaaagagaatacttcttgaaccacaccgggtggatgtccacatgggtctcttgaccccca

SEQ ID NO: 53062 - DNA, 819 bp, Zea mays
  Clone ID: MRT4577_148390C.1
cactccatagggcgattgggatcctcgaggccggccaggtcaatagctgcagacaaccccaaccccgctacccaagtcaattcggccgggaatatgacagaaaccaccatattctacaagtcccataaccctggtggtgaaagcatactcctcatccatggcggattctccgacggcagcgaatgggatggtgtatggcccctcctcgcagagcacaattaccatctcctcattcctgatatgccctctcacggaaactcagttgatatccatccattcgagattgacgatactgtccgtcgattagcagcgctgatcaaggccgaagcgcgaggaggtctcgctcatgtggttggtatcagcattggtggccacattgccgcagctttggcatcacagcacccgtcttatgtcccttccctcatcgtatcaggcttcaacatatttacgcctaacctattcacgcctgttttaccactgtttgtttacggagttcagcgaggtagcgggtttgcgcgacagccatttgccgaatgggatcgtttttgtcggggtctcgggtctctagccttgacacaagatgtatttaatatcttgatatcatcgcgagagcttcaaacgattgaatgtcgtacgttggtggtcgctgccacgcggcctggagtttcggcagacaatattgatcattctcgccggcttttcaaaactgtagtggtaggaaacggaagtcaagttgtccagcatcggggaatgcggcacccatggaacgaggaagagcccaaggttttcgcagatatggtgaaacgctggattataacc

SEQ ID NO: 53063 - DNA, 414 bp, Zea mays
  Clone ID: MRT4577_148391C.1
agacctgcaccaagaccaacatggggatggtgttcggcgagatcacgaccaaggcgaccgtgaactacaataatatcgagcgcaacccctgccccagaaacgagcaatcacccacaacgaggggcgccactccctcccctgaaagctgctcgtgctcttagcaaaactagacaccaacatgatccatgccgtagcggagaaacatggcaaaatgggcactaggaaacaaaaatgggcacaatcacaggccacatgttcgggtacgccaccgacaaaacccccgagctgatgcccgttgagcccacgggctggccaccaacctgggcgcccccctacccaagtgggcgccaaacggcacccaggatcccttgtgaaggcgcccaccggagcataacccccccccagaaaaggggg

SEQ ID NO: 53064 - DNA, 641 bp, Zea mays
  unsure (1)..(641): unsure at all n locations
  Clone ID: MRT4577_148392C.1
cacgcctgcagaaccgggccgctaatacacggtcgacctcagcgttcggatcaaaaaacagaacttgcttatgagaggtcgttatcgagaaaaccagacaaaagacatcgtgctcgttgactgcctggttatatatattgacagagactgttgaatgcagatgccctgccactgctcatgactgaagggcttggacggatctgacgccagactccacgacgatgatgggcgccagctggctatacccctcacgcgactgacctgaagcacccatagtgcagatggtttgcggcatcaccatactactgccgggtgagaccatgacgatcgcaatataccatgctgttcgtgaacaatacttgcatcagacaatcaggatgatggacgagcagtacgctcaacatgaattataaattataattcatgttgaacggaccgctcgcgcaagaagctgatttggcgatccaactattattcaccagaaggatagccattggcactccactgtctcaaccccatggacatggatgatcgcccacaacatgctggacttgggttgactctagcatnaccagtacgagttgagcaggtaccggaccatacatctgtggcaggtccgctccaattccgtactagtactg

SEQ ID NO: 53065 - DNA, 419 bp, Zea mays
  unsure (1)..(419): unsure at all n locations
  Clone ID: MRT4577_148393C.1
cctggctccattgttggctctttgctcctcttttactgatggctgtctgcgttttgcgcgaagatccataccttaaagnttttctcgctccnttttttcccnnnttgcgggggctgttagggggctctttaacacattggagaaactctgcccgggggggggggggagccctctgtcttggggggtgttcccgccttttacgcggggacaggattgctggaagaagctcttgagttccttggccgagccttgctggagcatccttgctccaccttcttggattggccgattggcctttgccctttgtaccgactggttcgggtgctgaatgcttcttcctgctgccaagcggggagggtttggtgtgagccgactcctccatccttttggctgtttgtccttttagacgggctttttaa

SEQ ID NO: 53066 - DNA, 203 bp, Zea mays
  Clone ID: MRT4577_148394C.1
cccacgcgtccgcccacgcgtccgcccacgcgtccgcacacgcgtccggcagaatcttgagaatttgctcagaattatctatgggtacaactctttccgcgaggggcagcttgaggcaattcagaaggttgttgcaggagagtcaactatgcttgtgctccctactggtgcgggcaagtcactatgctatcaagtacctgcta

SEQ ID NO: 53067 - DNA, 370 bp, Zea mays
  Clone ID: MRT4577_148395C.1
gactctgcgctgtgatcaacgtgccgtcatgctgtcctccttggtgccctgtgctgtgatcaacgtgccgctatgctgttctcaatagtgactgtgctgtgatcaacgtgccgctatgctgtcctctttagtgacttgtgctgtgatcaacgtgctgttatgttgtcctctttagaggagtgctaggtagaagggagtattgaacaagttatgttgtgtggcacgacacatgtggtgatcagcgagtagagacctagactggagaatggttctattgttgtatatcatctaggggatgatccatgtgacacaatgtagggctaactggtgacgtgtcagtttcatatgtattctgtccaggtcaggggtg

SEQ ID NO: 53068 - DNA, 848 bp, Zea mays
  unsure (1)..(848): unsure at all n locations
  Clone ID: MRT4577_148396C.1
gctactcctcccgccgcctccgctcctcgccgccgcgcggcggcgacgtgcaatcttagggttcgtgagacggttcccgaatcctccttgccgtgcaccacaccgtccccctccaccgacgccgctgcttcccatgtcgctccgatccggcggccgccagchatccttcgagcttctcgcgggcgacctcaccgccgaygaccckgacgacatctccccscgctccctgcccsawacatcgtccgawgggcagcbcggcgcaggaggcggtytaagckcaacttgnggttccggagccccccgatccaggaggcggtttcggagggggagcagcagccgcgcgttgagggcggcggcaactcggccgcsgcgttcagggtcctggatctkaagtcgactkcmgagacggtgttcbaaaachcggacgcsgaaaggtcttcngcgagcygcgttacctatgttggcgttgagctgaggcagargagcctytcccggggcgggagggttgtggcagcctccgcsgattatgggaccagcagcygccgaacacagcgcsggadawchccgcagctkcygckgctgtttgcggatgttgsawyyatkgsgtkgcggcctgaagcaaatwgcggcatgaagaagaagccggagaaggagttgtcgctggacttggarwwgtacattaaggacaataacaaaattctcggagaatttgagccccttgacaaatcaccattcagatactttcttggggacyatatkgtggtaattcactgagaagcacaattkcagttggcaattagaagaagccgcacggtgtttacaacactatgtttcatgtcccayggaga

SEQ ID NO: 53069 - DNA, 944 bp, Zea mays
  unsure (1)..(944): unsure at all n locations
  Clone ID: MRT4577_148397C.1
ccggccgggctccctgactctgactgtagcggtgacctaacctgaatcacctactcctgttcccctcgcagactcgcagccgccagccctgatgagcctcctgcttccacagtatccattccccaatcctagcgtcgtaggaaccaccatccatggtgacggctgtggttacacgacaacgagccaccgcataggcacccacgacagaggctcactgcccagtgcccatggccaagttggaggagcatagtcgatctaccgccaagccgtcatatggtggtcgcccttgcccagccgccgatctaccacgccggaggaccaccaccgattcaccggcacaccacatgcgcccacggcggaggtccacctatagttgtcacccagtccctcatggtgaacaccagtgattcacttccatctgagctaggctcctccatccacagaagtacatgatgggttcaattcagagatgttgaaaggaaatcttgtcctaggctgaacctgtctgacgaacctaaatctgttcaaaatgttcatactacttaaatgtccagaacatggacaacgggggtcatgtggctgtcaagttcctcgacaaggcaaaggttcacaagaacaaactagctgagcagattaggagggggatctctgtacgatgaagctaatacatcttcccaatgtttttcgtctgcatgaggtaaataaagctttaactttcaatgtaaaaaacacatatattcttttttcagaattccgtttgctgtatcggaatgcatgtcctacaggtcaaccattttatttggattgttttcccccctataactggtgatgggaaagtaaacaaagatttactttatgctggaattcgtgatgggtgaagagctcatgatatcattgtagggcattgcttntcttttctctatcatttgacctgattcatcacg

SEQ ID NO: 53070 - DNA, 183 bp, Zea mays
  Clone ID: MRT4577_148398C.1
cgcctctaatgtgacttgtactgcccttgcgctgttgtggaaggcgtctccgcttacgatctttgtcatgctgatcttggcgccttggctgggacctcctgccctcgtggtgttcaggtggatcatcatcacgcagctgcgctgtctgcggcgtcggctgtgttcggttgctttcttcagtgg

SEQ ID NO: 53071 - DNA, 259 bp, Zea mays
  Clone ID: MRT4577_148399C.1
acatggaacaacttgttgtggtgatggggaggacggggataatacatacactatacacgacgaacactaacagcccgcggcggctgactacgtacaccgtacacctaccaacagggtgggctatgactatgaggctacaataacacaggcatgataataatttttaccaccataccaggcacgcaccagctactgggttacaaattgttaaactctttatttatctaccattggtttcaatgcctttctgctttgcctt

SEQ ID NO: 53072 - DNA, 336 bp, Zea mays
  Clone ID: MRT4577_14839C.1
ccaaattccaatcgctcaaattcttcttaccagaagtgatattgcagatcgcacatcatacataaacgcccaaaataccttttcccagctgctagacatgggagtactacccgttgtcaatgagaacgacactctggctgttgcggaaatcaaatttggagacaacgataccctatcagctataacagcagctatggtaaaagcggactatctctttctaatgactgacgtggattgtttatacactgcgaatccgagacacgatcctaatgcacaacctatagaggttgtttctgatatatcatcacttgaagctgatgtgtccacatctggatc

SEQ ID NO: 53073 - DNA, 637 bp, Zea mays
  unsure (1)..(637): unsure at all n locations
  Clone ID: MRT4577_1483C.1
ctcatcctctttccgttcccactcctatcctctcnatctaaactgccatacatccgctcgctccctgtaccggccggcaccggcgcccgtcgacatgtctgcctcgtcctcgacctcacagtccctcgcacccatcctccaagagcagcctcctcttcctctcatccgttgcccctggtgccacaacggcgacatcgagtggtgggtttcccggactcccaagaaccccgggaaacacttctacaagtgcgagcgtcactgggttagtgaatacttttcctgtcccggattgatcatgttattcgaagggaaactctgcatgccggtcactgcagatccaccccaccccgcacataaacatcgatggattcgggtgcgagccggtcactgcagatccagcacgggctgagactttggggatgaaggtcggcgactaggcaaggatcctcggcggcttggtgttgagtctttcctcgtattttctctctgcaattttttgtttctcgatcgtattttctttccttgttttttctctgaaaatttctttcctaaaaatttctcgctgaggttttctgtttttttcgccaactctgacaccattcggtatgcaacggcggcggccagcagcagaagtacg

SEQ ID NO: 53074 - DNA, 354 bp, Zea mays
  Clone ID: MRT4577_148400C.1
gggtggggtttttttttggttggggttgggaaccagactaaaaaacaattttttttgagaggggacttgggttgttccgtaaaaagaacaaaaacagggggaaattcctttgttccaagcaaggtggggcaggctttttcagttcgggttagttacatcaatttaacatgggctttactggatacccacttgcattcaacaatgctttagcatggctcggtttattgggggggttgagcattggcatacatcagtcaagaatttggttggaaaattcagcctgggtaattccgttaagggactgtcttaaacctttggccaaatggcaatcatgattggttctctttaggtggg

SEQ ID NO: 53075 - DNA, 188 bp, Zea mays
  Clone ID: MRT4577_148401C.1
cctctacagcggtctcccttttttattcttttaattctacacccaaactaaaagattattgtatgagtgcaacataatgactgcacccactaacccaggcactccactgctgtctcaaataagaaagaaagcagaatagagttacctcatttattcgacaatttaatggggttataattgagagatcg

SEQ ID NO: 53076 - DNA, 247 bp, Zea mays
  Clone ID: MRT4577_148402C.1
gcctaaaccccattccttgctgcaatactgtttacattacctaatgcgggtggctccacaggaccggttccaatcgatcttgggcttggtcctccactccatactgcaacaatagctccctaatcggtcacatcccggtactgctggcggttcagatagctcattatctgactgtaattatcgatctgcataaaactaattcattccactacactggtgccaacagtgttccccactaaacaaacta

SEQ ID NO: 53077 - DNA, 422 bp, Zea mays
  Clone ID: MRT4577_148403C.1
ggggacttcttcccggcgctgcggtgggtggaccgcctacgcggcgcgacgcggcgctcggcgtcttcaggccaggcgcgacgcgttcgtcggcggcctcgtccaggaccaacggcggcgaaggcgcgacgccggtgatggccgaggccgacacgcggcggagaagcagagcatcgttgacgagctcctgtcgctgcaagaaactgatcccgagtactacacggacacgatcatcaaaggcgtcgtcttgatgctactcactgccggcaccgacacgtcggcgctgaccaccgagtgggcaatggcgctgctgctgacacacccggaagcaatgcggaaggctagagccgagatagagactagcgtcggcaccgcgcggctcgtggaggagtcggacatcgcgaacctcccgtacctgcaat

SEQ ID NO: 53078 - DNA, 185 bp, Zea mays
  Clone ID: MRT4577_148404C.1
gtcaaaccctgctgcctacttgcaacagctttttccattcaaccaactgactatgtcgaggtctgcttcatacctacagcagcgacaacatttacttaatccactatcactagctaacccattgatcactattcttcctacatcaataacaatttctcccatacatccaattcatttatataaac

SEQ ID NO: 53079 - DNA, 456 bp, Zea mays
  Clone ID: MRT4577_148405C.1
attcggctcgaggcacaacaaagtaatcttccttagaaggcttgactgaatcctctacattgggtgatagtcacgagagcaatgcacgggagtctctgtgctgatgcccagaaacacggtattcatgctaggtctactgatatcgatttatacgtactgaagagcttgttctccactgcagttgttaccagtacaagtgaaaaggaggcaacaagacgtggttcagatattaacacgccaataattgtccacctcgttgacatgcgacgagcaaaccactgtgagataatgcttacgaaaatttaaatgcctatacccgatatgatcaatgcaattctggctttggacacttttgttattgatcactaccaagaggagaatcttattaagtcttgccctacaacggacgagatcgagatgcccaagggctataatggccacaaacaaatgcttggg

SEQ ID NO: 53080 - DNA, 584 bp, Zea mays
  Clone ID: MRT4577_148406C.1
ggccccccccccctaggaaaacaaaatgttttaatcccaggaagtttaccttcaacctggggaaacaaaagtttcacgggtttttattaatgaaaaaacctccccgaaaaaaaatccatgaataatcccaaaggcggtttaggcaaacccccccccccgggggccctcgttcaacatgtttagggaaaacgggcaattgctgacctccctgccataggtggtgaaacaattttggaaagccttaaaagggatgctggaagcattaacatttattactgggggggcaggggcagcaccaccagtttttgaggcaacaatttcatgctgaatggtccggggacctaatacaggatcaaccgccctgggggccatggaactacccgggccaaaccccataccttgggcaaggggggacccaattcctccaaacatggggcccccccccttttaaacaggaactgggagaggaacccggcgttcttgctttggggggttcctcactggaaccacacggggagctgggcggggggcaaacctttcttaacttcggaaaagcattgggggggggggggggggcgaaaaac

SEQ ID NO: 53081 - DNA, 405 bp, Zea mays
  Clone ID: MRT4577_148407C.1
attcggctcgaggaggtgcgagggctcttgaggcctcattaccctatatgtatggcaactctactgaaaaaaacttgcggcaggtaatccatgggggcggaatctcggatcaagactggtggcggagttgcgactggctcttggtgctgaagcaacagcaaaagatcatgtatatgcgtatgctatctgtgggggtccagaacacacttggccaagaattggtagcaacagggtttacgcaggagttgtggctgagatatcctgccaagtctagactcaatgtctcttggcccagatagtgccacctaagtatcgcgctgcatcctggggaccgtcgctaatgtgctgaacttgcatttcctcttgcgtgctgacagtaccgccacggcggcatgatcagatgga

SEQ ID NO: 53082 - DNA, 1816 bp, Zea mays
  Clone ID: MRT4577_148408C.1
gcacgaggctgagctgggcggaccctccaaagcccgagcgtgacgccatcgtccaccgaggccttgcctgcctgccttgtttccccaaccccctcggaccctcacatcttcctcggtctctccgccgcccaccacctccctccccctcctctctttatacgccaccgcggcggggcttcccccatcccttgtccgttcgctgcattgctcccctaaccgttcggccaggagacagcggagagggcagagatggcggccgcgtccttcaccgccgccaagttcctggcgccggtggccgcgagatccggcggagagagggcgcccccgctccccgccggcgcctcgtcctcctccttcgccaggaccctgcgccgcggcgcggtgcaccacccgcgcctgcgcaccgcgctcgccgtctcctccgacctgctcgctgggaacaaggccgcgcaggccgccgccgcgcatccggcggttacccgggaagaggcactggagctgtatgaggacatggttcttggccgtgtattcgaggacatgtgtgcacaaatgtactaccgtggcaagatgtttggtttcgtccacctttacaatggccaggaggctgtctccactggcttcatcaaacttctgaaccaagctgactgtgttgttagcacataccgtgatcatgtccatgcgctgtccaagggtgtcccggcacgttctgtcatggctgagctctttggcaaggccacaggctgctgccgtggacagggtggttccatgcacatgttctctgctccccacaacctcctgggaggctttgccttcatcggagagggcattcctgttgccactggtgcagcctttgctgctaagtaccgtcatgaggtgctcaaggagtctggccctgatgggcttgatgtcacattggcgttctttggcgatggtacctgtaataatggccagttctttgagtgtctgaacatggcacagctttggaagcttcctattgtgtttgttgtggagaataacctgtgggcaattggaatgtcacacattagggctacatcggacccagagatttggaagaaggggccagcatttggaatgcctggggtgcatgttgatggtatggatgtcctgaaggtcagggaggttgctaaggaggcaattgagagggcaaggagaggtgaagggccaaccctagtcgagtgtgaaacatacaggttccggggtcactcccttgcagacccagatgagctcaggaagcctgatgagaaaacacactacgccgcaagggattctatcacggccttgaagaagtacatcatagagcagaacctcgcaaccgaatccgagctgaagagcatcgagaagaagatcgacgatgtcgttgaggaggctgtcgagtttgctgacgcgagcccgcatccgccgcgcagccagctgttggagaacgtgtttgccgaccccaaaggctttggtatcggccccgatggtaagtacaggtgcgaggatcccaagttcacccaaggcaccgcccaagtttaaggaggttaatctgcgctctgtaccactgtacttgggttctctagttttgtcgatccagtgtcatgttaaggatactgtatgcataaggtggtccatttctttggctcttaggattgtgtctgatactgttgtgtaatttattcgaatgctcaactgatgcccaggttttatgatacgttccggagcttaacttgttcaggaacagctcagtttctactctataaaagtatgtgaaatggttttgggggtggaaaaaaaaaaaaaaaaaagccccctaaaa

SEQ ID NO: 53083 - DNA, 199 bp, Zea mays
  unsure (1)..(199): unsure at all n locations
  Clone ID: MRT4577_148409C.1
aacagtaatcagactatcatcaaancaatgcgaaggggtaatgccctctctgctctccaaccaacatctnntctacctcctccttgccaccaaaacattacatggctctacacacagaactgccacaaaatccttattcaagctatcaaacataaacatatataaattcgattagaccactatacatgatgttaacaac

SEQ ID NO: 53084 - DNA, 494 bp, Zea mays
  Clone ID: MRT4577_14840C.1
ccggccgggcatggtgaaggatggatcggtgcacttcgaagagcggcaggggtacaccaaggaggaagtggtggagaccatcgactcgctgtccaaggtcaacgtgttcgtggtggggcggatgccgccgacggcgccgttggtggagaatcccgacgagctgggccccgtgggcagctacctggcgtcgccggagtccaggacgtcggcatccgtcctggtcatcaagagatacgacccggcgacgagcccgaaaagcaagaggttcgaccccagcgcgaggccgccggcagcgacgaaggaggacgtgctggacgaggagatgggcagcagatccactgtggtgcccgtgccgtggtcgccgatgaacgacgtggtctaagcagagcacgacgtacccaagtgttaccttatttagctctggttctttccacaagtggaagtatgatgcgacctcagtggtactactataactgttattatcatctggattt

SEQ ID NO: 53085 - DNA, 539 bp, Zea mays
  unsure (1)..(539): unsure at all n locations
  Clone ID: MRT4577_148410C.1
gtactcggtccggaaattcccgggtgcgactccacgtcgtctcggtgccgagccatctgttnnnatttgtgtgagttgtgactagtggagcccttgctgagctgtggtggccgttgtatgcncntagattgacgttcgcgtgtattttctgtnngaattanntgaaatncatgtgcnnnttgcctgttgnnctgtttnngaaaacctgtgtcgagtggtcgagcccagcatttgtgccttaagtgtnncttttcaatttcaatctgtttgaaaccctgtgttgagtggcatagtcatgcagctctgtgccctaatgtccatgtgctatcatcatgaagccaggctaagccaacaaagccgtgcccttgcattcacagaagccaacaagcaaccagctcgtgccagatgaagaagcagcaagctcgaaccttaacttttaaagtgccttatagttttcaacttttcagtttttgtttggttttacttgctggaatgctttttaaccgtgtgcaactatggccacattgtgatgtggttta

SEQ ID NO: 53086 - DNA, 452 bp, Zea mays
  unsure (1)..(452): unsure at all n locations
  Clone ID: MRT4577_148411C.1
gattcctctccccttgccccctcgtctccccctaggggatcgtcggagaggaatcgcaaagagggccgtctcatccgagttaaggaagccatggatcacaaggaggctgggtgccaggcccccgagggacccattctatngatcaataactgagcggttattgtccaggacggccgcaattcaacatctgtgagggggggcgacatgatgatcttttgctgcaaagggctcggtctggcccatgaccttgggtctcgcctgctgcacggagcacacgatgcacgcctgcgcgtaccgctacaacttaaaccgattcggcatcatcttcccaacgtgagcgcgccagcacgattgcatgatcctcttcgacacgcttaccaacaagattgcctcggccgtacaaaaggataatgaccaaatgcctgagcctaggtgggttatttgaatgaaca

SEQ ID NO: 53087 - DNA, 253 bp, Zea mays
  Clone ID: MRT4577_148412C.1
acctatccatcttcaggagtttagtaattttacccacataatagggtattctctcctaaactcaactcataattcaaccattattgtctaaaattataatctttgcctgaatacaatattctataatcttcatatctaatattattctaaacgtccttcattcactatttatacatctatctcatatgaaacctttaattttttatcttaaataaatgttacccgaatacataatatttcaatatgatgactc

SEQ ID NO: 53088 - DNA, 141 bp, Zea mays
  Clone ID: MRT4577_148413C.1
cgacccacgcttccgctaggcatcaacccatcatttaatttcctttttttagaatacacctgacaaggggtcggggatttttccctcatacctccacctcatccctacaaagaattaacatattcgtttactcataacctc

SEQ ID NO: 53089 - DNA, 568 bp, Zea mays
  unsure (1)..(568): unsure at all n locations
  Clone ID: MRT4577_148414C.1
gctcataatttgtttttttttttaaaggtttatatcaggaggagtttgagcgttaatgaacttcgacagattccgaggaacggnacttttctttcgaggcagcgtcgctctaggaggagctcgatggagtccttctcgtggtccacggcggcgtcgctcgggtggaggctccgcacggcctcgagctgctccggcgagagcgcgtcgccgtcgatgccgtcgccgccggcgtcgtagagggaggggtcgatgtcctcgccctcgcagaggagcacgccatggatgggctcgaaggagtcgagcatggcgtgcacgccggcgacccgcggcacgatgaccggcaccgcgccgtagctcaccaccaggtccaggtggtactccccgacgaagtcgacgaacttgttcttgcggacggtgcggcgggagacgatgagcacgcggggcaggatccgggagggcagatcaggggagggagacatggctaggctagctacctcctcttgcctccaaaatctcaaccttaaccgaagaaggttggaggtcggtgtgttttctgttatttgaaggt

SEQ ID NO: 53090 - DNA, 369 bp, Zea mays
  Clone ID: MRT4577_148415C.1
ttgttcacacgtgcgttggctgaggaccgacccggatgagttgtctgcccttatccgacggtcacttacattacgggttgtttccacgctggccggagaccctgttaaccttgcagacgtgctcaaaacacaaaggtacctggagcacatgctcgaatacaatggtgtcacgcgacgtgcgtgcacacgccgaaacctagcctgcgctaccccacactctatcacacagtggagaacatcctctcgaggagaaatctacacgtgccgcagatgctcgtatcggacaggaccgacatcatgaggagccacaaaatgccgcacgatcccgtcgagatctagggatacgtatgttctctaccattactaccc

SEQ ID NO: 53091 - DNA, 308 bp, Zea mays
  Clone ID: MRT4577_148416C.1
cctcgagccggccggggactgcgtgcatagagcgtcgtcgtcggcgttgtctctcgtggccgccgtgctcctcctctcctccccgctcgctgcgtcagatttctgtgtgtgccgttcggaccagccgaccgagcagtggtattacgctacccgatgagggggagcggcggcgcaaaccactcccagggcggcgcacgaacgaagcgctcatcatctccatccccggccaccgagacgccgcgcagcgccacgccatccgccgcggttacgccgaggtctacggcgagaagctcctccgttccatcacg

SEQ ID NO: 53092 - DNA, 882 bp, Zea mays
  unsure (1)..(882): unsure at all n locations
  Clone ID: MRT4577_148417C.1
aaaaaaaaaaaaannnnnanaaagtacttatcctaagccaccgtcgcgtcggcctccgtcccagccgccaccgtcgcgtcgctctccgtcccagcagccgccacgtacttatactaagccaccgtcgcgtcggcttccgtccccgccgccaccaccgcgtcgctctccgtccccgccacagccgccccgtacttatcataagccaccgtcgcgtcggcctccgtccccgccgccaccaccgcgtcggtctccgtccccgccacagccgccccgtacttatcctaagtcaccgtcgcgtcggcctccgtccccgcagccaccaccgcgtcggtctccgtccccgccacagccgccccgtacttatcctaagccaccgtcgcgtcgctctccgtccccgccgccaccgtcgcgtcgctctccgtccccgccacagccgccacgtacttatcctaagccaccgtcgcgtcggcttccgtccccgccgccaccaccgcgtcgctctccgtccccgccacagccgccacgtacttatcctaagccaccgtcgcgtcggcttccgtccccgccgccaccaccgcgtcgctctccgtccccgccacagccgccacgtacttatcctaagccaccgtcgcgtcggcctccatccccgccggccccagcaccacctgccgctgaagagctgacagaggccggcaccgaggaacggaaacaatcgccaccgccacaccagacgccgggtgctgctgctgggccgaagactccttccccgtggtcgtgggagccgccggtccctgtctcgcctccttctccggggccggcgccggctcatggtgcacaggaacagccgcctgacaggcagaatcatccgctgccactggagac

SEQ ID NO: 53093 - DNA, 398 bp, Zea mays
  unsure (1)..(398): unsure at all n locations
  Clone ID: MRT4577_148418C.1
atgcacgcgtgcgcccactcgtaccctacacagtcgaccctagcttccgaccggaccccctcttttttttttttttttaggaagagactcgttttattgtgaagaaggacccacacgcgcttgcatgtcaacttattattcggttcaacacaaatatttctatctaaaatgcancacccacaaaggcttcctgtaagaacatgggtcgaatcctcatgggcattcggttcaacatgaatggtaactgctgctgcaccataatcttttatacggcgtcccaacgacattgtggcatcatcatttgcaacattatgctccgcaagaccattggtgacattattctccgcatcatcaatggtgacatcatgttaagcgttatcatctgtggcatcatcact

SEQ ID NO: 53094 - DNA, 402 bp, Zea mays
  Clone ID: MRT4577_148419C.1
aggagcgcgtgaaggccggggtctcgtcgtccgcggatgggctccgcagatgcgcattctgtgggaacttgtcgtcttctaacttggtccacctgcacctgcaatgaagctatcgttccctctctagcagctacgtcggggtccttgtactctgccaccccaatctcgcagtccgatcaatccaaagcttgcacttgcagcctcctcatcggcccatcgatcatagtgacctgctagagattgtacgtgctagcgcgcgcgacattgcatctaccgacaagatagcacagggtcgatcgagcagttaacgggcgtgcagcattggcgcgagttcacttcttgctcgtgccgctgacgtcgctaggccacagtcattcctatggtgaacctgcaccgactcct

SEQ ID NO: 53095 - DNA, 173 bp, Zea mays
  Clone ID: MRT4577_14841C.1
attttctccgctttagatccgtcgcggtcttccaggcgttactgacaatagccgaagggctcgggtgctgctatgttgactacatgcgatgcgctccagagattcactgaaagctccagccatccctaccagaagacacctaagccatgcatcttggacatggctgctgatcc

SEQ ID NO: 53096 - DNA, 369 bp, Zea mays
  Clone ID: MRT4577_148420C.1
gaagaactcgggccagccccaaggtactgggatatctatttgctttttcccgcttatttattttatttgcttttgacacgattcgtttggctggaagggcctcaaggttcaggcctgcagcctgctacgtacttccatcccaatcctactgctgatacatatggccaatctcttggtttttttttttcttcttctcaacagcagctacggcagctccagccatggcgccgcataaatccgagggttcgatgagctcagtgtcagggccctccagcagcagcacgtccgctggctcgtccatgagcagcatcgccacgacgaccggtcgaagcggcagcagcagcaccagcagcggatcgaggccccttc

SEQ ID NO: 53097 - DNA, 343 bp, Zea mays
  Clone ID: MRT4577_148421C.1
aatattttttttttttttttttttttttggtgggttttatttacttttgggagcttaataacaaaaggcagaaagaggagacattacaccaggagttcaaaggtgatccaacaagaacgaacaagagaacacccaggtgcatggcacggtaatgcaacgcccggacaaatagagtgcagatcaaccggccaaggcgcagagagcgctcacatggagaggctaggaggggagaactaggcgtacatgctcaaccaggtacagctccaagggtacaggcttgaaggagagcatggtttccgctggtcgcacgaaagggccagcaccttgaggatggggtccgagt

SEQ ID NO: 53098 - DNA, 259 bp, Zea mays
  Clone ID: MRT4577_148422C.1
cccacacgtccgcccacgcgtccggggatcatgagttgaggaagctatgggagtcagggaaagaaagaggaaaggaaaaacattgaaacaatctagctgcaatatctgggacattatgtggaagtgcagagaggccatgtgcatgcagatgtgtgaaaacaatagggggagatggggcaaggcagaagaaatttgtgggacggaggaataacactgttttttcttttgaactaggagacataggacagaaaagattatc

SEQ ID NO: 53099 - DNA, 761 bp, Zea mays
  unsure (1)..(761): unsure at all n locations
  Clone ID: MRT4577_148423C.1
accggtcggtcccgagcgacacaacagacagaggaggaaggagaaggtatgggaggcgaggcgggaatggggctccgcgtccgcgcctcctccctcctgctgtcactggtcctcgagctcgccgtcgcgctcgtctcagtgtcggcgcagcacaagttcgggatcaactacgggcagatcgcgaacgacctcccggacccggcgcaggcggcgacgctcctgcagtcgatgggcgtgaacaaggtgaagctgtacgacgcggacccccgggtgctgacggcgttcgccaacacgggcgtcggcttcaccatcgccgtgggcaacgaggacctgcaggcgatggcggccagcccggacgcggcgcgccgttgggtggcggcgaacgtgcagccctacgtcccggccacgcgcatcacctgcgtcaccgtcggcaacgaggtcctgtcgggcaacgacacggcggcgatggccagcctgctcccggccatgagggccgtgcacgccgcgctcggcgacgcgggcctcggccagccggtcgccgtatcgtcggcgcactccgtggacgtgctcgccaccagcttcccgccgtcgtcgggcgcgttccgggaggacctggcggngtcgacgccgtgtacgccgccatgcaggccgcggnggggcgcgcggacgtgggcgtcacggtctcggagaccgggtggccgtccaggggcgacgacgacgagcccggcgccacggcgcagaacgcggcggcgtacaacggc

SEQ ID NO: 53100 - DNA, 459 bp, Zea mays
  Clone ID: MRT4577_148424C.1
gccggccgggcctgcggccaccggtcggtcccgagcgacagaacagacagaggaggaaggagaaggatatgggaggcgaggcgggaatggggctccgcgtccgcgcctcctccctcctgctgtcactggtcctcgagctcgccgtcgcgctcgtctcagtgtcggcgcagcacaagttcgggatcaactacgggcagatcgcgaacgacctcccggagccggcgcaggtggcgacgctcctgcagtcgatgggcgtgaacaaggtgaagctgtacgacgcggacccccgggtgctgacggcgaaagtggtactatcactgctgctgcaagcaattgtaatacttcgatgatcacattcgtactgttagactgttagtcagtgccatatactcttgtaatcttgtatacgaaaaatatgcatttcaattcaactaaaaaaaaaaaaaaaaaaggccccta

SEQ ID NO: 53101 - DNA, 482 bp, Zea mays
  Clone ID: MRT4577_148425C.1
attcggctcgagcatggtacttcatctccctttttttctaacaccgttgactttcagaacgtggtgggttaaaacaaagctcctgggggtgctctatcacccgcttcaaatgttggtgagagctcctgtagagggctctatccaggttatacaactactgagaactcaatgtcatccacgtctacattggttgactccccagtcaaactttctgggtatcaggatggtgctccaaagggttgttcttaatgtttaacagctgatgtccagaacaatctgacatctgatatgctaggttctttaaatcacgaggggcggacttcagaacctgttaaaaaatgtttgtcatcgggaagaatcactgcaccatctgtatgtggttgaaagcaaccaattttcaataaatacacaatgagttctggggttgatgttaaatgtggttaaaatgaagactcctgttcaaaatctttaagaaaacaaat

SEQ ID NO: 53102 - DNA, 1419 bp, Zea mays
  Clone ID: MRT4577_148426C.1
atggggctccgcgtccgcgcctcctccctcctgctgtcactggtcctcgagctcgccgtcgcgctcgtctcagtgtcggcgcagcacaagttcgggatcaactacgggcagatcgcgaacgacctcccggacccggcgcaggtggcgacgctcctgcagtcgatgggcgtgaacaaggtgaagctgtacgacgcggacccccgggtgctgacggcgttcgccaacacgggcgtcggcttcaccatcgccgtgggcaacgaggacctgcaggcgatggcggccagcccggacgcggcgcgccgttgggtggcggcgaacgtgcagccctacgtcccggccacgcgcatcacctgcgtcaccgtcggcaacgaggtcctgtcgggcaacgacacggcggcgatggccagcctgctcccggccatgagggccgtgcacgccgcgctcggcgacgcgggcctcggccagccggtcgccgtctcgtcggcgcactccgtggacgtgctcgccaccagcttcccgccgtcgtcgggcgcgttccgggaggacctggcggggtacgtgcgccccatcctcgacttccacgcgcagacggggtcgccgttcctcgtcaacgcgtaccccttcttctcgtacaaggcgagcccggggccggggccggggggcgtgtcgctgccgtacgcgctgttccagcccaacccgggcgtgcgcgacccgggcaccggcctcacctacgacaacatgctgtacgcgcagatcgacgccgtgtacgccgccatgcaggccgcgggggggcgcgcggacgtgggcgtcacggtctcggagaccgggtggccgtccaggggcgacgacgacgagcccggcgccacggcgcagaacgccgcggcgtacaacggcaacctcatgcggagggtcgccgcgggccagggcacgccgctcaggcccgccgtgcccgtcgacgtgtacgtgttcgcgctcttcaacgaggacttgaagcccgggcccacgtcggagcggaactacggcctgctctaccccgacggctcgccggtgtacgcgctcgacgccggcggtccgggcccgggcggctcgctcaacccgtactacacgtccatgttctcctcctcctcctcgtccggatcggcggtgggcgtaacctttttgacggagaaagtggtactatcactgctgctgcaagcaattgtaatactccgacgatcacattcgtactgttagactgttagtcagtgccatatactcttgtaatcttgtatacgaaaaatatgcatttcaattcaaccatagggtaggcctagattcgggaattttgcacgacggcggtgtggctgctccgaaagctctcgtcttttctcttattcccccgcccccagcaatggtcttgaaaaagggtgaccttttctt

SEQ ID NO: 53103 - DNA, 759 bp, Zea mays
  unsure (1)..(759): unsure at all n locations
  Clone ID: MRT4577_148427C.1
agcacggcgctcgtccctgcggcgtcttccatcctccgcagctcacccagcgcccctcctccatccctgcgatgcgtgccctgctccctggtgcagcgcgcagcttccctgctcggccaccatagcgtccggccagagctcccagcaccgtggtctcgccaagaccccagccaagcttccctgcttccctgctggtgcgcgcccctggctcggacccagctcggcgccctcccatctccctgcgtctctctcttcttgaactccctgtgtgcgcgctcggtctctagctccggcactgagctcctccccacgcgcgcagccgccgttctccctctgcctgcttcctatggcgcgcgcccaggtgcctgcgtgcccctagctctagccctcaacgtcggcgcgcgaactgcgcccagcctagccgcgtctgctccgtcgcgcccctgctcctactcgtcctagcatccgagcttcttcttcctcggcacgccactctcaggtctccggctcccatgcgcttgccctgtgcacgagtcgctgcgccctaggagctactcnttgccgtcgtggagctctgacgaccagttcccgcccttttgccgcgtgcccatttttcctcttctgcgcggcttcccagctccagctcggccctgtcttctctatttcgtggtccggtgttagtgacaaggataatcgtcaagtggntcgtcgtctaacaacactaaccctagtgttactcaggatataactttgtgctgc

SEQ ID NO: 53104 - DNA, 180 bp, Zea mays
  Clone ID: MRT4577_148428C.1
tattgctgtacgggccacctggttcgggaaagactcttaatgctcgtgttgtcgtacatgggtttcgactccctccccgcgccgccgatcgccgaaaccccgcgtcgcgtcgcgtagaggagagggaaagcgacctcaggagggcatatcaagaagcagagaagaatgctccatctatca

SEQ ID NO: 53105 - DNA, 952 bp, Zea mays
  Clone ID: MRT4577_148429C.1
gcccctaacctagaagaaattcggcaactgttgcataaaggggaacaaaccgtaaataccatcatttcctttggtcaatttttggatattctgcccatccgagcttccaaaggctatgctgtgcgttggttgagccaacagtggaatattcccctggagcacgttttcaccgccggaggatcgggagccgacgaagatatgatgcggggtaacaccctttccgtcgtcgtggctaaccgtcaccatgaggaactttctaatctaggggagatcgaaccgatttatttttccgaaaaacgttacgccgccggtattctggacggtctggcccattaccgcttctttgagttgttagaccccgtttaaccagccgaaatcatcgagaacagttaaaaatagcttaaaaatggctatctacctcaaacttcggtaatccctggcgatagctttttaattccccactccgggggccataaactccttcaatctgttcttcacagcaatggctagcaaattcgtcgaactccgccggagcaatgccaaacatccgggcaaagttatctggtttcacccggcaaaaactgggcctatcttcgtaaatctggcagaggcgatcgccatctattaatagcgtttctccttgaagtgccaaataggccgagagatgaactgctgttgtggttttgcctaccccgcctttaaaactggcaacggtaataatcatacttagttgtttgaaagtttaaataattaacgattcagcagtttgataagctagttatgtgagtacgcattctaagaccttatcctgtctaggttttgttccttgattatttgcgtatgcatatcattgacaatgtaccatggtgcccggctgtattttgtcctctaattttttactaggggtttcaagttatgactaaaaaattactaggggtttaagatgaaaggc

SEQ ID NO: 53106 - DNA, 206 bp, Zea mays
  unsure (1)..(206): unsure at all n locations
  Clone ID: MRT4577_14842C.1
ggactcctgtagggcggcccccccttttttnatantttccgagggcacacggcaagccaagtgttgatcatcccaggggggatggggcaccgatcggcctccttttaccagcaacagaaaatgaaaaaaggggaatgaacatgccatcatcctctcgcatagaatgcaagcagacgggcacgcaggctattgcatcatctgacgtg

SEQ ID NO: 53107 - DNA, 443 bp, Zea mays
  Clone ID: MRT4577_148430C.1
tcgaggccggccgggaatacataaaaaaccgagaaaagtgctaaacttaaaaaatcgataggtggagccacgtggtatatgcggatctccattcaccaatcgggctcctcgtagccctgccgctcggctgggcgaacgcgatctgttccccaacctccgcagacgctccaccgacctccactccggctgccgaatagacccgcacccgatccagatgcaggagctgagggatggacgcgaacaggcgccagagcgggatccagcagttgatggctgaggagtcaggaggctcaccaaattgcgaatgccgctagagctgccaagcacagcgaggctcaggcaaagataagaggaggctgagcgggaaatagcctaataccgggcccagatggcgcctgaatttcagaggaaggttgccctagagcagcgggtactgtggagca

SEQ ID NO: 53108 - DNA, 846 bp, Zea mays
  Clone ID: MRT4577_148431C.1
cagctcgccgctccactctcctggttctgctgcggccgtcgccggctaactagctatagccagccactcggagtcggaggcacagcacctccccccgcgtcgccagcgcacttggacgaccgatggggagggcgccgtgctgcgagaagaaggggctgcggcggggcgcgtggagccccgaggaggaccagcgcctggtggcctacgtccggcagaacgggcaccccaactggcgcgcgctgccccagcaggcgggccttccccgctgcggcaagagctgccgcctccgctggatcaactacctgcgcccggacatcaagcgcggcaacttcacccgcgaggaggaggacgcagtcatccaactccaccaaatgctcgggaacagatggtcggcaatcgctgccaggctgccggggaggacggacaacgagatcaagaacgtctggcacactcacctcaagaagcgactggagcctaagacagccacgcaggcgcccaagcgaaagcccaagaagcagcagcagccagaggcggtgacgctcgcagcgcctgtctcgccggagcagtcagcagtctccacgtcgaccaccagcaccaccactgactactcggcggcctcgtcgtcgttggagaacgcggatagcttcacctcggaggaggaggactaccagattgacgacagcttctggtccgagacgctggcgatggcggtggacagttccgactccgggatggaggaggcagagggcgccttcggcgcgtcgccgccggcgccgtcgaccaacgacgacgtggacttttggctcaagctgttcatgcaggccagcgacatgcagaattcgcccc

SEQ ID NO: 53109 - DNA, 479 bp, Zea mays
  Clone ID: MRT4577_148432C.1
gccggggccctggtcacttccctgggtgcgcgttcctcgactcgctcgcgctctgccggcgtcgcccagcttctcccagccctggttcctgctcgatcttcttcctggcgcccagcagagctctctcctgctccctcccatggccggcgcttggcctcctgctcgccgcgccctgggccctattccagctcgcccagtcgagctcccttgccatggccgcgcccccagctcgtcttccccagcacgccgcgctgcagctccctgctcagctccctccctgctatctcccatggcgcgcagcttcttttgctccaccttcctctggtacttgcaacactcgccggacgctccaccgtgggtgctctcctgtacaagctcctggtcgtcgtccctgttcctctgcatcgcgcgcattccgtcgttcctcgccgtgccatgttcgcctctgcgtgcagcttcccgagctccatggacggctc

SEQ ID NO: 53110 - DNA, 139 bp, Zea mays
  unsure (1)..(139): unsure at all n locations
  Clone ID: MRT4577_148433C.1
aataccggcgtcgacccacgcgtgcgggagaatccaatttgtgacacgaatgacaaacttcctatgactgcgcagacccaagangttcttaaaacgctgaacggcccacaataggggagccatgatgataaaccagccc

SEQ ID NO: 53111 - DNA, 1203 bp, Zea mays
  Clone ID: MRT4577_148434C.1
atggccgatgaggcagagagagtgccgccgtggcagcagggcggttggctcgatggacatgaaaacatcatttacgacatcctcctccgcctgcccccgaagtccgtggtccgttgtcgcgccgtctgcaagtcttggctccgcctcgcctccgatcacatcttccttgtcgaccatcaccgctgccagccctccctgcccctcctctacttcatcctcgacgacgtccgcgacccggatatcagcgagtaccggctcgaggagttggacctccacaccaacgacaacgagttgcagactgtcctcggattctccagccacgtcaattggtggatgccccatggccgtgagagacggctcgctctccatggctcctgcgacggggtcctcctcctatcctccgacgacagcctatacctctacaacccaaccacgcgccactggggttgcctcccaccccttcacagcgacaacaccatcgcaggattttactggcacaggatctcggacgactaccgggtgctctacttccggcgccatgaagatggaaagtactgctactacgtcatggaggccggcaccaagaggcagaggctggtcagtcgtcaggtatccctaatacactcctcatggccaaccaagtgtgcgcggcgcacaccaccggtcctcctccacggcaaccttcactggccccctgtctcatcaaggcccgagaccatagccgtcttcgacacggtcggcgaagtgctccggtttatgctttcccctgccgtctacgtgaacagcctgtttgactcaaatgtgaagctgcttgacatggatggtgttcttgccatgtcaggtagctgcagagaagctatcggggatgacgggccctcgagggttgatctgtggtttctggaggactacaacgaccgtgtttgggtctgcaagtaccgcattgaattgccagtggaagatatcagccgtttccatgaattcgaagatgtgtggaatgctgttgttgtgtcccatgagggagatgtgctggttgatctctggaatcgcctgttgggatatgacagggagggcaattcagtagcgaatttgttgtgtgattgcagcttgatggagattggtccacatatgcttaagcggagccttgttcctcatgcattgcttgggatgaacaaccatagtcccaacaaaccaccttttctctga

SEQ ID NO: 53112 - DNA, 325 bp, Zea mays
  Clone ID: MRT4577_148435C.1
tcggccgctggtgttcttgttcataatgtcgcccatgagggcagccttctggttacaaaccctagactctactgctctgagcttgcaccgttgcactctttatggaggacgaggacacctgccctggtgattggggcgagggctgtcctctgtaccacgtaggggggtcgagcgaccgggcccgtgacatggtggcgtgcgtgtccagctcgagctctgagacgtggacggggaacggctgccaccgcttcgtgatccagggctactcgattgttaagggcatgggctgtggggaagcacattgggcagctagagattcaccggg

SEQ ID NO: 53113 - DNA, 2774 bp, Zea mays
  Clone ID: MRT4577_148436C.1
ccgatccatccgcagcgggcggcggctgcctcctcggctcctcccctgcggccgagctcgcccctcgccccgccgcctcaactcgtctcgcccgcgaccgatttcctccctccgctcgccgcgccgcaacccggagataaggccgcgctcgatcgagaaccacctggggtccatcgtcatcgcgaccagctccggcgaggcgtccgccctttgcagcccggtgtctctgcgaccggcacacagctccagagggtgtcttggactgaagaagatatcagcaaagcttgaaaaggactgagagatgtcattgggctatgctgagaagctgtcctaccgggaggatgtgggtactgtgggaatgcctgagatctttgagacccctgagctagtccagaataagatagaagagcttgctgccatggtgcaaaagagtaagcatttagtggtgtttaccggggcagggatatcaacttcatcaggcatacctgattttcgagggcccatgggtgtctggaccttgcagcgtgcaggaaaaggtattcctaatgcatcacttcccttccatcatgctgttccaagcttgacacatatggcactagtcgaacttgaaagagcaggatttctaaagtttgtcataagccagaatgttgacagcctacatctccgttctggtttcccaagggagaagttggctgaattacatggcaattctttcaaggagatctgcccatgctgtaaaactgagtaccttcgtgattttgagattgagacaattggactgaaggatactccaagacgttgttctgataagaattgtggagctagattaaaggatacagttcttgactgggatgatgctttaccccctgaggagatgaatttggccacggagcattgtcgatcagctgatcttgttctatgtctaggaactagtttgcagattactcctgcatgtaatatgcctctgatgtcaatcaagaatggggggagggtggccattgtaaatcttcaggcaactccaaaggataaaaaggcaagccttgtcatccatggacttgttgataaggtcattgctggagtcatgagcaagttgagtctgcgaattcctccatacatacgtactgactttgttcagctcactcttaggcactcactgaaaaagaaatgtgttagatggactcttcgagtaacaagtattcatggcctccgagcaccattgccatttcttcagtctgtcaaggtttcctttccagaaagacctgatctgaagtctgtagtgcttaaagagcaaccattctctttgcagagggaaacatcgatgaacaaaccatttttcatgctgttgacattaaatttcagtgatggttgcagctgtttgagctcctcaattggatggcctgttgattttcagaagcgaaaagacagcttcgtcagagatagagctctagtcctacgggagttgtactctgctgcacagcgcgagtcttgcattgggcaacaagaaattctggaaagagagaacctaccaagagctgagacgtctattcatggaatcgtgacaaacatcgttaggtatgacactgaagatgaaaagttggctccacccaagaatgatttgatgaatcacagccgcagcaaccctgcaaaacggcacgtggaaggcactgattgccactcgtcattgccaaagaaactgaagtactttttgaaagacaagaagctgaactgctaaaagtgtaaaaccgtagaaggtagatagagaatgctgtaggtttgtttattttggttattagacgagttatacatagcgtagatgcatgggaagttcgcatgctaaggttgaactcttctgctgcataggaaagttggctgacttcttatattatgcgagcctagcttaggtacctcctgtggggagaagcgattgcaatacatggtagcatgttgtagagctcctcaccccagttagtcagtgactgatgatggtatcctcttaccagtcctctggtggtatcatcttttgttcacggaggtcgatgaagtactgcctccgataaaaaaaagacgcttttgacattattgctccccgaaattcttattttgacggctaaacatcgctaagcaagacactgaagatgaaaagttggctaaccccaagaatgatttgatgaatcacagccgcagcaaccctgcaaaacggcacgtggaaggcactgattgccactcgtcattgccaaagaaactgaagtactttttgaaagacaagaagctgaactgctaaaagtgtaaaaccgtagaaggtagatagagaatgctgtaggtttgtttattttggttattagacgagttatacgtagcatacatgcatgggaagttcgcatgctaaggttgaactcttctgctgcataggaaagttggctgacttcttatattatgcgagcctagcttaggtacctcctgtggggagaagcgattgcaatacatggtagcatgttgtagagctcctcaccccagttagtcagtgatccagcaacgatagtggagctgcgaccggatcatgcctttgagcttgggacctcgaggatttactcgggctatgtgcatgagatgcaacacttgggctatttttggaacggtgtagggccggctccgggggctacgtgcatgagttggtggtgttcgaggcgtttttttgtctgactttgtttgcttgtgcatctttttgtaattgaagtgctacgaaggttcgagatacaaattcatcagttgacgtc

SEQ ID NO: 53114 - DNA, 259 bp, Zea mays
  Clone ID: MRT4577_148437C.1
ctctcggacacagtgtaccccctcccaagccctccctgagccgttctcctgagtccctgagggcagacacagctccagggacccaggccggctgccacacccccgacactcctgctgtccactggccttagctcctgcaagttccccagtgtccgcacctgttcccttccctgacctcaccttcctggggtctgtgactgactggagataaaaataaaagcaattgtgacaaaaaaaaaaaaaaaaaaaagggggggcc

SEQ ID NO: 53115 - DNA, 420 bp, Zea mays
  Clone ID: MRT4577_148438C.1
aaaagaaaaaaaaaaaaaaaaaaaaaaaaaataaaaaaaaaaaaaaaaaaaaaaagagaaaaagaaaaaataaaaaaaaaaaaaaaaaaaaaaaaaaaaaaaaaaaaaaaaaaaaaaaaaaaaaaaaagggcaacctttttaaagaatcaaagtttacttactcagacatccaacttaaaagcttttatataggataactaaatttaaattcactggcacgattttaaaaacttcggaattgaaaaaaccttggctttaacaaacttaatggccttgaaaaaaatcccttttttgcaaattggctttttttccaaaaagcccaatacgaatggcctttccaaattttgccaaacccaaattggaaaaggaaaccccccttttagggcccattaaatcccggggtttttggggttaccccc

SEQ ID NO: 53116 - DNA, 412 bp, Zea mays
  Clone ID: MRT4577_148439C.1
ggggtccggaaaaaaaagaacagccccctggccaacagaggggggttcaactctattggcccaggggtcattctggagggatctgggtttaagggggccgcaaggacaaccctgggggcaggaaggccccccgacccaaagctggaacaaatgtcccgttctggggggggggaaagcccaagggcatgtccccccccattggtccccccccaaagccccctcgttggggctgggggggggaggggtagcccccccgggtattatacggggacacaacagtcatactggtctggggcttgccatgggtttgggaccgggaaagccccccgggggccccctccacattttgggggggaggggggttcaggctatgacccccctctggtttcgggggggggaccaccgaccgggg

SEQ ID NO: 53117 - DNA, 795 bp, Zea mays
  Clone ID: MRT4577_14843C.1
ttgggtacctcgaggccggccgggactctacaggaccagttggctgcatatggaggtcgaggacctcgaggatctctacacatcgacgcgtcgtacgaccaagacgacccggatgaggacgagggggagcagcagagcgaggatgaccaagagatggacatgctaggaggagcggtggcggaggaggacggggcggatgacgctcgaggatccagcgccgacgaggaagaggatgaagaagacgacgacgaggaggaggagccggagggggcgcagttggtcgcgggcgattgcggaccatccctacgagctagggtttccgagtttgcggcggttgccggcgccgccgtggagcgggcccacacgtccaactgccccgtctgtatggacccgtggacctcccaaggtccgcatcgcatcagttgtatcccatgtgggcatgtctatggcagatcttgcctagagaagtggttaaccctgcgcgggaaccaaagtgcgacgtgccctcagtgtggcaaaaggtttaaacataaggacatcatcaacctctatgcacaagaggttgctgttcctaatagtgaacttgagaaggaaatttcatacttaaggcgggaaatctgttctctgaagaagatggttgtgcaccatgataaaatgtttgaggagatgatcaagaggcagaatgatggtgttcgctcaaagagacagaaagtggctgagcactcatatgaagccgcaaatctggtggcatctaccccagcacaataagttttagcttacagacgaattaacctg

SEQ ID NO: 53118 - DNA, 342 bp, Zea mays
  Clone ID: MRT4577_148440C.1
gggaggggcaaaccgggacattaaatgtgtaccctgggggtttattcgttccaacatttttacatggctccagacaatttgggtaatggaaaaaactgggacaaacaatgcacggtggggacctgaaaaattcgcttaaagctaacccgggacattaaactgtttggggtaaataggctccagaatcactgaaacaaacccttcctggggaagttctttttttgcatgacaaatattccccaagattgtccccgtggtcgatataaaacatcctggctcaacttttattttggggggatgacgccgaccatatacacattccaccttttcattggaaacctg

SEQ ID NO: 53119 - DNA, 263 bp, Zea mays
  Clone ID: MRT4577_148441C.1
agcagggggagtaaaaccatccattatgcccaggggggacggaaacatgtccaaaaaacaaatacccactgtatccgtttacctttaaatttccaccaccaaaacagggtgggcatgggtgggtccaaaaacaatgtttctttcccttctgtaccgtatgggggtactatggaataataaattttttaagatgaaaaggaagaggaaggtacaattaattgaactgggggaatcttgtttttcaaatgtaattatttccaatt

SEQ ID NO: 53120 - DNA, 524 bp, Zea mays
  unsure (1)..(524): unsure at all n locations
  Clone ID: MRT4577_148442C.1
tctaccgcttgagcagcgagggtcaggttaaccacctatgtgaccggtgacggtgagctnnnnnnnnnnnnnnnnnnnnnnnnnnnnnnggccccggaggaaatggtagagcatggcgagcgagcggtccggcgcgaagagcggcacctggtggcccgcgccgcgcaccgtgacgagcgtcagcccttcctcgtactccaccgcccacccggccacctgctgccggtagnnnnnnnnnnnnnnnnnnnnnnnnnnnnnnnnnnnnnnnnnnnnnnnngcggccgnnnnnnnnnnnnnnnnnnnnnnnnnnnnnnnnnnnnnnnnnnncgtgttgatgctgtaccgcgtcgacgtcaccggcannnnnnnnnnnnnnnnnnnnnngcaacgtgccagggtttcgagctcagcgtcatcagggacaagacaacaaggctatggtcgagtggagtacctgtagacccagacgcgcagcccggcgcccatgagcttcttgaggatgggcagcacggtagccggcgagt

SEQ ID NO: 53121 - DNA, 356 bp, Zea mays
  unsure (1)..(356): unsure at all n locations
  Clone ID: MRT4577_148443C.1
ttacaaaaactcnnaatacnactcgaggcttgcacatactcttcatctccgatcccgactccagctctccctcacttctgttcgtgtcacaaaacaancaaaaccacaaccttcttcttcaccgacacgtcaacctgcttcttcaaccacacgcaagcctacttcttcctaccaagcgaacggatccacagacgaacggatctccaacgcctgacatatctacgtcacacaacctaccatttaaaaacatatctccaatacctgatgccctaatatatactcaacgtcgcggcttgcttcttcactggcgccacagtctgattcttcgaaagcacgacaccctacctgttatatcc

SEQ ID NO: 53122 - DNA, 107 bp, Zea mays
  Clone ID: MRT4577_148444C.1
atgccttaccttccatggtccatgagaaaaattaagtcttaatagccttaccggttccaccgaaggtattattccttattgaccggccaaccatggccatattaaat

SEQ ID NO: 53123 - DNA, 250 bp, Zea mays
  Clone ID: MRT4577_148445C.1
ctgtagtcaacacaagagtagtaggctttctttcttttatagtagaggagaggaaagtaggtaacttaggtctggtatatacgcatcctgctaagcaagcaggtaaggaggtaaagtagcttataatatctctctatgagttctttcttcttctatatctgttgttgaagcgacgctagtcgtttttgctgccggactaagatctactatcgtatgttttgagtttggaaatgcaacgtcaagaaagatg

SEQ ID NO: 53124 - DNA, 319 bp, Zea mays
  Clone ID: MRT4577_148446C.1
gagaatgtaaccatgatttacgctccagcgctctaattcgaggtaggagaatcaatggcttgaacgctttcctgcgcaatcagagaaacatctgacggcgccaccaacagcctctggaaagaagcaacacttggcttcgcttgaaaagtggtttattggctctgctggaactggtattactccccatgagacataattcaatccatatatatcacagctgccaaaataatggcctttttacaacaaggcccaaaggcagtgtgcatcatattcaccaactgcagctatgactacgataaaccctgacaatcatttgaca

SEQ ID NO: 53125 - DNA, 277 bp, Zea mays
  unsure (1)..(277): unsure at all n locations
  Clone ID: MRT4577_148447C.1
cgcgcgtcncctcgccgagtcccctcgccagattccctccgtcgccgccaagatgatgtgcggggcgccctccgccacgcagccggccaccgccgagacccagcacatcgccgaccaggcgaggtcccagcttgaagagaaagatcacaagaagttccctgtgtttaaggccgtgtcattcaagagccaggtggtcgcggggacaaactacttcatcaaggtgcacgtcggcgacgaggacttcgtacacctgcgagtgttccaatctctccctcat

SEQ ID NO: 53126 - DNA, 746 bp, Zea mays
  Clone ID: MRT4577_148448C.1
ttttcgcggggactaccagttctgtattcctgataagatccttcaacggcataccgtgactcatggaactactctgtgtgctcaggtgctgattcaatggtcccatatgcctccggtgttggctacttgggaggatgaacaggccttgcaatgccgttgtttggggataaccaacattcaaagtaggaggggatgtcagaagtgcaataaaggaacaactgtgtaccggacaaggaacaggaacaattaggctgcgtcgctcgtcaaggctcaggaaggacaatgtcgtcgtctatgggccggaatgggttaaatagtgggtgttgggaggattatgtatgagggaatggctgccgggtgaggcatgtaagaagatacacagaattttcttctttcccaagtcttacctctcttcctcctcctacctgctcatgttattcctctctgaaccacttcgggtgtaataatttgagaacgacaagtaaattttcctttgtataatatttaattattcacccgtaaagatatcttttaattatatacgaattaaactacacgtagattttactccgtaaattatttaattacttctttcataaaagataccttgtaattctacacaagtggaccaggagcactgcgtgacagggttttatacaccataaatcccaacaatcccagcaagcaccgtaaaattccaaaacacaaaactaagtcatataaataatatacttagtatataatac

SEQ ID NO: 53127 - DNA, 327 bp, Zea mays
  Clone ID: MRT4577_148449C.1
tggctttattatattattatctttatgagatcgccgggagagcaagaaaacaataactccaaacttaataacgcaataccaaagcggggggatagagtcttacaacgtaagttgtaaaccacacaacgacagatagataagaaccgccagaaacataacacgataggagccacttagggcagatcacaggatagcagtggcacacaagcccgacgactccttgccagtagagcgtttagtactctgccttctcgagcgcagccagatccttacgaacctcagaaaaattgtcctttttcatacccttaccgacagaccaattcacaa

SEQ ID NO: 53128 - DNA, 253 bp, Zea mays
  Clone ID: MRT4577_14844C.1
gtcaagctccccactgatgcactaagccctttaactgctggtgagatacctttagctctgaaacaagagtggaaatggcacctatttgagaacgtgaagcatttacaccgtgtgaatacgagtttgtctggctacaagatactccagaaactagagcaggaatggcatagcaaccaaatggaaaactcttctttgagtacaaaaaatatcaatgacgcattctctgcaattgcctgggaggaacagagagtaa

SEQ ID NO: 53129 - DNA, 459 bp, Zea mays
  Clone ID: MRT4577_148450C.1
ctttgggctgatttatgtgctctgttatgtgcttgtttatgtgcttgcgctcccttaagattattcggccacgtccccgccgagcccgaagacttctgcgacgtcgaggaggtaaccgtcggatgggacggacataatcccgacggatattgctcaagagcggaggtcgtctacggcggcagaggcaacgtccttctgtacgactgcctaagcggtcccggcggtggcggcggagtatgctgcggcgcgctgagatatctagagcactgcgcctccgctatcggatcgttcctcctcgtactacggtaggacccaaaggactacacgtggaaggtcggcgacgcccggcctctcgaagcgcactgtgaaagtcgcggtattgcacgaaccgcggatcatataaaccacgacgacacgaaacacgtcgcaagcttacaacatacctttccgctctacgat

SEQ ID NO: 53130 - DNA, 303 bp, Zea mays
  Clone ID: MRT4577_148451C.1
cggacgcgtgggcggacgcgtgggcggacgcgtgggggccgacgaggaggccgggtcgctgctgcaggagcgcgactcgcacggcgaccgcaagactgacaaccaggcctagcgagtgtgacggatctgaccgcccgatcggtctgaaccctgacaacccgtacaagttcgatgcaacatttgttcattccttgtgtcgaacatgtggggaaaaaaagggaaatatatatgagcattttttgtattttttggccagttgtagctgttactaccacgtaaacagtacgcaaagtcgttcgcatt

SEQ ID NO: 53131 - DNA, 574 bp, Zea mays
  unsure (1)..(574): unsure at all n locations
  Clone ID: MRT4577_148452C.1
gttttgaaaaaaaacagnattctactttatcaatttatctcagggcagaagaggttagccttttctgccatataagctgcagctgatcaagttagtgtagttgcatgcaaccagggatttgagctctagagtggactgaatcaattattctatggcaaagatggtatcttgtagattcatactacatgacttagtaagcttttgatctgtatattgaaaatatgaatggtgagaggtcatgaaaaggtagagccatgttactttactgtcagtttataatcgaacttgttattaagtcttcagcattgacttgcacactttttttctctcgaaaacgcaggagagctgcacttcattaagataagaaggtgaaccccaaaatggggcggtacaaaagtggggtggcattttacggtggccaacgccttacatagacaaacttatccataagaccgggaaacaactcagccctcagccctaggggctccagcaaggcgccagttagtggcgtctttgctaatctctcgcaccactttagagatatctgcagccccttcatcgaacacacagtaat

SEQ ID NO: 53132 - DNA, 615 bp, Zea mays
  Clone ID: MRT4577_148453C.1
atatgtaatttattcattcttcaggtcgcgatgtcgtaatcggcgcgtgatttggtattaaatatttacaattgacattagctctaacatgctcagttggcgtgacattgcataccacgtgataacacattccatgcaatcaaaccaacaatatgtaactctcggagtaatcgagtgatattaaattgggattcgaacggacaaggcacttcgcccagtgtaagctgtctatatcctcagcttacatgtcttacttcttgaaacccccttatcactctcactcgtcgccgtcaatgtaacagtcgcctcattcgaggccctactctcccttccaaccgccaccttaaccgtcttctgcttcccagcgcccgcataaacaagcgcatttggcaacgcgaccttccagccctcgccttcgaccttagcttccaagcgatagatatcggagccaaggtaagcagagagatcttgggggtgaggattagtgctgagttgagcggcttttcccgtgttcttcagctcgaaggtgcaatacatggcgttttcatcactcagggacgggccgtcttgcgctaccttgccagatccgagctcgatgccgtgtttggtagatgt

SEQ ID NO: 53133 - DNA, 880 bp, Zea mays
  unsure (1)..(880): unsure at all n locations
  Clone ID: MRT4577_148454C.1
ttctgggaccttcttggattgacagatagtaataattataggaatatttatcagttattagagtcaatgtgttttttttgtttgttaatttatttgattttttatagataagatgcaattgttgtttatgtttcttctttttttctattgtggtaggggatcttgacttttgttttctatcagaattttcttgttaagataatttcgcttttttttgtttgatgtgttttagtattctcttggtgtatgtttaatgtctttgttctatctgtatttattcttcattttcttttgttttcaatatttaattttatttaactaatttttttttcttctcttttttttttttttcttcttttttttccttttaacttttcctttctcttttttttctttttttttttttttttttttctttctttttttttttttttttttcttttctttttttctcttttttttttttttttgctttttttttttttcttttttttttgtttttntntttttctttttttttttctttttctttttttttttttgtttttcttttttttctttttttttttttttttttttttcttntgtcgttttttttttttctttttttttttttttttttttttttttttttttcttttttttttttctttttttcctttgttttttttggttttttttttttttttttctttttctcttttttttgttttttttttcttttttttttttctttttttttttttttttttttttttcttttttgtttttcttttcttttttggtttttttttntttttttctctctgtttttttttgttttttgtgttttttttttcctttttgtgtttttttcttcntttttttttttttttttttt

SEQ ID NO: 53134 - DNA, 290 bp, Zea mays
  unsure (1)..(290): unsure at all n locations
  Clone ID: MRT4577_148455C.1
gggtacctcgaggccggncggaaaaacattcagaaaggaaaaatctgccactccactctcgctcctctctcgccgtcgccaaccatcgccgcctcgcgtccggacccgccgttcctccgaggaaatggctgcactgcaaccctcattttcaccagcaaagactttgaagagcagctgcagcgccctgaagctcccaaaaactgcactgtcatctggcattggagacatcccaccccttcaagacgcgcaagacaagaacactagcgacgcttactcgacacccaaagatg

SEQ ID NO: 53135 - DNA, 254 bp, Zea mays
  Clone ID: MRT4577_148456C.1
gggtacctcgaggccggccggggatcgctttcccaagaggatgtgcgggtgcggcggtttccgctcctgcgccgtccgcgcccgcgcgcctcttcacgagtctcgcagcagattcgtggagcgccattggtgaggggtcggaggcgaacgcacgccatctcgtgctgctcgaccccagacccagatggaccgtcgccccgccgcgcctccgatctccgcagcgccttccgacgagtcgagacagctctattccc

SEQ ID NO: 53136 - DNA, 425 bp, Zea mays
  Clone ID: MRT4577_148457C.1
ttgggcaattggggtttccctgggggccccacccacagccctccctggaaaacctcccgggggggccgagcctccatgggttaaggggggtggggcccaggggccccatttatttcccccccaaaatagctaggggggccccccccgggtttttttaaaatttgcaattggcccccaaaaccaacccgggggggcccccaatccgggccccctttggatccacccattccacgaaccaacaggggcccgctgttcattcccgggaggatgggcccctgaactgggcccacccgggcccggggccgttccccccccccccgacaacctcctttttcccccccttggaggtttccccggggggctgggactggaaaggggcccccccccccccctttcccggaccatggggggggccggcccccccc

SEQ ID NO: 53137 - DNA, 205 bp, Zea mays
  Clone ID: MRT4577_148458C.1
cggtctgatatggagaccgggagtgcaagtgccaccttatttctgtggcgaggcggaggcagtggctgctgttatgggcgggaggcggacatgcactagggcttgcgcttgggccccctgaaagtgaccgaaagaaggggtactagaaagcctaaagccttgcgcctaactggaacaacaagttcctatggggagcgcggagggg

SEQ ID NO: 53138 - DNA, 319 bp, Zea mays
  Clone ID: MRT4577_148459C.1
tctgcgttattctttttaaaggcaataacagattcaaaggtcgttggcgaaagggtgggaccagctacaacacgtgccaagatacgacggacattggataagaaggaccaggaataggagcatgttatcatatatcacagatatacaactgctaacggacaaaaaaaagggcggaccacgcacgggcctgctctacaacattatgaacactatcataaacgtgatggcatgtatcacagatttataatctgtatactgcgctgcgctcaactggctgtatcacagacaaagcaaaatgcatgctgaaactagagacttc

SEQ ID NO: 53139 - DNA, 442 bp, Zea mays
  Clone ID: MRT4577_14845C.1
gacacgcgtacgagatctaactggcccccgacttacgaatcccaaagcctccatggcgacggaccggcactgcctttcactcctgctcctcgagggcgtcgccctagccgccgtccctgctcgcgcggcgctgggcggcgggcgcggcccgctgctgggcgggtggaacccgaaccctgacgtgagcgactcgcacatacaggagctaggcgcggtgggcgctggggcatgcgaagcaccagaagctggccgccgacgggctgtgggtccgccccctggtgcgcggcgagcagcaggtcgtgtccgggatgaactaccgcctctacttggacgccggcgaccccaccgggcgtaccgggccctacggcgccgatttggacgagcaggttttgacccggaccccgcagcttggcttcttcaacccggtgacccgcgcccactg

SEQ ID NO: 53140 - DNA, 344 bp, Zea mays
  Clone ID: MRT4577_148460C.1
accaccacgcagcagtgcgcccagcctatctacccccccacccctcgaattgttcccatggccgccgccattcgcggaagccctacccgcgccgccgcgccgacccagccgcgcgcggtgctgcgggtggcgtcgtccgccgcgccagcctcctcctcctccgcccgcccgcgcaggggcgccgtggcagaggccgtaatgcagccgggcaagggggtcgccggggaggcgggctcccccgctgccgagctggagatggggattcggtgtctcggtcacagtgactgcaatgatgcaatggtgctaagtgtggtttttcgcaatggtccaatcgagaacgctgt

SEQ ID NO: 53141 - DNA, 427 bp, Zea mays
  Clone ID: MRT4577_148461C.1
cactttgtcctcttttctctcttctttgagacacgcaactttatcattgcgctctagctcatctgaacgctaaaagcagggcacccccgatgatgggtcgttgggagaatgctggtggctttgtcaaagcacgttgccttgaatggcaccaactgctgcactcgcaagaggattccagcggtaggcgcaccgagctggtagaacggcaacaactgtggttgtgccaagacggtatcaggtctcacaccagccacctggctgaatggcagcagctgctgctgctgtaaatcgccaggaacgtccactgctggcagcctgccttaatgcaagaaattggcgggggacggcactgcatagctggctgaatggcagttgtcttcgttgcatccactagcctggggttgactgctgctggtggcttgaatgc

SEQ ID NO: 53142 - DNA, 165 bp, Zea mays
  Clone ID: MRT4577_148462C.1
gcagttggttttgtgtgtggtggcgtcgcatagcatgtacggttgagtctgatgaatcccggttgctggcagtggcacacagacacatggatgtatcatggctagttagttagttcatggtgtgtgtgcaagtgctatcttggagagatttagtgactgtatacc

SEQ ID NO: 53143 - DNA, 245 bp, Zea mays
  Clone ID: MRT4577_148463C.1
gtccggtttatcgacccgattgactgattttcaataggaagtgcatactcaacctcttcgtggtgcaagtatagggcatgggggctctactatcatcaaactattgacggaatagctcaaatctatggatcctaagcaccctgagggagcaacggatgaaatagagttggatcttgtttagcaaagtacgtttcataagcaactaaataattgcaccttcgttattacattcatgtggattaaac

SEQ ID NO: 53144 - DNA, 457 bp, Zea mays
  Clone ID: MRT4577_148464C.1
gtatgtatctgcactcactccatggagattaaaatgaagtcttactttcttatgtgctaatgagagcttggacatgttatatgtctctttccgtgcacaattactggtgatataaatctcaaaatgttatgaccaatttcaatatatttcagaaattaatattactaggtaactcatgtataatggttgctttttaagcaaatgccaaacaaatatagagaagggggattcaaacagatatgatcttgcactatttacaatcttgttaaccatcttgtctatttctcttaaaatgttactcagatgatgatttgtattcaatacattcaccaatggccgacaaagatgacaatgatgaggacgaggccaaacacctgctgccagctccatccaacgaccagctttctgtagatgtaccgccaaagctagcgaaagatcttctctgaaccactccatg

SEQ ID NO: 53145 - DNA, 446 bp, Zea mays
  Clone ID: MRT4577_148465C.1
aaaaccaaacccccttttttttttgggggttttttagggaaaattaattggggggggggggctatttttacaggaaaagcaaagggccggccgggccatttccgatccaggggccttaaaccaaaaggttttttccggggaacgcgggggccctcttccccaattgaaccgacttttttaaacccctgccccttttttgggccccccgctttaacctttagaataaggtcctcctccgattggggggcccccgcttttttttttcccgtcttgtccgccgccggttccttgaccccccccgctttgtccgccgccgggtcttttgtttggggggccttgcccaggggggggccccccacccccttggggttccccttcccctcttgaaggttgcccaaaatgcccccccccccgggggggtttacgggccccttttgggggatttt

SEQ ID NO: 53146 - DNA, 400 bp, Zea mays
  unsure (1)..(400): unsure at all n locations
  Clone ID: MRT4577_148466C.1
attnttnnccgattgggtacctcgaggccggccggggaatggttcccagagagcggggacgagaattcgcaatgcaactagccggcgacacggatattgacggaaagtcatcgatacgctgcgacttccccaccatgatttcgataaagctgtacccagagaggatgcgcccggaacagaccacgtgagcacggccgctggaggacgctggctgccactacgatatcgtgcccatcaactatgccaccgccgagcacaaaagcctcgtagaacctcggccgcaacccgtttgctccggccccagctctacaggatacagactcgcacctcttcgaatcacgagcatctgcacgtacgctgctcgcaaaaacaatccagagctgttgagggaacgaaacct

SEQ ID NO: 53147 - DNA, 153 bp, Zea mays
  Clone ID: MRT4577_148467C.1
cctgtctgcagtatcgcatgcatccagagattagcaggtttccatctttacgattctacggaaataaactgcctgatggtgtggaggtcgctgataaatcagcttcatttcattttcatgagtgtcttggtccatacatgttttttgatattg

SEQ ID NO: 53148 - DNA, 371 bp, Zea mays
  unsure (1)..(371): unsure at all n locations
  Clone ID: MRT4577_148468C.1
ccaagagcngcgcgacagaagcagccgcggcggggacgccgcccagcagggacggggccgacgccgggggcaaccggcacagccccgccggccaagggacccaggcagaccccaggcccggggcagaagcggcccgccacacacacggacggggcacgagcacacgacggaagcacaagcaacaaagcgccacggaagcgagcgaacgacgcacggagacagaggccagagggagagggccaagcgcgcacccccccgcccccgagcgagcgagaccgaaagcaacaaccagaaagggagccaagacgcccggcccaacacgcccgcacacaacgcagacacgaaccaacccgcacagaaaaaaaaaaaca

SEQ ID NO: 53149 - DNA, 560 bp, Zea mays
  Clone ID: MRT4577_148469C.1
ccggggcggtactctttggtttgccccacgcgcgcgcgatattggaacctacctagcggtagactatgaaccattttcaacgctatgcacaaaaccagtaatggtgggcctaccaccggaccaggccgatcatggtctagcgaccatgagcagatgtagggtcgtgcaccccttaagcgagcttcgacagccaggctgtgagctccctccactcggtcgctgccgctggtccttcggggagcgccctgggctgatactgggcaccgcgtgactcttagctcaacggggtggcaccttgccacatgccttcgcgaactgggcattatccaggatcagggggcttggccgcggcccagcaggggcggatcgtttctaccgcaccgttgtcgactggccgctcgcccggctcaagctctctatctgctgagagctcactggaacgggatgggacatccccctggaggtcaagaccgtcttccaccccaataagtgctacggccgggacgagaggggaggcgcagctggccacccggcacaggccgctgcgcgggcttccagcc

SEQ ID NO: 53150 - DNA, 286 bp, Zea mays
  unsure (1)..(286): unsure at all n locations
  Clone ID: MRT4577_14846C.1
ggccgaccgacgcgtgcgggngggtngtcttctcctccctttccggttttttancgganncgngaggaacgggggcgggcggcttcanaagtgagcgcagccaaatggcggcatcggatgttgaataccgctgcttcatcggcggcctcgcctgggccacggacgaccactccctgcacaacgccttcaacacctacggcgaggtcctcgagtccaagattatcctccatcgggagacgcagaggtccctccgattaggntnnnaaaccttatacacggaggaggc

SEQ ID NO: 53151 - DNA, 678 bp, Zea mays
  Clone ID: MRT4577_148471C.1
accgccggtgtcgtctatcctgaccccgacacctcgccgcccggtgccacctcaccgccggattcacatcgcccagccgccccaccagccagaacctcgtcgcctcgcccgccttgctccgcaggttaggcagccagtacccccaaaccctagcatcctcggcgctgtcggtcgtagaagagcactgggggcgtgagagagggagtcaccagccctcgagacctcctcccgcttctaccactcagccgacgctcccgaaaggggcatctcaaatcccacctcactcccttcgacctctgagatgtcgatatgaatggagacctgtaacttgtatatatattagggcttagttttcttgtttcagtatctgtttggagttagaagcaagggttctcatggcatctccacaagaatccaattctctgtgcttgaagcgaaagcttgttgatgactgcctgtcaaaagactgcaaatctcgccgtgtcaaatctgagaatgagccctcatctgattcatttgctaaacgctgcaactgttgctgcactcgacctaatcttgccaatgattgtgtgaatttcctgaagagtggagcgccaaaccgtgtcatgtattacaaaaaaggttcgtggcacaattttccagagccaataatggaattcctcatcgattgaattaaag

SEQ ID NO: 53152 - DNA, 399 bp, Zea mays
  Clone ID: MRT4577_148472C.1
gggaaaaaaaaaacccattttgtataaaaagggggggggccgggtccagaacaaagttcctaccctcgggggttgaaaacttttcttatgaaaggggcagggttcaccgaaaagggaaataccccttttaataaaaaaaaaagggtttttttaaagaggagggggactaaaaaaaaacccccaggggggggccctttttaccattgagggggggggcgcccccaatttttttttaaaaaaacggggggggttggtgaccaaaggggggttttcttttaaaggtcccaataatgggggggaacaaaggggccaaaaaaaaacaatttttccaggggggaaattttggaccgggggggggacccgggaattttgggcggggacctgggggggtaacaattt

SEQ ID NO: 53153 - DNA, 779 bp, Zea mays
  Clone ID: MRT4577_148476C.1
gccggccgggtccggtcacctcgccttcacctcagctctcggcctcacccgtccacccacccacccgcctcgcctccatccacagcgaccacgcccatcttcgctctgtccgctcacccccacctccccgcccccgtctccgtccgcacccgtccgctccagccggatccggagccgagctcgaccttgttcaggaaggagagcccgaaccgcggcgggcgggagggctctttttagcttgccccgcctgaggccagccgccccatgggccagtcgcctgagcacgctacgtatcagctcatcgaccggcgggaaggctgtagcgtcggttggacgtcgtgagcgtgcagagcaattaagcaaagcagggcttgggtaaatcattattgaaagcatctcccttttacatgtaaccttgcatacaatatctgttaagatgagttcactaaataaagttgtttcaaatagtggagatgcatgttcagtcttagctagtaaagtcacatcattaaatcccaatgcagcggagtttgtaccgtcatttgttaaaccatcttttggaaatggtacagttctagataagtcagatttcaggggttcttctggaaaaacaattctagataggcctgagccatcaaagtctaataacttcgatgatgaggcacaccagttttggcataaggcagcttccggatgaccttattccagacttcccttcttttgagaaggtgaacaagggcccgaactgtcccttgctgatatatccctgaatcgccccc

SEQ ID NO: 53154 - DNA, 279 bp, Zea mays
  unsure (1)..(279): unsure at all n locations
  Clone ID: MRT4577_148477C.1
gatttccctaactacacacccaaccatttataagcacagctggaagtttccttttatattgcaccaatcacttgctagtaaagatggatgcactaacccacagatctgagaaagccagccacattggttttatctggatctgaattctttgtattagtaatttacttaagaagccagtctaaagagctgccacccattcttgtgtgttgagcttttgcaatttttatttagtgaagatgccanaagcttcgaaggacccaccaagcagtgatcttgttt

SEQ ID NO: 53155 - DNA, 780 bp, Zea mays
  Clone ID: MRT4577_14847C.1
cgggttgatacatattgggcaacattacaacttcggtgcctgggggaatacctcacaaagagagtgagagaacagatgcttgcaaaaatcctcacttttgagattgggtggtttgaccgtgatgagaactccagtggtgccatatgctcacaacttgccaaggatgccaacgtggtgaggtctcttgtgggtgatcgaatggctctagtgatccagacaggttgtgcagttctcatagcctgcactatgggtctggtgatcgcttggcgtttggcccttgtcatgatagcagtgcaaccccttatcattgtttgcttttatgctcgccgtgtcttactgaagagcatgtccaagaaatcaatacaggcacaatctgaaagtagcaagctagcagctgaggctgtctccaatctccgcaccatcactgctttctcatctcaggaccgtatcctacgcctctttgaccaagcacaagatgggccacgcaaggaaggcatccgacagtcatggtttgcaggactgggccttggcacctccatgagcctcatgacatgcacatgggccctagatttctggtatggtggcaagctcatggctgagcgtcacataactgcaaaggcactcttccagaccttcatgatactagtaagcacagggcgtgtgattgcagatgcaggtagcatgacaacagaccttgctaagggtgctgatgcagtagcttcagtattcgctggtcttgacagggaaaccgaaattgaccctgataaccctgaggggtac

SEQ ID NO: 53156 - DNA, 236 bp, Zea mays
  unsure (1)..(236): unsure at all n locations
  Clone ID: MRT4577_148481C.1
gggttccaacaatgcttncttggataagcagcatagaacggcggctaatgcaactgcactgggcgtgaaagcctcgaagcgactacctacggggatccagtataggtggctacccggaacacaaaggctctctgcaggcacaaagcttaatgcacgctgacaacaaccttaatgtgcgacgggaagaacacctggctctggtcatagacaaggtcgctcatgcacggggacaaggc

SEQ ID NO: 53157 - DNA, 208 bp, Zea mays
  Clone ID: MRT4577_148482C.1
tgtgataggaaacatagaacattgcatctgcatatacagacatagcagacatgaccagactgccctgcagcacgggatcctgcataatggactacactccgaggttttccgaaaggtgattggccccgtccatagcgaccgcgactatctaccagactgtcctgcttcatgcaaaccaagaatatgtaaaagactaattgctctggag

SEQ ID NO: 53158 - DNA, 307 bp, Zea mays
  Clone ID: MRT4577_148483C.1
cggcatttctggctttaagggaattaaggctctgcagaaacctactgcagaaatgtgtccaacaccacatagtaaaggatgagctgccccgcatggacagtcctctccaaccctgtactacaagcgattcttcatattacgccttcaatggctgggggctgcagcgagggaaggatgcgttacctatgatgcagagttctacaagaccggtacggctaggaacggactacttgtcatccagccggacataactaaatcaccatcttatactcctgcgggatctgcacaccattgcggagcaagccag

SEQ ID NO: 53159 - DNA, 515 bp, Zea mays
  unsure (1)..(515): unsure at all n locations
  Clone ID: MRT4577_148484C.1
gtacgcctgcagantaccgtccgaattcccggctttttctccctccgcttttgcttggttccatcgggccggagagggagtagctagctagctagcagcagctctgctgttgagtgtgtgtgtgtgtgtgtggagggtagctgcaggtggctctagctggaaaggaagggagcacatggggaggccccgcactcgagcatgtacaaaaaccggcacaagagggggcggggaggagagccacaacgaggacacacagcgcgaaagagggtctcatctgtgccacaacatcacgagtatagtacgatgagtggcactgatgctcacgcccttgggagctagatcagattggaggttgacggaattgagttgtcagagactggctgagggagatctctctctagctctttattatcttatcttgcacagagagccatggcacttctgtctctctgcactggatatttgctgattcttgatggagggaacagggaagcactgcactaagaactatccga

SEQ ID NO: 53160 - DNA, 313 bp, Zea mays
  Clone ID: MRT4577_148485C.1
aaagaagagttggcatatgaacattacatattggaaggacatggaattaagcataggtttaggtgctaggtatttatgaacgaaagaatctttatctccggaggcgagatctccgcgccgccggcgggaagctaaactaattaatggatgtaataagctagtaggggtggtgctagctgccgagcgcgtgcgtcgtgacgaataagccgacgatgcctgggcggtaggggaggtacgactgctgctgcggctgcctcgtcctgtcccctgcgagctcggcggcgccgggcttgccgtataagagcctttgcgc

SEQ ID NO: 53161 - DNA, 182 bp, Zea mays
  Clone ID: MRT4577_148486C.1
cccccttggccgcttacggcttaaggagttctatcttgccatcaaaaagatatatgggtccacttctaagtactggcatgaccatgaaccacgctggccatgcaggaccaaataatggagaccttcttcagggcaccaactattgtggtcaacacaaaacattatggcaaggtgcaacttta

SEQ ID NO: 53162 - DNA, 226 bp, Zea mays
  Clone ID: MRT4577_148487C.1
taacatcgtcctatttgtctctcacccaattcgtttcaaaaggttacgctagctcactcgagctggacgtccttagctctccacttactgtactattctacatctgataattcccgattgctaagctccatcgctgcagctactccgaccactttgagggcactctctcttacattacgtgtgattcctcgatgaccagtaagaccaggttatatctccaccatgg

SEQ ID NO: 53163 - DNA, 1518 bp, Zea mays
  Clone ID: MRT4577_148488C.1
gggtacctcgaggccggccgggacacgcacggaggaccaggcgtctaggcaccaggccagccgccagcccgccagacggagtgacggaccatccagaattctagattccaggcgtccaaggctccaagccatcctccggtcctcccatccaccaccggtccaccgccactccgccagccgaccactaggtcaccaggccgcaccgctgcagctcgcaatcggcggtcggaggtcggccagtcgccctcgcccaggtctccactctcccgcacccagtgacccaggtctcccgtctcccaggtatgctgtcgctgctgatgtcttcgtcggtatcggctacgtcgagcccacagtccatagagaacggtgaccatgacccaagctctaggccagcagcctcgtcccctcctctgcagattcaggcaggggacttatcatcctctccggagacgaccagctcagacaacgcaaggtgagctgtgagcactgagcacaatctgttcgtttgatttttggtatatttgattcaatatatggttgttcttgttgtgtttgttatatgtgcgattgtactgagcaccgattgtgagtaaactttcattgaactaacatcgtgacggcgacctcgcgaagggacgccgttgctgctaccgttgtcacggccggcgctactgttaaagataatctaatgggtaaaacagtggcctcgccattcaagaagagtcgtgtcaccgccaatcgaagtcgcctcgctgttgaaggaccaccagctacgcccgctaaagattcttccaccatctccagcgtagagttgttgaaatcaacggggttcgatgcacgcaaacccctttttttttacttgaatgtgttctttatttatcagttagcaacggatctatgtttgttaatatggaagtactactaccatattaacaaacataatctgaaactaacatcaaatgaatctaaaattagcaacggattatgtttgttaatatggtagtagtacttccaattatattttgtagctatgcattcactaatttctacatctgtagctatccattccaattagcacagttgcctcagagtccgcttttagcacaagtggttgtgttcttagcgagcaccgcagccgacttactccagagatcttggaggcgcttatgtgctcacaagattggatgcgacgcaagtatctagatgcatctaatgctgaccaacctgaaacattttggacttgccttcaagagatgtaggaagggatgcagaagcttttactctgagcaacaagactggaattggaagagaagggtgcccttaagctccaacagcttagaagtcttatatattcaaatattaagtattgtgtattgaacaattagatttgaaggcatgattttgtccacagttttgtagaatcaatgctatgttttgtgtgatttgaaggcatgatattgccatttaatgttgaatattgttgaacatgtgataaaattatgttgggttcgatacatt

SEQ ID NO: 53164 - DNA, 484 bp, Zea mays
  unsure (1)..(484): unsure at all n locations
  Clone ID: MRT4577_148489C.1
cgtacgcgggcggcgaagatgtggcggagcgtgcggtgaacgatctcgccagggtcacacgtgagcctacgtgcttggcaccaaccccggggcgcctggtgaccgctcccgctactgctcccaatactcctagccggtgcaccacacgctccggttacatgcggccggacacgcacaccatggagctaatccgatgcactcacgcctatcaaccactaggctggggcgtcgaacattcaaacccaacagcgctcgtcggctccatctgatccacccctactacgactgacacattgaccgacaaccgaaacaactacatgaccacctatgcctgcacccactacacgaccccgatgggaccaatggtacctaatatttacttggactgcgcgtcctgagcgacaacacgggcccacgccgggatcctgccggctgactggcatgtncgccggcgccgattatctaatacataagaacgtagacg

SEQ ID NO: 53165 - DNA, 373 bp, Zea mays
  Clone ID: MRT4577_14848C.1
aggtatgatgcacgcggccgcaagcgtggaccctctacagcggccgccctcgctcttttttcttttttttttttttctttccttatcccttggtctttcggggttgctgtgactacatcaaattattttttttcccccaaacccacaagcttttatttattactccataaaaaacttcctgagcccattgtcaccaattacaagcctacacaaataaccctggctccctctgagtgccaaataccacaggactctaaacagtcgggcctacttcccataattgttggataacaccccacaactgcctttgtgattttagacacccaagtccccctcgccttcttttttagggcccgcccccttaaaaggcccc

SEQ ID NO: 53166 - DNA, 154 bp, Zea mays
  Clone ID: MRT4577_148490C.1
aacatggctaaggaaacagggggcagacaagtatctccttgcagttgatcatgaaactgagtagcaatccttagatgcagagaaagcttaagatgatggtagctgatgccttgagagttatcaacctacacacctggtctgagtgggaatggat

SEQ ID NO: 53167 - DNA, 459 bp, Zea mays
  Clone ID: MRT4577_148491C.1
ggtggttgctttggcctgcacggctatgtgccttcactagattacgtcatcgaagacatcgtgagtttatacttgtgaaaaaagattagttctttctttatcaccgctgtaatgcctgattaacatttttatctggaaaacaggaagtgcttgttgacagaattctgatggagaatccaggggtcccttgtttcctcctcggccactccaccggtggggctgtcgtcctgaaggtatggcaatgcgaagctttccatcagcatattcaggccgggtttagacactgaccccctacttctctgggccctgtgaacgaacgaacggataccctgacggccgggcagagaaatggtgcaaaaacgttagcgaagtaacctggtcgttgaaacctgaaaaatggtctggctgctgctgctgctgctgcatgggtgcataagcttggtttcatttcacatgcct

SEQ ID NO: 53168 - DNA, 441 bp, Zea mays
  Clone ID: MRT4577_148492C.1
cctggcgtcaaacgtgcaccttttcttcttccgttccatgcgggccctctcctctacccaaagcaagccactcgaccatgaagctccacagatcacccgtcgtctcggaagatctccgtcgccgttgccacgccggtcctcgtcctgctggcgctcgccgtcttctcgctctacgacaacaacttagctgatagttaccagtacatacgccgcgcctcctcttcatcctctgcgtcgtcgccgtcgacgccgagtccggccactaccccctcgtcttcgacggttccggacacgtcgtcgtcgtcttcggtcaaccccctcctcgtcttcgacgtctccggccgccaccaccgtcgagggctgcgaccttacgccgggccaatgggtggcggacgacgaggcgccgtactacacgaacctgacgtggccgttcattcgacg

SEQ ID NO: 53169 - DNA, 433 bp, Zea mays
  Clone ID: MRT4577_148493C.1
cggacgcgtgggctcgtatccgagtcgatctctgctccggtggcgattggagggcacgatcgcaatgacaggtgggtccggctgcctcgcgctcacagtgcaccgttggattctttccatggtctacatgccagtgagaaagtgcacggcgactctagagtaaatcccggtgctaccgacagcgtgagtgacgaatccagcatgcgcggatgccatggcggctcagcttgagaccaagctggcatatactatcttttgactggtgaactcgttgcatggcttgttctatgtttagcaatgtattgccatatagtaattaatttccagcctaggccccagaattaccctcttttaatctaacaactttgattccaattgcattaattgcattgcatgatgaacggacctttttaaccataagtaagttcctttt

SEQ ID NO: 53170 - DNA, 341 bp, Zea mays
  unsure (1)..(341): unsure at all n locations
  Clone ID: MRT4577_148494C.1
aacaccatgccgggaatggagggggaccatnnantcgaggacatcggcagaggtgaattttaaaagnaggttacctnncaacgatggggttgctgccttttcggggggggggggggtgaaatagaactggttgtntggnagnaattgttgctgttgtaggaaggcagtgaccaatgggttaggcacgggtagggggttaagggactgggggcgctggcgnaggtgcgcagntgggggcgacatggggagatggggggatggaaggggttggtgggagaggggagaagggtgtggcgcggctgggtggggtgaaaactggagcaattggggaagcggggggg

SEQ ID NO: 53171 - DNA, 433 bp, Zea mays
  unsure (1)..(433): unsure at all n locations
  Clone ID: MRT4577_148495C.1
ggccgggggnatatttcatatgtgtacacctgtcctgtttgtatgaatgagttgaggtcgagccggccaccaagcccagcacggcagcgcaccaaacaccaggtcctagcctaacaaggcaactagcagaatagcaaaaaacgaaatcctaaaataaccagccatacactacgccgactgctaggagactaggacgacggtaacgaccatggattctcagacgccaacgaactcggatggtgaccaaggaaggtaaggagactctatttctccatttcttctattggtcctgaagtacagtttttttatggatggatgaatggatcatggttcatggatgagttcttgccgatgtggtgatgtatgaaatctggatattttgtactagctgttagtacctagttatcctttaattgggggatggtggacccat

SEQ ID NO: 53172 - DNA, 148 bp, Zea mays
  Clone ID: MRT4577_148496C.1
ccctgaagtcttacatgggcagttctaggagtcgtgaccgtacctgaagtttgagcatctgatcgcgaagcaggccatagtcgaagtctttgccggctgccgcgactcccacgtcgtcgacttcggcatcaaagaggggacgaagtgg

SEQ ID NO: 53173 - DNA, 356 bp, Zea mays
  Clone ID: MRT4577_148497C.1
gggaacaataaacaaacagcaattcaaatcagcccaggaatgacaggtgacaaacaaaaatccccccccaaatcaggggcacactaacgaagcctttaacacaggtttttgggtcccaagcacaaacccagaaacaaagggttacatgggctggggcgggctaaaaaatatacaggtcatgccatggcaaaaacggaaataatttttggttcacccccaaatacaaagcccatttggttcaggccaaagccccactagcgccaagggccttaagccaacaaaagaaggtcccctcccgaaccttttggtggtaaaaaaagaacagcaacattcattggcatttcggcaaattgggg

SEQ ID NO: 53174 - DNA, 517 bp, Zea mays
  Clone ID: MRT4577_148498C.1
cgggagagtgaaataatgctgcgcgcgcacgagcacgacacgagctttcttccatcaagacatggcgacgccggagctttggtggtactggtggctatgggtgacgacgatgctggccgtcgtcgtctcgaccgtcgtctgctacctgaccaaccagcaccgccgctgggggggctggggctcctcctcagggcgtcgtcggccgccgggcccgcgtcctctcccgctcatcggcaacctgctggacctgcggcgcgcgcccggcagcctccaccacacgctggcgcgcctggcccgcgcgcacggcgcccccgtcatgcgcctcgacctgggcctggtcccggccgtggtcgtctcctcccgcgacgctgcacgggaggcgttcgcggcgcacgaccgccgcatcgcggcacgccccgtcccggacagcaagcgcgcgctcggcttctgcgaccgctccatgctctcgctgcccagctcggccccgctctggcggaccctgcgcgggcgaatgggc

SEQ ID NO: 53175 - DNA, 210 bp, Zea mays
  Clone ID: MRT4577_148499C.1
accctaaacccgcaggaacagaaagggcgcaattttggcttaacttcccgacataatttaaatttctatagggacataaacttcttccggttcgaacaagaaaaaaaccgtaacaaaaatttggtttgcatgaacaggtcagcccaacaatctgaactcccagcccctaaaaaattaacattacacagtggcggaaaggcggcacacact

SEQ ID NO: 53176 - DNA, 473 bp, Zea mays
  Clone ID: MRT4577_14849C.1
gccggccgcgaactaaaacctttaaaaaaaaaaaaaaaaaaaaaaaaaaaaaataaaaaaaaaaaacggaaaaagaaggtaaaaacagaaaaaaacaaaacaaaaaaatcaaaaaataaaacggtccccgtggggtggcgcgggaaattacggaccgggacccggggccgaacccgtttccctttttaataagtggggtgaaattagggcttacaatagccaagggttaaacctttttcaaaaaagaaattggttccaaattccaaacccaaacaaaacttgggaccgtaaaggttaaaggccagggtcgggaagcgaaaaagatacttcaaattaattttatgggtttaccgcccgttttccatttggaaaacggaaacttgcccgcccctttagttattgtaaaaacccccgggacggggagaagtcattttggtttacaagcgcgatttgtttttttctttgaaaaaggg

SEQ ID NO: 53177 - DNA, 400 bp, Zea mays
  Clone ID: MRT4577_1484C.1
gacacgccatcttatgtgcgtcaatactttataacagtgacaaaaaaactgtctgcaactctagcattgcaaccctgaaggattgacgtagagaactgcaagttttcacccgtcccataaatttaatgtggcacataatgtgtaacattatagtagaccccaaacaacctacgatctggggagcagtggaaagaagcagaaatcagtcacataagcagaaaagaggaggcacccccccccccccggtttcttgaactccctgtccaggcatctcttctgcttacagtttcttcaaatccctgtccaggcacggcagctccaatgttagtgtgtctactactctatttgcttcccagagcctccaactccatttccattctcttctgttcttcactcttct

SEQ ID NO: 53178 - DNA, 225 bp, Zea mays
  Clone ID: MRT4577_148500C.1
aaaaaaaaaaaaaaaaaaaaaaaaaaaaaaaaaaaaaaaaaaaaaaaaaaaaaaaaaaaaaaaaaaaaaaaaaaaaaaaaaaaaaaaaaaaatggggcgggcggcctacagtttcaaagctcccatcctccttcctccgacatgctaacttttatattttgtaacctaaaaacaaaatacaggccctggtctacaacttacaacctgggaaaaccaaaaccttcc

SEQ ID NO: 53179 - DNA, 794 bp, Zea mays
  Clone ID: MRT4577_148501C.1
ttatttttagtgcattcaaacactaactattagctctaaagtttgtttcgcaaagctttacatcaaagacccttttccataaagaacaccaaataaataagacattatccacacaaaaaatcacaaataaatatgtagggtcaaccaaaagcctgcatctcagttctgttacgcctgtatactctgcacttcaaaggacatgtttcagagttaagactacactgaaaaactgctgtgaagtatcataacatccttttgtcctattcgatgcaggtgacgattgcatctccatccagacaggatgcagcaacataaatatacatatcgtgaattgtggaccaggtcatggaatcagcataggtggactaggccgagacaacacaaaagcatgcgtatcaaatgttacagtaagagatgtcaacatgttcagaaccatgaatggtgtcagaatcaagacctggcaggtaagcttgagaacataagtacaaataaaattctaattctaattcaacatccggcattagtacataatagttaataatgtcacaaaagaaaatctgaaaaaggaaagaaaacgtacatgtcatcgtttgctatctatacaagcaataaccttgaaaagttcaaagaagaaaaatgatgtcacccaaaacaattcctagtgtctaaacaaagtgaactctcatttctcgcagggtggtgtaggattggttcaagacataaggttctcaaatatacaagtctcagaggttcaaacacccatcatcatcccacgcgtccgcggacgctgtggg

SEQ ID NO: 53180 - DNA, 557 bp, Zea mays
  Clone ID: MRT4577_148502C.1
gggccaacccaaggccggaccaacaggcggggggccccaaaaaggacccccaaagggggcccctaggatttggccccaaaaaaatgggggtcccccccaaatcccacgggcccaaacagaaacttaaaaacaccaaccaaaatggaaaccggaaataccagctaacaggggaaaaacacccccggggggggcaacgaggaaatggcccccccggcacccgggccaaaattggggcccccaaaatggtcccctaaacaccaattaaggcccccggccggcccaaaggggggctaaaaatataaatcaaaaaaaggccggcccaaactttcccacaatggaaggggcaacccgcccccccagcaaaaaagggggggaaccacccttgttaaggcccaagggaaactaaaaaaacgggtcggggacatgggacccctccccggggcttttaaggggggggaaaccccgaaccatggaaggcccccccgccccccggggcgggggccaacaaaaagctttttcaaaaaacccccggaactccggcctcagggcccttcccc

SEQ ID NO: 53181 - DNA, 323 bp, Zea mays
  unsure (1)..(323): unsure at all n locations
  Clone ID: MRT4577_148503C.1
cgccggattaagcacattgagagcgctagatacgtgtcatatcacataaacaatggtgaacgctcgtgctgtagttggtagcagcgatggtatcaagggcaccatctttttcacacaagtaggagaatagcctaccacagtcaccggaagtatctcaagcctcaagcctggcctccatgggtttcatgtgcatgcacttggtgacaccaccaatagctgcatgtcaacaggaccacactacaatcctgcgagctaggaacatggagcaccagaagatgagaaaagccatgacggtgatcttgganatgtgacagcaggagcag

SEQ ID NO: 53182 - DNA, 450 bp, Zea mays
  Clone ID: MRT4577_148504C.1
gcgcagtcacccgcgccggacatccctcgcgctagctgccagtcgtcgtccccaccccaccatggggttcgccgcgagcgggggcagctccccggcgacgggggcgccggggagcgctctgggcgtgatcctgacgcgcgggggttccccccgcatgtgctggtggggcggtggttcacggtgttcgcgagcctgctgatcatgggggcgtccggcgcgacatacgtcttcgggagctactcgggcgcgctcaagtcggcgctcgggtacgaccagcgcacgctcaacacggtgtccttcttcaaggacctgggcgcgaacctgggcgttctcccggggctgctcaacgaggtgacgccgccgggggtggtgctgggcacgggcgcccccatgaacctgtgccgctacctcatggtgtacctgggccgtgtcgggggcgcaccgcgccgc

SEQ ID NO: 53183 - DNA, 355 bp, Zea mays
  Clone ID: MRT4577_148505C.1
ctatcacgatactaagggacaccagtaccatgcagggatccacaatatgactacagaggctacttctgaacctgatgggcactatgcaggtgggcacttctgctaagtgacatatgcccaggttttaaagatactgctcacacgtgcatacacatcttgttcaccgtaatcagcattgcccacaggagttatacaaaatgacatcacatcgcttttttggtcccaacgtaggaagcaagcaacctccaacaagttaaaatgatgcattgatgctaggtaaaatggtgtgagcgaaaaaccaagataaaggccctgcgaattaaaattatcaagacctgaacggatgcaattttct

SEQ ID NO: 53184 - DNA, 224 bp, Zea mays
  Clone ID: MRT4577_148506C.1
ccgttccttttgttctcgttgctgcgactcctcgtaccaattgtaacactcttcttactattcttcttcatacctctcttcttgctaatgcttgtaacaatcttcttacccctcgtactccttgtaatcttcctaatcttcttactagttttgttaacgctcctcgtactagttttgatattagtactattgttattcatgctgttacccgcaatgaaaattga

SEQ ID NO: 53185 - DNA, 348 bp, Zea mays
  Clone ID: MRT4577_148507C.1
ccgtgccggacatccctcgcgctagctgccagtcgtcgtcgccactcgccaccatggtgttcgccgcgagcggcagcagctcgccggcgacggcggcgccggggagcgctctgggcgtgatcctgacgcgcgggttcgcccggcaggtgctggtggggcggtggttcacggtgttggcgagcctgctgatcatggccgctaccggcgcgacgtacgtcttcgggagctactcgggcgcgctcaagtcgtcgctcgggtacgaccagcgcacgctcaacacggtgtgcttattcaaggacctcggcgcgaacctgggcgtcctcccggtgctggtcaacgaggtgacgc

SEQ ID NO: 53186 - DNA, 326 bp, Zea mays
  Clone ID: MRT4577_148508C.1
tctatacagatcacggacgctgtagagcatacaaaggaacgtacaacagaacaccacgaagatggtcatctatctcgtcacgtgcctggatttgacaggtggcagcgccactacaatgcaaatgccatgaccctgcgcggagctaaatgaattgtacggcgctagatcccgcctgacgacgatgatgggcgcccgaagactgcaccactactcggcgttcctaacacatgcgcagtgtaaatggctaacgggacgcgccttctacccccgcattaagcacacgagctcgatggactacccgctgcgggaacagtgctctcggcagc

SEQ ID NO: 53187 - DNA, 338 bp, Zea mays
  Clone ID: MRT4577_148509C.1
atttgtgtcacaatgcaaggccgctgatgctttgccatgtggtgaagtttcagacagatcgattcagctagcttctttccatgattccatccacggagctcagctagctcggcatggacttcagccctcaaagaaagagcgccgaacgcaaccgcggcagcttcgaacacgatgacagtgatgatgacatcagagctgaatccaacgcctctaataagccatctgcgcattcgcacgacagcaccaaatccaagcccaagacgagccatggcggttcaacccgaagtatctccgaaccgacagcgggcaacaataatgctgacgccaccaacttggac

SEQ ID NO: 53188 - DNA, 485 bp, Zea mays
  Clone ID: MRT4577_14850C.1
agctaagctaaggcttgctaatttgcccagcaagtctcaccagactagcggctagctgcgagagtggccaaggacatccaggccgcggcgcacgagggcaaggactactcggacccgccttcggcgccgctggtggacgccgaggagctgaccaagtggtcactgtaccgcgcggtgatcgcctagatcggggccacgctgctctgcctctacatcacgggggccactgtgatcgggcacaagcaccatacggacgcggcggcgcttggccccgacacggcgagcgggggcgtccgcgtgctccgcatcccctgggccttcagcggcctgatccttcatcctcgtctactgcaccgggggggtgtctgtagggtacattaaccccgccgacaccttctagctattccatggccagcaaggtctccctggtgcgcgcactgttatacatcgacacccagtgcctctcttgcccatctgcaggcgtc

SEQ ID NO: 53189 - DNA, 149 bp, Zea mays
  Clone ID: MRT4577_148510C.1
gtaagggttaatttcataaggttccaggcgaacaactacccccaggggactaacagaggcgccccccctccatacaacatgaactctcttgagccacgagttctggcaccgtttggatatgccctaagacccaagcattcccgggggag

SEQ ID NO: 53190 - DNA, 744 bp, Zea mays
  Clone ID: MRT4577_148511C.1
attgggtacctcgcgcacggcacggacgcgctaccttttctctctctacgaccttccccttacctattcgccgtccctctctcctgctgccctccccccgccgccgccctacggcccaccccgccgacgcgccacctccgtatctctcttccccgcctacgcgggcggcggatctccggatccgcgcgggggagggagatctggattggatggtcctctccggccgcggctagtccggcctgatctgatccgacccgtcccggcggcgcagtccgggcaggttgtctgggaaatttcggactcgggcggtgttgatcccggggagaggtcgtgcctcgctcgatctccgcataaaagctgtgattttgtggcggcgcggctgcgagttaccgggattttcccagggtttccggcggccgatccgcgctagttacgctattctgttccgtcagggcggcctcgtgttgggggctcgtttatttgccgcgtcccggaggagggttttgtgttcttctgtcgttggctccatggccagcggctctgatgccccgaagcagtatggaataaccaagccgttgtcgttgctcggaccggtggaggccgacctccagaggacggaggagctagagaagttcttgctcgagtcgggtctctatgagagccctgacgaatctgctaggcgggaagaggtgctggggaagcttgaccagattgtaaagactgggtaaacaattgactagtcag

SEQ ID NO: 53191 - DNA, 301 bp, Zea mays
  Clone ID: MRT4577_148512C.1
gcccttccttctcgagcgcgaatgacccattctgcctccgacgaccgctacgaggatgggtttatccccttctactcttcaattaacggcggcgcgccggtgacagtaacctgcacaaaggtggcggcgaagagcgcgcgatcgcagtcgaagcacggcattaacaacttgaacagcgcgctccacatgctgcccaaccagcaccaccagaacctgtagccgctcatccactactgctacgattaccagtacatgatcctggtcaccaagcacatgcactacgctcgttgtctgaccacat

SEQ ID NO: 53192 - DNA, 191 bp, Zea mays
  Clone ID: MRT4577_148513C.1
agctcggatttcttctcgagttagcttaccgccctttattttccgaccactacaagcccaagcacaggtggggctaagacaaatttcctgggcgaggaacataagaggtactcaaaacctgatacagaattaagctttaccgtttctgaaggggagaagtttatacttgctcccttgagaataggaagtgg

SEQ ID NO: 53193 - DNA, 462 bp, Zea mays
  unsure (1)..(462): unsure at all n locations
  Clone ID: MRT4577_148514C.1
atacacaataaacatactatattatatacgcgcgggagcatcactgacagcgatcggcacaaggcgccctagctagaaccttcttccgtatcattaccaaccaccaccttcatccacgtccaaaaatctgcttctcacatcacgtttgataccatattttttataccaccaccaccaccatttacaagcaaagcaattgttgttgatatgaaatgaaacgaccgatcgaggttgcaatcgcatggcactgacagcgaccacccactcacctccagccaccattttccagctgcccgcggcgggtcagcgccgccgtcgtttcctccgcgtggtggcggcaggcgagccgggctggcgcgccgagcgccgcgtccacggcggcgtcgctcaccggtccttcatgcccggttcagccgcgccacgaagccctcgcgccgngcctctagcgcctcagcagccgcg

SEQ ID NO: 53194 - DNA, 296 bp, Zea mays
  Clone ID: MRT4577_148515C.1
agtacctcttcaagtacatcatcatcagcgacacaggcgtcggcaagtcgtgcctgctgctgcagttcaccgacaagcgcttccagcccgtggacgagcggagcatcggcgtggagtgcgggaggccgggggatgatcagcgacaagcaagccatcaagctccagatttgggatacggcttgtgaagagtcatgcaggtccataactagatcataggagagacgcgcggcgggtgctctgctggtctatgagatcactaggaggcagactttcaagcaccttgcaaggctggctgg

SEQ ID NO: 53195 - DNA, 287 bp, Zea mays
  Clone ID: MRT4577_148516C.1
cccacgccgtcccccacgcgtcccgatgaactcaaccctttcaacaagaaccataatcgaccggttcctttgttgtccctcccaaacttccccctgaatgaaatgccactctgcctaaccaaggttacctgttgcctggcctgccccgcccttctcccttggccctcttcctttctcctctccccgcgcgggtgtttgcgcgtgtttagagggccatatgccacctgtaaagcttgaacaataaaacatttgtgcacattcacatgtgtgaatttttttccttcttt

SEQ ID NO: 53196 - DNA, 433 bp, Zea mays
  Clone ID: MRT4577_148517C.1
ttccacccttccgtaaccttgcttcctttatagtcaacccacccttccgaaattttatttttaaaaaaaaaaaaaaaaaggggggggttttttataaaaaaaagggagaataaaaaaataataaaaaagggttgacattaaaaaaaatttaaggcccggccccccaaagggtctccctcccccttttttccgcccatttcctttccgcttaccaagttttttaaattttgcctttttaaagctcttttcacttttctgtttcacttttccttccgttcacattttttcaacatcatatttccccacagcttactaaccgaaaccttcgggttttattccgtgggctccttgtgattatttctaattcccttacttccctttttctaattggcaaattttctgtcccaaaacctttaaaacctctttctttatt

SEQ ID NO: 53197 - DNA, 840 bp, Zea mays
  Clone ID: MRT4577_148518C.1
attgggtacctcgaggccggccggggataccaatcgaaaaagtgcgattcctctcccctcatctcctcatatcctcctacggttacaacctcgctgcctcccatctcataataatatgccattccccgaaaagaatcgcaaacaggagcctgactcatcgcgaattatacgaagcgcatggaagcacaacgacgctgcaagccaatccccctatgcacccatcctctgcatcactaactgtgctttcttcggcagttctacgaccatgaacatgtgctactaagtgccacaaggagatgataaccaaccacgatcacgccaagatggcctgcctcctctatcgacagcatcgtgaacctcaccgacgtcgccatggagccggtctgttgctgtcagcaactgggaaacaactgttgcccaagacaagctgcaaacaatgaacgtgcagcacgaccgctgatgctcgccgagacctcagctgaggaagtgtgactgctcggatctgccatcattgcgggtaagtgtagtggtcgtaacctgctgcactcgcctgctaggaagattgtgctgagctcacaatcattcaactgacgacgagggaacttgtactgcgcgctccatcgatactccaacaagtacgactgctagtgcgactaccggactgctgccagggacgccattgccaatgctaatcgcgtggtgaatgcacacgagctcgacaagatctagggggtgttccctacgggtgttgtctggaagatgtaaaccgcggtactcgtcatgcggcactgctgtcttgccccccgcgactttctcttgcatgtttgctgctacaatctt

SEQ ID NO: 53198 - DNA, 248 bp, Zea mays
  Clone ID: MRT4577_148519C.1
cccacgcgtacgtgcatcggctttaagtttatatccatggggacttgtatcgagttatcgtttcctatgaccggggtcctggtcccagcgcacaaggctatcttatccgagctgctggccgttgagtgcgagctcccgttgacggtggagatggacatgttgctgcaattcatgcggaaggcatggttcatcttgcgtgtgctgtctggttactagtataagatgatccgatcctacaatcttgtagc

SEQ ID NO: 53199 - DNA, 278 bp, Zea mays
  Clone ID: MRT4577_14851C.1
gtctcgtatgccagacgtagctcgaatcgctcgactatgagatctaccaccgcgcttcagcttcaccacgacggacgatcggctaatcgtgcgagacattgcgcagaagctgctcacatcgccatgacctgcgagcaagagatgcctacggctgcttccagctcgaccttggagctgagctactagctgcctgacggccagttcatcaccataggcaatgatgcggatccgctgcagtgaggcactctgccagccttgcttcatgccatggaggcctg

SEQ ID NO: 53200 - DNA, 377 bp, Zea mays
  Clone ID: MRT4577_148520C.1
agcgtgcaaacgtgtatgttggttgacaggggcgtctagatctgacggttttggtcatgcatgggaaaatccccacgttaaagattcctgtgatccagatcttacgcgcacatctccggcaaaagatccatgaaagtgttgctatggatcttcgccaagctttggaccatgacttggatacacttgagattgacactgtgcagaaagagacaatacatcccacgaagagttacaagatgaacagctcctgtgctgatatgcttgtctacagctgcacacagatagacgatgtccaaaccaagcttattttctgagtccaaagatgtgtttgagcataaagcaagtaacaagcattggattgacgtgcaactgcaccg

SEQ ID NO: 53201 - DNA, 575 bp, Zea mays
  Clone ID: MRT4577_148521C.1
cccacgcgtccgcccacgcgtccgcggacgcgtgggcagtagagagattactaccatccaccagttctagagcatgacagatgaagacacaccgcggagttaccatgttaataacttgcaggatcagcaagaatggaggggacgcgccacctgtcttgactttatcctcgccgagcttttggcaggagtggccgctgccaccgactttaacgaagcgggtgctgccggattcgggcttggacacagcgcgctgtttcagcgcaagcatggacgtgctgacgatgagatgccccatccgtgaggccaacctaaaactaagacggagctctatatgcagcgcactgccccatccataacctaaaccgagacctatgctccattcagagccaatgtctgaacctcaaccaaaggccaaccctgaacctaaaccaatgcccaagcgtggaccaaaatcccaaccagatgcattgcctacaccgaaacctgaaccttagcccgaacctaagccagagccttaccccgaacctaagataaatccaaagcccaaaccctgaaccaaaagccagagcctaagc

SEQ ID NO: 53202 - DNA, 361 bp, Zea mays
  Clone ID: MRT4577_148522C.1
gtgctattgaccctatgcggaggtaatcaaaacttttttcttctgcgaccggggtgctgctctggcctatccgatctgccacctggccatctcgcacggtcctttccccaactacccagcgcctgtgcgtgccgcgatccagatccaggttgatcaggatgggtctggcgaaggaaggcgtccacatggaggagggaaccctagagatcggcatggagtacaggactgtatctggtgtggccgcgcctctggttatcttggataaagtaaagggcccaaagtaccaagaaattgtaaacattcgacttggagatggcaccactcgacgaggtcaagtccttgaagttgatggagaaaaagc

SEQ ID NO: 53203 - DNA, 310 bp, Zea mays
  unsure (1)..(310): unsure at all n locations
  Clone ID: MRT4577_148523C.1
ccttttttaaatttttctcgaaggtttgggaaacgaccccaaatttaaaagggttggtttcctaaaaaacacgttatttcccttaaaaaaaaatttgaaggggggttgccccctgtaaagaaaattttaaatttggggnggggtataaagggtttaaaagggaaagggaaatttttaaatcnccccttggcccncncgccccctaaaaaaccccccnnnttaagtggggaaatttgggnngcccccnntgtaatttaaaggggaaatttgttgaaagggttttttttttcccngtttttggggggggttt

SEQ ID NO: 53204 - DNA, 305 bp, Zea mays
  Clone ID: MRT4577_148524C.1
gcgctcaccgcttctcggaccactctatggaaatatctgctacgatcctgcacgagggagggtcgatatctatccatgtcaatatatgaactacaaactatacatgtcagtctgacaaaaacaatgtcataagatcaactgtttgttcattgcatcaactatctctgctctatatggaattgatgatagaggacgatgcacctgcctaggattttcaatactggatgtttcacgtgattcgagacgagcctaactgagtacatggcactgataaaatataccaaggagctcatagtcaggaatgc

SEQ ID NO: 53205 - DNA, 346 bp, Zea mays
  unsure (1)..(346): unsure at all n locations
  Clone ID: MRT4577_148525C.1
acggggacaccccacgacacggcgtttcatgtgctgccggccaccaccgccacaaggggaggggancgangaaaggaaaacatgcaccaccnacccacccaaggaccccgaacagcgacacccagacaacgaggagcgcctggaaggcgaaagacgccacaggcaccgcacaccaaggacaccgacaggccacggaagaagaagaaaagggcgccacacatgccacaaagngaccgacgaacgatgccgccgacacactaacgagctcacccgccgggaccggccccgacgggacctaagcctacaaccgaacgcccacactgggggcgggacccggcaagcaact

SEQ ID NO: 53206 - DNA, 836 bp, Zea mays
  Clone ID: MRT4577_148526C.1
cagagtcacttcgccacgaacaaaagcgcatcgatctcgctgtcgtcactcctcgtcacccagccacgaacagaggcaccacccagcatggccctgcaggcggcgctcctcccatccaccctctcatccgtccccaagaagtgcagcctcgccgtcgcggcgaaggacacggcattccttagcgtatcccagaagaaggtgcaggcggcgtcgctgtcggtgagaacgcgggtggcgacgacggcgcctgtggccacgccggggtccagcacggcggccaaggatgggaagaagaccgtgcggcagggcgtggtggtgatcacgggcgcgtcgtcggggttgggcctggcggcggccaaggcgctggcggagaccggcaagtggcacgtggtgatggcctgccgcgacttcctcaaggcggccaaggcggccaagggcgccggcatggcggacggcagctacaccatcatgcacctggacctggcctccctcgacagcgtgcggcagttcgtggacagcttccggagaaggccaagaagctctgggagatcagcgagaagctcgtggggcttgcctgagctcgccggcacggcgacagcgacatgatgaatctgtcgagcagaggagctttcgcttcgttgtattatgtgtaccattagcatccattttgtttgtttctagaagttggtaatgaccgtcggagaagagcctgtaattgttcgatcatgtattgcttacaatttttttttaaaccgatgaaataaaacaatcaggcttaacatcaaaaaaaaaaaaaaaaaaaaaaaaactcgagggggggccgcgggtacccacat

SEQ ID NO: 53207 - DNA, 1092 bp, Zea mays
  Clone ID: MRT4577_148527C.1
cgctgtcgtcactcctcgtcacccagccacgaacagaggcaccacccagcatggccctgcaggcggcgctcctcccatccaccctctcatccgtccccaagaagtgcagcctcgccgtcgcggcgaaggacacggcattccttagcgtatcccacggcgcggacgccgacgttcacggcggacgggtacgagatgagcgtcggcgtcaaccacctgggccacttcctcctggcgcgcctgctcctggacgacatgcagaagtccgactacccgtcccgccgcctcatcatcctcggctccatcaccggcaacaccaacacgctggccgggaacatcccgcccaaggccgggctgggcgacctccgcggcctcgcggcggggctgcgcggccagaacggctctgccatgatcgacggctccgagagcttcgacggcgccaaggcgtacaaggacagcaagatctgcaacatgctcaccatgcaggagctgcaccggcggtaccacgaggagacgggcatcacgttcgcgtcgctctacccggggtgcatcgccaccacggggctgttccgcgagcacatcccgctgttccgcctgctcttcccgcctttccagaagttcgtcaccaagggcttcgtgtcggaggcggagtccggcaagaggctggcgcatgtggtcagcgaccccagcctcaccaagtcgggggtgtactggagctggaacaaggactcggcgtcgttcgagaaccagctgtcgcaggaggccagcgatccggagaaggccaagaagctctgggagatcagcgagaagctcgtggggcttgcctgagctcgccggcacggcgacggcgacatgatgactctgtcgagcagaggagctttcgcttcgttgtattatgtgtaccattagcatccattttgtttgtttctagaagttggtaatgaccgtcggagaagagcctgtaattgttcgatcatgtattattgcttacaaaatttttttcaaaaaccgatgaaataaaacaacaggcttaacatcaaataaaaaaaaaaaaaaaaaaaaaaaaaaaaaaaaaaaaaaggaataatcgagggg

SEQ ID NO: 53208 - DNA, 211 bp, Zea mays
  Clone ID: MRT4577_148528C.1
atccctacttacaaaactctgtacttaagttttcacaattcactatttcccaggccgtttctctcattcacacgtctgttacattcaccaaccatttacaaacctccttcagttatccaatccttcttattctgactgaccctaggactgatcatattaccattaaagagtctactcttacaaacattcccaccatcgccttctgtaatac

SEQ ID NO: 53209 - DNA, 615 bp, Zea mays
  Clone ID: MRT4577_148529C.1
ctcgggacgccccagcgtccgccttcgccacgacaaaacgcatcgatctcgctgtcgtcactcctcgtcacccagccacgaacagaggcaccacccagcatggccctgcaggcggcgctcctcccatccaccctctcatccgtccccaagaagtgcagcctcgccgtcgcggcgaaggacacggcattccttagcgtatcccagaagaaggtgcaggcggccaaggcgctggcggagaccggcaagtggcacgtggtgatggcctgccgcgacttcctcaaggcggccaaggcggccaagggcgccggcatggcggacggcagctacaccatcatgcacctggacctggcctccctcgacagcgtgcggcagttcgtggacagcttccggcgcgccggcatgccgctcgactcgctcgtctgcaacgccgccatctaccggcccacggcaaggacgccgacgttcacggcggacggatacgagatgagcgtcggcgtcaaccacctgggccacttcctcctggcgcgcctgctcctggacgacatgcagaagtccgactacccgtcccgccgcctcatcatcctcggctccatcaccggcaacaccaacacgctg

SEQ ID NO: 53210 - DNA, 266 bp, Zea mays
  Clone ID: MRT4577_14852C.1
cgattccgtcgccacgctccttagccactgcactaaagccatatgtccaacatggcgcaaaatatttgctctatgctctgtattttgagtgctgtcgcaccttttcccatgctacagcttatgtccttttccctcctctaccacgggctcgttggaacccattttacctacgaccacgcatcagtgcattaccttatacctgtctcacatatagcctatcacagtacttgtcattatgccaacatagccacactcacactggctgc

SEQ ID NO: 53211 - DNA, 444 bp, Zea mays
  Clone ID: MRT4577_148530C.1
cggacgcgtgggcgaacaaaagcgcatcgatctcgctgtcgtcactcctcgtcacccaggcacgaacagaggcaccacccagcatggccctgcaggcggcgctcctctcatccaccctctcatccgtccccaagaagtgcagcctcgccgtcgcggcgaaggacacggcattccttagcgtatcccagaaggtcagtgatcagctgcatctgcatgctgcactcgcagtcacaatgcgcttgaattgaacgtgtcactcactctgtcgtgagcatgccatgcgtgcagaaggtgcaggcggcgtcgctgtcggtgagagtcacttcgccatctaccggcccacggcaaggacgccgacgttcacggcggacggatacgagatgagcgtcggcgtcaaccacctgggccacttcctcctggcgcgcctgctcctggacgacatgc

SEQ ID NO: 53212 - DNA, 376 bp, Zea mays
  Clone ID: MRT4577_148531C.1
aacatacctttatcaacctttttacaacaatcgccagccctatctcttagtcaattcttaatgcaaaccagcataccacagcagctgcatcaactcgttctacctctgatcaaccaaataactatcccaaacctttctccctactatcatcaacaacaatttcttccattcaacctactatctacactaaaccctactccttattttcatcatcaactattaccattcatcctactatctactgcctactcttatcaacaacatcttcttccatttaaccaattatccatactaaacctcgctacttattttcaacatcatatattactaccatttatccttctatcttcatcaaatccttccttcttcttgactc

SEQ ID NO: 53213 - DNA, 1009 bp, Zea mays
  unsure (1)..(1009): unsure at all n locations
  Clone ID: MRT4577_148532C.1
aggnccggcagccggnacggncagctacaccatcatgcacctggacctggcctccctcgacagcgtgcggcaaggacgccgacgttcacggcggacggatacgagatgagcgtcggcgtcaaccacctgggccacttcctcctggcgcgcctgctcctggacgacatgcagaagtccgactacccgtcccgccgcctcatcatcctcggctccatcaccggcaacaccaacacgctggccgggaacatcccgcccaaggccgggctgggcgacctccgcggcctcgcggcggggctgcgcggccagaacggctctgccatgatcgacggctccgagagcttcgacggcgccaaggcgtacaaggacagcaagatctgcaacatgctcaccatgcaggagctgcaccggcggtaccacgaggagacgggcatcacgttcgcgtcgctctacccggggtgcatcgccaccacggggctgttccgcgagcacatcccgctgttccgcctgctcttcccgcctttccagaagttcgtcaccaagggcttcgtgtcggaggcggagtccggcaagaggctggcgcaggtggtcagcgaccccagcctcaccaagtcgggggtgtactggagctggaacaaggactcggcgtcgttcgagaaccagctgtcgcaggaggccagcgatccggagaaggccaagaagctctgggagatcagcgagaagctcgtggggcttgcctgagctcgccggcacggcgacggcgacatgatgactctgtcgagcagaggagctttcgcttcgttgtattatgtgtaccattagcatccattttgtttgtttctagaagttggtaatgaccgtcggagaagagcctgtaattgttcgatcatgtattattgcttacaaaatttttttcaaaaaccgatgaaataaaacaacaggcttaacatctctaaaaaaaaaaaaaaaaaaaaaaaaaaaaaaaaaaaaaaaaaaaaaaaaaaaaaaaaaa

SEQ ID NO: 53214 - DNA, 226 bp, Zea mays
  Clone ID: MRT4577_148533C.1
gtggagggtggagggcaaagacatgaattcgcataaataaaatatgcgtgaaatatctatatctgattggctttttggaaaatatgatgcatgcatgggtgggtatttccctaaaaaccagtagttggtaagttttgtgggggtatggatggactagttagtacatgacccgattaatggaagggggggataatgcctcgtttggggtaagtaatctgttgggttg

SEQ ID NO: 53215 - DNA, 1476 bp, Zea mays
  Clone ID: MRT4577_148534C.1
cccacgcgtccgcggacgcgtgggttcggcacgaacaaaagcgcatcgatctcgctgtcgtcactcctcgtcacccagccacgaacagaggcaccacccagcatggccctgcaggcggcgctcctcccatccaccctctcatccgtccccaagaagtgcagcctcgccgtcgcggcgaaggacacggcattccttagcgtatcccagaagaaggtgcaggcggcgtcgctgtcggtgagaacgcgggtggcgacgacggcgcctgtggccacgccggggtccagcacggcggccaaggatgggaagaagaccgtgcggcagggcgtggtggtgatcacgggcgcgtcgtcggggttgggcctggcggcggccaaggcgctggcggagaccggcaagtggcacgtggtgatggcctgccgcgacttcctcaaggcggccaaggcggccaagggcgccggcatggcggacggcagctacaccatcatgcacctggacctggcctccctcgacagcgtgcggcagttcgtggacagcttccggcgcgccggcatgccgctcgactcgctcgtctgcaacgccgccatctaccggcccacggcgcggacgccgacgttcacggcggacgggtacgagatgagcgtcggcgtcaaccacctgggccacttcctcctggcgcgcctgctcctggacgacatgcagaagtccgactacccgtcccgccgcctcgtcatcctcggctccatcaccggcaacaccaacacgctggccgggaacatcccgcccaaggccgggctgggcgacctccgcggcctcgcggcggggctgcgcggccagaacggctctgccatgatcgacggctccgagagcttcgacggcgccaaggcgtacaaggacagcaagatctgcaacatgctcaccatgcaggagctgcaccggcggtaccacgaggagacgggcatcacgttcgcgtcgctctacccggggtgcatcgccaccacggggctgttccgcgagcacatcccgctgttccgcctgctcttcccgccgttccagaagttcgtcaccaagggcttcgtgtcggaggcggagtccggcaagaggctggcgcaggtggtcagcgaccccagcctcaccaagtcgggggtgtactggagctggaacaaggactcggcgtcgttcgagaaccagctgtcgcaggaggccagcgatccggagaaggccaagaagctctgggagatcagcgagaagctcgtggggcttgcctgagctcgccggcacggcgacggcgacatgatgactctgtcgagcagaggagctttcgcttcgttgtattatgtgtaccattagcatccattttgtttgtttctagaagttggtaatgaccgtcggagaagagcctgtaattgttcgatcatgtattattgcttacaaaatttttttcaaaaaccgatgaaataaaacaacaggcttaacatc

SEQ ID NO: 53216 - DNA, 1545 bp, Zea mays
  Clone ID: MRT4577_148535C.1
cccacgcgtccgcccacgcgtccgcggacgcgtgggcttcgccacgaacaaaagcgcatcgatctcgctgtcgtcactcctcgtcacccagccacgaacagaggcaccacccagcatggccctgcaggcggcgctcctcccatccaccctctcatccgtccccaagaagtgcagcctcgccgtcgcggcgaaggacacggcattccttagcgtatcccagaagaaggtgcaggcggcgtcgctgtcggtgagaacgcgggtggcgacgacggcgcctgtggccacgccggggtccagcacggcggccaaggatgggaagaagaccgtgcggcagggcgtggtggtgatcacgggcgcgtcgtcggggttgggcctggcggcggccaaggcgctggcggagaccggcaagtggcacgtggtgatggcctgccgcgacttcctcaaggcggccaaggcggccaagggcgccggcatggcggacggcagctacaccatcatgcacctggacctggcctccctcgacagcgtgcggcagttcgtggacagcttccggcgcgccggcatgccgctcgactcgctcgtctgcaacgccgccatctaccggcccacggcaaggacgccgacgttcacggcggacggatacgagatgagcgtcggcgtcaaccacctgggccacttcctcctggcgcgcctgctcctggacgacatgcagaagtccgactacccgtcccgccgcctcatcatcctcggctccatcaccggcaacaccaacacgctggccgggaacatcccgcccaaggccgggctgggcgacctccgcggcctcgcggcggggctgcgcggccagaacggctctgccatgatcgacggctccgagagcttcgacggcgccaaggcgtacaaggacagcaagatctgcaacatgctaacaatgcaggagctgcaccggcggtaccacgaggagacgggcatcacgttcgcgtcgctctacccggggtgcatcgccaccacggggctgttccgcgagcacatcccgctgttccggctgctcttcccgccgttccagaagttcgtcaccaagggcttcgtgtcggaggcggagtccggcaagaggctggcgcaggtggtcagcgaccccagcctcaccaagtcgggggtgtactggagctggaacaaggactcggcgtcgttcgagaaccagctgtcgcaggaggccagcgatccggagaaggccaagaagctctgggagatcagcgagaagctcgtggggcttgcctgagctcgccggcacggcgacagcgacatgatgaatctgtcgagcaaaggagctttcgcttcgttgtattatgtgtaccattagcatccattttgtttgtttctagaagttggtaatgaccgtcggagaagagcctgtaattgttcgatcatgtattgcttacaatttttttttaaaccgatgaaataaaacaatcaggcttaaccccccccaaaaaaaaaaaaaaaaaaaaaaaaaaaaaaaaaaaaaaaaaccccccccccccgcgc

SEQ ID NO: 53217 - DNA, 1111 bp, Zea mays
  Clone ID: MRT4577_148536C.1
cccacgcgtccggtcacttcgccacgaacaaaagcgcatcgatctcgctgtcgtcactcctcgtcacccagccacgaacagaggcaccacccagcatggccctgcaggcggcgctcctcccatccaccctctcatccgtccccaagaagtgcagcctcgccgtcgcggcgaaggacacggcattccttagcgtatcccagaagaaggtgcaggcggcgtcgctgtcggtgagaacgcgggtggcgacgacggcgcctgtggccacgccggggtccagcacggcggccaaggatgggaagaagaccgtgcggcagggcgtggtggtgatcacgggcgcgtcgtcggggttgggcctggcggcggccaaggcgctggcggagaccggcaagtggcacgtggtgatggcctgccgcgacttcctcaaggcggccaaggcggccaagggcgccggcatggcggacggcagctacaccatcatgcacctggacctggcctccctcgacagcgtgcggcagttcgtggacagcttccggcgcgccggcatgccgctcgactcgctcgtctgcaacgccgccatctaccggcccacggcaaggacgccgacgttcacggcggacggatacgagatgagcgtcggcgtcaaccacctgggccacttcctcctggcgcgcctgctcctggacgacatgcagaagtccgactacccgtcccgccgcctcatcatcctcggctccatcaccggcaacaccaacacgctggccgggaacatcccgcccaaggccgggctgggcgacctccgcggcctcgcggcggggctgcgcggccagaacggctctgccatgatcgacggctccgagagcttcgacggcgccaaggcgtacaaggactcggcgtcgttcgagaaccagctgtcgcaggaggccagcgatccggagaaggccaagaagctctgggagatcagcgagaagctcgtggggcttgcctgagctcgccggcacggcgacggcgacatgatgactctgtcgagcagaggagctttcgcttcgttgtattatgtgtaccattagcatccattttgtttgtttctagaagttggtaatgaccgtcggag

SEQ ID NO: 53218 - DNA, 376 bp, Zea mays
  Clone ID: MRT4577_148537C.1
gggggacgaaaacttaggtatttctgataagttcaacacaggccagcaatattggcaccaccttgtaaggtcacttatttcacaaacaaccttaagaggtcaggcacttgacacctctccataccaaacctcttacacttaccaatttaatccaccttcttgatcttgggaccaccaccggtcccaccagacggggcatcctgatccatgccaggagtatggccgataccctatccctaggcctggtacatcattaccatgatggggatggaaatccccttaagcttcgtcatgttgtgtttggactcctccacctcaaccagttgggtgctggccatgcaggttttggcgccggtaacggcattttaggtctttt

SEQ ID NO: 53219 - DNA, 1597 bp, Zea mays
  Clone ID: MRT4577_148538C.1
gtcacttcgccacgaacaaaagcgcatcgatctcgctgtcgtcactcctcgtcacccagccacgaacagaggcaccacccagcatggccctgcaggcggcgctcctcccatccaccctctcatccgtccccaagaagtgcagcctcgccgtcgcggcgaaggacacggcattccttagcgtatcccagaaggtcagtgatcagctgcatctgcatctgcatgctgcactcgcagtcacaatgcgcttgaattgaacgtgtcactgactctgtcgtgagcatgccatgcgggcagaaggtgcaggcggcgtcgctgttggtgagaacgcgggtggcgacgacggcgcctgtggccacgccggggtccagcacggcggccaaggatgggaagaagaccgtgcggcagggcgtggtggtgatcacgggcgcgtcgtcggggttgggcctggcggcggccaaggcgctggcggagaccggcaagtggcacgtggtgatggcctgccgcgacttcctcaaggcggccaaggcggccaagggcgccggcatggcggacggcagctacaccatcatgcacctggacctggcctccctcgacagcgtgcggcagttcgtggacagcttccggcgcgccggcatgccgctcgactcgctcgtctgcaacgccgccatctaccggcccacggcaaggacgccgacgttcacggcggacggatacgagatgagcgtcggcgtcaaccacctgggccacttcctcctggcgcgcctgctcctggacgacatgcagaagtccgactacccgtcccgccgcctcatcatcctcggctccatcaccggcaacaccaacacgctggccgggaacatcccgcccaaggccgggctgggcgacctccgcggcctcgcggcggggctgcgcggccagaacggctctgccatgatcgacggctccgagagcttcgacggcgccaaggcgtacaaggacagcaagatctgcaacatgctaacaatgcaggagctgcaccggcggtaccacgaggagacgggcatcacgttcgcgtcgctctacccggggtgcatcgccaccacggggctgttccgcgagcacatcccgctgttccggctgctcttcccgccgttccagaagttcgtcaccaagggcttcgtgtcggaggcggagtccggcaagaggctggcgcaggtggtcagcgaccccagcctcaccaagtcgggggtgtactggagctggaacaaggactcggcgtcgttcgagaaccagctgtcgcaggaggccagcgatccggagaaggccaagaagctctgggagatcagcgagaagctcgtggggcttgcctgagctcgccggcacggcgacagcgacatgatgaatctgtcgagcagaggagctttcgcttcgttgtattatgtgtaccattagcatccattttgtttgtttctagaagttggtaatgaccgtcggagaagagcctgtaattgttcgatcatgtattgcttacaattttttttttaaaccgatgaaataaaacaatcaggcttaaaaaaaaaaaaaaaaaaaaaaaaagggcggccgccaccgcggtgga

SEQ ID NO: 53220 - DNA, 247 bp, Zea mays
  Clone ID: MRT4577_148539C.1
tgtaacgacagttctagacaacactcacagatagcatgtagtgccagacccctctagagagcggagtatccaagggagccaagcgcgcacctctgttacctaactagttcacgcgaccatatctcgtcaagtcaggaaagcaggaaagagctaaaccgcaaggcccgggagagctataccatcctccccggcgggaccggcggcaagagcaaggaggtccactagcacctcaccgaagggcgcatcc

SEQ ID NO: 53221 - DNA, 401 bp, Zea mays
  Clone ID: MRT4577_14853C.1
cgaatctcccgcccgtcagtctcgagtgtgcagaggtgaaacgtctgagtccatggccgaggccgaagtcgacgccagggccacggccgacgacgagggccgcggcggcagcagcagcaacgtcgcctaagacgggcagccggctgcggcgaaggggcgcgcgaccatatccgtggcggtggtgctgctcgcgctgctggtggcctccgtggcggcgttcctgacgtcgtcgctgccgcgcgccggcgacgtcgacggcgagggggtgcagggagctgctggcagggcgggggaggtcgggaagcgcgccgagcccgtcgagcacgccgtcggcatcccggggttcaacagccggctggacgcgttccgcacctgggcggcgctgacgtggatgaagctcc

SEQ ID NO: 53222 - DNA, 340 bp, Zea mays
  Clone ID: MRT4577_148540C.1
cagcattcaaaaacacaccatgcgtagtgcactagcaacaacctaacaacagggggtaccaatatattagccctccttgcgcttcttgcccttttagtgagcgcaacaaatgcgttcattatttcacagtgctcacttgctcctagtgccattatttctctgtttcttccaccagttactttaatgggcttcgaacattcaaacgtgcaagcctacatgttacaacttgtgcttgcggcgagcgttttacaacaaccatattgtctaattgcaacaacatttcttggcacatttatatccttccaaaccttttttactccttcatacaacatctgttttt

SEQ ID NO: 53223 - DNA, 311 bp, Zea mays
  unsure (1)..(311): unsure at all n locations
  Clone ID: MRT4577_148541C.1
cgggccgggattcccggggggaggcggcgcgtgcgggtgtttttacgccagctcaatgagatgctgacgcgggactgctgagattcgggtctgggggnaggggggcggggcgcctatactcactganatcatcatccgcgccacgcgcacgcagaacgtgctcggcgagaagggccggatgatcagggagcttacctccggcgttcagaagagggtcaacttccctgagaatgggggcgagctttacgccgaggagggcgtgaaccgggggctctgggccatcgggcaggccgaggcccttcgttacaagc

SEQ ID NO: 53224 - DNA, 272 bp, Zea mays
  Clone ID: MRT4577_148542C.1
aagaacacaccacgaagaaactgtaacaaacaacaacgggggaaaacttttttttggtttgaattaagagaatcattagccttactctaccccgatttagagaaaaataaaaggctggttttgggtgccgaagtaggggacactcaacccggcagtagctccgggctcccctgcaagtagacacaacacacgatacccatgttaacattaaacagcacacgaccactagtaagacctcatcaagcaggctacaaaaactgagattggtggaa

SEQ ID NO: 53225 - DNA, 304 bp, Zea mays
  Clone ID: MRT4577_148543C.1
ctcgtaagctgaatcgtggaaacagccgtgggtaaaagggcaggaaagggagaaactgggagtggggcttctaagaggaagaacggagaataccttttgtgtcatagactagtataccaatcactcctgtttcctaaggcaggaagagaaattgagaaccctaatgaagcggaagggtcagggcataaatgatttcaacagaaggcaaaccatactggagttctatttactgcagacctgaagtgggataggacataagaggcccaagcaatgttgctgggcaattgttctgacaatcgaaaga

SEQ ID NO: 53226 - DNA, 1716 bp, Zea mays
  Clone ID: MRT4577_148544C.1
tgtcccggtggctggccgccaacgtgctgcccttcgtcccggcgaccaccatctccgccgtggccgtcggcaacgaggtgctggagtccggggacgccaccctgggcgccgcgctgctcccggccatgcagaacctccgcgccgccgccgcggcggcggggggcggcgccgcggggatcaggttctccaccgtgaacaccatgggcgtgatggcgcagtcggacccgccgtcgacgggcgcgttccacccggacgtggctccgcagctgcagcagatcctggggttcctcagcaggaccggcgcgccgttcatgatcaacccgtacccgtggttcgcgtaccagtcggacccgcggccggacacgctggccttctgcctgttccagcccaacgcggggcgcgtggacggcgggtccaagatcaggtacaccaacatgttcgacgcgcagctggacgccgtgaagtcggcgctggtgcgcgccgggtacggggacgtggacgtcgtggtggcggagacggggtggccgaccaggggcgacgccggggagcccggcgccacggcggagaacgccagggcgtacgtgtccaacctggtggcgcacctgcggtccggcgccggcacgccgctgatgcctgggaaggcggtggagacgtacctgttcgcgctgtacgacgaggacctcaagcccgggcccacgtcggagcgctcgttcgggctgtaccacacggacctcagcatggcctacgacgccgggctggcctcctccgcggcggcggggggtcggggcgggggcgggggcggcgcggcgcagcccaggggcggcgggtggtgcgtggcgcgggccggcgcctcggacgcggagctgcaggcggacctggactacgcgtgctcgcaggtgggcgtcgactgcagcgccatccagcccggcggcgcctgcttcgagcccaacacggtgcgcgcgcacgccgcgtacgccgtgaaccagctgtaccaggcggccgggcggcacccgtggaactgcgacttccgggcgtccgccacgctcacctccgacgacccaatatctcgcagcactgctcgagcatgacaatggtgacatgacatgtgcacgacgaaaggagatcagctttgctcatcccctgccctgctccgacgcctttccatcgcccatttgtccatgctacggggcatgcgtgtacaccgggggaggccaataatgcacggcgcacggcggtgccaaccccgtggcacatgattagttttgcgagtaccacgcacgcacgatggactggattgccgagtgaaaaaggttgtgcgtgcctacaggctacagcaagggaagggctctgggcggaccgaataattgcggttgttgccgtggttggcgtgttgtagcgtagtgcagtgcagtgcagtgcagtgcagatcctcttgtttgtttcgtcgtaccggaagaaatttcccgttccttttcagctgccctgcctgccttgggacaggctgggacgtgtgagtgtgacttcgtgtaaaagaactattggacgctgtcagtgtcgccgtgagctctgtggacggtagtacatgtgtctaatgtacaagtagagtgagattgtatctatatattgttttttaaaaaaaataaaacttcattcggctctcatcgaaaaaaaaaaaaaaccaaggcgccctctagagtaaaaattcgccgctgctgc

SEQ ID NO: 53227 - DNA, 761 bp, Zea mays
  Clone ID: MRT4577_148545C.1
tgggaccctcgaggccggccggggtttttgctccgctgctcccccgccgcccctgacaagtataaccagccgcgtctcggcaaaaagtcctccgcgacagagagcgtgcagccagccaccgaccacccgcgcagcgcaggacttggggagcaagcaaggcgaagcggcctgccatggattccttctcgtcctcgccgtcgtcgtcaggtcccggcgctaacccggacgttgttatggaacagatcaagacgcagctcgcacaggcttacgcgcaggagtttctcgagaccgtcgggaacaagtgctttgaaaagtgcgtgaccaagccaggatcaagcttgagtggaagcgagagcagctgcatatcacgttgtgttgaccgctacattgaggccactggtattgtcagccgcgcattgttcacttcccagcgctaagatcacatgaataaggagatggtttcgaagatcgctcgtgagagtaatgtcgccatgagttttttgacttgtcggaatacaatgacatttgatgcttggttattcaaaaaaaaagtctgcctatagactcaggtttcttgtacacctatctgctttagtaatagagaaacgtgctctatttaagtggctctgatgttaatttatgctcatcatgtggtttgtttcgcttaatgttgtatgcttcttatgcctgtttgttgcccaagccttatcgaatatcgtgaaggatgtgttgttgttaaaaaaaaaaaaaaaaaagcggcc

SEQ ID NO: 53228 - DNA, 337 bp, Zea mays
  Clone ID: MRT4577_148546C.1
aagctgaattcgctcgagctccttccccaactactattttattttataactgaaaaacccctcatacagtttggccccgtcggtcccttgttaacctccgcaactaatccgtgctattaatcccactaacagtactagctcgtccagttagatcgacagtatcaacctcaaatccctgcaactcctgcagctgatgcgccagcacctgcacaccgatgccagcaaggacgtcaccaagaacgtcaacctcgtctaccagctcaacatcgtccccaagaacatcagcattaatgacgagatcttcgagatctacctcaaaaacctcaagatcaccaaa

SEQ ID NO: 53229 - DNA, 536 bp, Zea mays
  Clone ID: MRT4577_148547C.1
aacagtttcctcttattatctttttataaaaaaaaaaaaaaaaaaaaaaaaaaaaaaaaaaaaaaaaaaaaaaaaaaaaaaaaaaaaaaaaaaaaaaaaaaaaaaaaaaaggaagaaagaaaaaaaaaaaaaaaaaaaaaaaaaaaaaaaaaaaaaaaaaaaaaaaaaaaaaaaaaaaaagaaggggggggccatttaaggggcccaagtttaacaccggggggaaggggaaaaacccggtttttaccggggtaacaaaatttgaagcacgggcccctttttaaaaaggggggaaaggggaaaaccccggggccgaccccctttaccaccgggggggcaacccccttggggaagggggggcgccatgaaaagggggcccaaccgcgggggttttgaaaggttacgcccaccgggacgggaaagggggccccccccctgcgcccgctaataacggggggggggggggggtttcccccaggggggccggttttcccggcaaggccctaaaccgggggcttcttttagggtcccccttt

SEQ ID NO: 53230 - DNA, 582 bp, Zea mays
  Clone ID: MRT4577_148548C.1
tttatatatcttttttttttttttttggtttttttttttttttttaaaaacaaggggggagggggcgttggttaattttttaatttttgggtttccttcaaccatggcccctatttatgagggaacggaattcattcccatttaaaaatacttgggaaattaaaaacccccacattttggcaaccaataaaaaaaaccctttttttttgggcgagggggggataaggggccacccaaaaggtttggttacttcatcccaactgaggccataaaatcctggggctaagggtcaccctccgttttttaagctgccgcccaacccgttggggcaaaaggggtttaaatttaattgccaccgggccacctggggccgcctgggccaaacatatcctgggggggggggggggggggcctcaactaaaacgggggaaaaaacaatggatgtaacgggccccgcatcgaaggggcctgcacgaacggccaggctccccaaaaccccgttggaaactaaggaggaggggcgttcctggggaaggctccctgaaattgtggaggaggtggaccgtccatccaaccctaatt

SEQ ID NO: 53231 - DNA, 136 bp, Zea mays
  Clone ID: MRT4577_148549C.1
aacactcagtccatcccaagactctcgaggcgatagtggacgcgtgtgagcctctgctaagctctgcgatcccagacctagtaacaagtcattttagtcctcatcaaacacctccgcgacaaggagcaactcctca

SEQ ID NO: 53232 - DNA, 346 bp, Zea mays
  Clone ID: MRT4577_14854C.1
attgcagcacggacggctcatgtgtatttccagcgagctcgaactcgactccactctgttacaatgatgaacacacgagatttatacccatgcacataatggacacgttctccatgcccctgcctgcttcgcgcccacgacccagctcgctctggccgagtccttcgcatgcgcccgcaacgcacgctacgcgccgagccttcccgatcgccacgctcaacctggacctggtctataacagccccatacacacacgcattccatgcaccacacgtgagcacacacacgcacacacaccacggattattggctaacatttttacccttaaaccgggacctatagaaa

SEQ ID NO: 53233 - DNA, 793 bp, Zea mays
  Clone ID: MRT4577_148550C.1
gggtacctcgaggccggccggggtactcgtacgctaccttttatccatccatggcgccgccgccgccgccgccactccacccccatcaccactgcgttctcacccgcttccgctgcccggccaccggtaccgcccgcttcctcattcgcctaggcatcaaacccttctgttgctcctcggttccctcgcgaaccccacctcccctccatggaccctcgctccgccgcggacggcgcccgctggactacccggaccccttcgcccgcaccttcgacctggccgcgctacgcgtccctgccgccgcgtgcgcacccctcgagcgccgcctccggggccacctgctcaactggccccgcgtccacaacgtgatccgcctccgtaacgaccagggcctcctctcactgtcgcctccccccccgggctaccccgccgaggagccggggggccccgccccacgggccaccgcagtactgcggagggagaagctggtccgcgagttgaacgcccgtggcttcctacggttcccaaacctcgcccgcctctcgcggcccagtcccctcgcgcggaagcggagggagaggaagggagacggcggcgatgaggagacgtgtgagcctgacaaagacaaggcctacgtggtggaggtagcgggggagagaagagaggacgacgacgattggaagggtctgggcggagaggagggcattgggagagacacgtggcggattggctccacccgggtgctggtgcttgaggagagatacgcccgagaggaaggttgatgagctgccgg

SEQ ID NO: 53234 - DNA, 211 bp, Zea mays
  Clone ID: MRT4577_148551C.1
ggttccctactaaatttcactcatcatatttgtagcccacacgatttatatcgggtcaaggcaaagcttataggcatccgtgtcccaacgccctcgacctattctcaaactctaaataggtttgacggctcacttgcttcagtgagccgtgccaaccaatctgcagctccaaaatcgccatttcttacaagcacatctggctattcattat

SEQ ID NO: 53235 - DNA, 209 bp, Zea mays
  Clone ID: MRT4577_148552C.1
gggggcccggggaggtttttttggtccataccagtggcaaccttccaacacgttgggaaattaatttttccacctggttccccacacacatttattcttattaaccttagccgatccttctttccaagcaatttaagggcttgttgggtttttccattccccgtggattggatggggattggaaaaaaattaaaaattttttctttttt

SEQ ID NO: 53236 - DNA, 498 bp, Zea mays
  Clone ID: MRT4577_148553C.1
gcaacgggaaacacaaatcttggagcccaacaagaacaaccgggatggacatacagttttttttcctgggggggttggctttttaggaaacaagcccccatcggaaaacaactaagtttctttaagccataattctaactgcctgacgaatgccccccaatttttcaaaaagctaggactggcccaaatgccccgaaaccaagagggacagaaaagccgtcagcttttattttggacccccggctgtatcgggggggggtttgactgctcaccgatggggacgggatcatacctggggtcgtcggcgttggcgtccctggcgtggggagggtccctggaacactggaattggcccttgcgtgtggagggaccccccgtggcggcggcggcggtggcaacggcggtaatggtccatggggaaaaaaaaccggcaactgcccaggcccccgtggcgggcggaaggtccaggcggcaaaacccaggcatggccatcacccc

SEQ ID NO: 53237 - DNA, 638 bp, Zea mays
  unsure (1)..(638): unsure at all n locations
  Clone ID: MRT4577_148554C.1
ccgccctcctcngacccgccttccttcccgggggcttctccgcagctccatcgtcctcgggctccggagaaggaagagccgctctggcaccaggtcttcgaacctcccctgccctcctccgcctcgtctccccccgtccccgtctcggtctgttgcaggtatgggtgttctcggtggagcggctgctgcaagctgcccagcgacccggcactgcgcagaatgggcccgaatctacttgaggtactgcttcctcgaacctgctactctgccaactcagatgtacatggcactgctatataccatcacaactctaattcttaccgtacagacgatatactatagccacatctaccatcgtcttgaagcaaaaaaatccagggcagctagcaaggctcaaaagcatcaacgtgcggatgcatcattacgtgaaaggcttttgggtgccaaggacggtgtgttatccagaaacaacgggtcagatgctacagtccttattccaagctcacctattcctgttaatgtgaaattggtcgaccaataccatggaagcagccccaacaccgactactactacatgtcagcaagatctttgtccaggagtccagtgccaactgctggtacatggttgggcagtaatc

SEQ ID NO: 53238 - DNA, 741 bp, Zea mays
  unsure (1)..(741): unsure at all n locations
  Clone ID: MRT4577_148555C.1
ccggccgggaggcctccccgtctaggcttcgattccgccctcctcgaacccgccttccttcccgtcgtcttctccgcagctccatcgtcctcgggctccggagaaggaagagccgctctggcaccaggtctgttgcaggtatgggtgttctcggtggagcacctcctgcaagctgcccagcgacccggcactgcgcagaatgggcccgaatctacttgaggtactgcttgtgcagccagaaggaaggtgctgccctggcacttgggctaatcagtgtcataagctggggcttcgccgaggtgccacagataatgacaaattacagacagaagtcaacagaaggactctctgtcgcctttcttatgacctggattngttggggatttgtttaaccttgttggctgcttcctcgaacctgctactctgccaactcagatgtacatggcactgctatataccatcacaactctaattcttaccgtacagacgatatactatagccacatctaccatcgtcttgaagcaaaaaaatccagggcagctagcaagcctcaaaagcatcaacgtgcggatgcatcattacgtgaaaggcttttgggtgccaaggacgggtgtggtatccagaaacaacgggtcagatgctacagtccttattccaagctcacctattcctgttaatgtgaaattggtcgaccaataccatggaagcagccccacaccgactactactacatgtcagca

SEQ ID NO: 53239 - DNA, 603 bp, Zea mays
  Clone ID: MRT4577_148556C.1
ccacgccgtccgtaaaaaaaaaaaaaaaaaaaaaaaaaaaaaaaaaaaaaaaattaaaaaaaaaaaaaaaaaaaaaaaaaaaaaaaagaaaaaaaaaatatagaggatcacaaaatttacatacacaatgcttgcaaacgtggtgggcccttttttggggtccccttttttctttcccttggccgccgtttttcacctttgtggcgggggcccccctgtgggttccctgctccttccctttgctgggcgtccccgtttcaccccctggctttcccccttttgggcccttcccgttcgcccttcctttccgttgtgcggcttgtttggcaaatgggcccccccttgttccttccctttttgcccggcgcttgggggggttgcgcgcaccgttccgttccccttttcagcgccgttggtcccggtctttccccctttttccctcctttttttgccacgttccccggcttcccccgtttggctttccttccttgccttccttgggggttccccttttttgcctctcgggcccttttcccggggctcttttttggggccctggttagcgttttgggcccctcgccccctcaacgtttttttggcctt

SEQ ID NO: 53240 - DNA, 532 bp, Zea mays
  Clone ID: MRT4577_148557C.1
ttacattttagcgaaccaaacaccactctcgaggctctataacgtgagaacaagaacctactatggcttcttccaaaatagatcgttagactagaactctcgccggaactgaagtgagaaaagaaagagtcgtagcactccgttgatacttgagtttatattcgtcctcacctttttatctccatcaatctattagctacaagagaaagaattatagactctctttaaactcttgtacgtggtggtgcccgacgtgtccagatgcaacgccatccgtttatgttcccgctttcttcagtacatactgctttttttaggtacttcccgtacctcggtcggtactgcagtactgctcgttacccacttacccatcgccgtagctgatgttccgcgcgcggtaaaaattacacacacacacacaccgagccggacgacgacgcgaactagaacaggccggcccatctcgaagcaccacaaaagggatccaggcccgatgccgtaccagtgtagctgagtaggcccattcaagcat

SEQ ID NO: 53241 - DNA, 190 bp, Zea mays
  Clone ID: MRT4577_148558C.1
cgtgatcagagagggatatatagctagctagctagcatagtatggcgcttgtagccgactacgacgccgagctcaaggccaaggccaaggccaaggccgaggtctactacggcgacgaggcctgtcagctgtgcgcgcagtttctgctgagggaagtaggccgtcccaacggcctgttgtcaaaacagga

SEQ ID NO: 53242 - DNA, 188 bp, Zea mays
  unsure (1)..(188): unsure at all n locations
  Clone ID: MRT4577_148559C.1
cctccnccncnctttcnatnacntcaaccaccanctccanaccaanttctcccannaaccccanccnattnattnnnantactacanaaaannaattnnatcaaaantnntnnatatntacaaananncttttnaaancatcnaaatcccnaantacntcnacacaattactccccaatacaanccaa

SEQ ID NO: 53243 - DNA, 460 bp, Zea mays
  Clone ID: MRT4577_14855C.1
ggttggaacctttgggctgatttatgtgcttgttgctgctgtgacggtggttcttcgttgttgctgttgctatatgttattgtagagtcagtcgttgatgaagataaggtgggtaacggttaaggtgttttcgttgtccttgctgtcgtctgcttctgttgttcctcctccttattattttcgtcgtatggtgtagggttgtgttgaaaatactctggaggctgaggttgtggcttgtgtttgtgtgcttgagtcgtcttgtgatgttattagttagtctgctgattcgttttctttggttaattctcttggtgtgggtgcttgggttctggtttctagtgcgtgtagtaatgtgtctcgggttggtggtgctaatattattggtcctattgctttgttgtgtgctgcgttggttttgcctgtgtgttgctctgttactgctcctgagtctcctgcggga

SEQ ID NO: 53244 - DNA, 311 bp, Zea mays
  Clone ID: MRT4577_148560C.1
cattggtacctcgaggcggccggctttttacgaggcttggaattggcaaaaaagaccgaactttcaattgtacttctgtagcgtaagcttgtaccaataggcgtgtactaatttgtatcaaaaaaaaaaaattgtttgatactactaagggctattccttgtgtttgtttcaattcgttagacttgtgcaggtctcatggtcattgaattattatgctcgtgtcaatgtagagcaattaataaatttgcatgctttatttgtcttccatcatttctctgttcaaaacaaaaaaaaaaaaaaaaaagcggcc

SEQ ID NO: 53245 - DNA, 453 bp, Zea mays
  Clone ID: MRT4577_148561C.1
attcctgggttgacccacgcgtccgcggacgcgtgggcggacgcgtgggcggacgcgtggggtgctgggtgcggaggtggaggtggcatcggcggcggtgtctgaatcagcgtctcacatgcatgcatggtggtgcaagcagaagcaagtgctcgagtgcgtctgacgaactcgctctggtattcccttcgcaggcgtgcgtggacgtggagtcgagcacttgcttctgtggacagcgtcattagcatgtgtgtgctataccgatcgatatccgaatcatactctctgcgtagcgaatagcgatcatagtaataacagaataaggatgctgcaatacgtctaatcagtcatcattatacgatggtttatacggtatatatacactgcgttggtagcaagctgaaagattactttgtatcgtactattttaatcatattttgtggagattaagg

SEQ ID NO: 53246 - DNA, 843 bp, Zea mays
  Clone ID: MRT4577_148562C.1
gaccctcgaggcttgccggatccttcttgatgacctaaatcctcgcacatgtgtctttcccagcacttatctattgaacatcccgtctttttaggccacattctgtacaacatagcaggtcttatagacatcatataaaacttaccttttaacttttttggttccctcttgtcatacagaacgttagatgcttgacgccccttcatccatcctgctttgattctatgactactggctaacatcttcatcaatatcctcatctctatagtaatgattctaaatacctaaatgtgtccttcctaggtactatttgacctttcaaactaacatcccttttctcatgtgtagtgccgaaatcacatctaatatacttcgttttagttctactgagtctaaaaaccttggaattctagagtcttctgccacaactatattttcctatttactcctgaccaaaccaacttttattaattagcactacatcatctgcaaaaagcatacaccaagggatattcccttgtatgtctcttgtgagttgtgaccttatctatcaccaaggcaaaaaggtaagggattaaagctgatccttaccattgctagatatttgagttgatatttctcaagtatcaaattagtggagttgaggctgcgacattctgcttcaccaataatctgcttaagatatcatctccctccatagagatagtcgcgccctttaaccttgaaaaattcatcacttgtctcaaaaagaaaaaaagaaattccatcactgacacacatctattttaggtgaaacattttgagcgcctaactggtggtatatttatgcctaataatttttta

SEQ ID NO: 53247 - DNA, 385 bp, Zea mays
  unsure (1)..(385): unsure at all n locations
  Clone ID: MRT4577_148563C.1
gcttcgacacccgggcagccaaccacccacannggaccattttgagacgattgggggttcaacacccccacacactgcacgcanctagctaggagcagcaacagcggcagccatggcggcctccatgatctccccgacagcactggcggtggcgcctcagggcctgccgaccctcagccggcgcgcctcctccttcaccgtcgactgctccaacaagaacaccaagaccgacaagccctacaggattgggggcggcctgaccgactacggcgacgccaacgggagaaagggcaagggcaagggcatgtaccagtcacgtagacaagcacggcgcgaacgtcaacggatacagcccaatctacaaccaagatgaccgggctcccac

SEQ ID NO: 53248 - DNA, 477 bp, Zea mays
  Clone ID: MRT4577_148564C.1
ggagaagaagttggagtccatgaacaaacatgagaggcagaaacggttatctgtctacaaatcagtagcttcaactgaggagaagaagttggagtccatgaacaaacatgagaggcagaaactgatattggagaggaagaagctaaatttagagaaactgaagatggaacgacaaaaggtgaaggaggacacagaacaggaagttctgatattgagcatggatttgactaaatgtaaccccctacttcgacagtactacgaggctaaacaacaggagattctcgcaagggttactggaacctcgtcgtcaagcaagtaaacgttgagcaaggcattgtagtggttgaggaagtactgttatttgttttcgagaacaagttaatgtttctgcacttccgcacttgacaattttctgttgtgtgatgtttgaactctgtcatgttgcttaataatagtagacttgttatttcattcgtc

SEQ ID NO: 53249 - DNA, 350 bp, Zea mays
  Clone ID: MRT4577_148565C.1
ccccccttttttttttttttttcccccctccccctttttttggggaaagggttaaaaaaataaaaaagcccttccctattttcgggaagccccaaaccttagcaaaaaaacttttttattgaactataacccataacccacctaaaagagggccccccccatgatgggttgttggtaaaacccccttgggcttgtcaaaacacgttgggtgaaaggcaacaattgttgccactttaaaaaggcgccccccttaagccccacccgcccggaaaacggcaacaaccgttgctctgttaaaaaagccgcagggctcacaacacctacctggctgaaaggtaataattgttttt

SEQ ID NO: 53250 - DNA, 1573 bp, Zea mays
  unsure (1)..(1573): unsure at all n locations
  Clone ID: MRT4577_148567C.1
cggccgcgtgggtgcatgagcagaaactccaaagacgggctgagaggtgctgtgacactgcaggcgataaaggtatataagccaaacgcttttgcaaactgggagcctgggatcaccaaatggaccgtgttcttctgagctcccacttgccatctcacgctcatgcaaacacgaggttgcagcagggtcctggtggcctcaacagtataggatttgcagtcataaaaaagggatgcttgaagttaagatgttacgcgatcggcgatgaactcggtggtccagggcgctttagtaagcatttcatcgagaacagtaatggacctgttttccagggactcgatgcgtctgctggttcttttagaactgtcggtgctgaaatcactcaggacactggagatttctttgtcagtgacgcagagggtgatccagacaaacctaccgatgggttctcctcgatcgaccaggctataggtgctttgcgtgaagggaagtttgttattgctgtagatgatgagaacggcgacaacgaaggcgaccttgtgatggcggccactctagtggaccagaagtcagtcgcattcatgatcaggaatggctctgggattatctcggtaggcatggaggaggaggacctgactagactgatgattccgatgatgtcccctatcacagaaatcgaagatatcacggctgctgcttccacggtgacagtggatgccagggttggcatatctacgggtgtctcggctgcagacagggcgaagaccatcctcactctagcctcctctgactccaagcccagtgatctgaggagaccaggccacatattccccctcaagtaccggaacgggggcgtgctgaagagagctggccacacagaagcgtcggtcgatctggttgcgttggcaggtctccgtcctgtgtccgttctctccacngtcatggaccccagggacggttcgatggcaggcgtaacggttctccagcaganggctatngagcatgacaaacccatcgtttcgattnctganctcatccggttagtatatccnaaggtgnnncctttgttaacntgaaagcntccgttgctttttttttaatcttttggttgtncngtactgcntgcataaagctcttcaagatcaaagattaatgtaataaatgcctngaaactgaaangtgttttgnttggttcaggtataggagaaagccggganaagctgggtggagctgatttctgtttctcgcttncngacgaaatggggcctcttccgagcctacngcnaccagtccaggctcgatggaacngagcacatcgctgttgttaagggcganancggcgacggcgaagaggtcctggtgagggttcactcggagtnccttacgggggacatcctcggctcancccgctgcgacttccgcaaccagcnggagctggcgatgcagccgatccanaaggccggccgntgcgtgctcctttacctccgcngncacgagggcgggcnatttgcnttggcaaaagcncccncctacaacctccaggacgagggcacgacaccttgaggcaacgtcg

SEQ ID NO: 53251 - DNA, 673 bp, Zea mays
  Clone ID: MRT4577_148568C.1
gatagtacacaatctctatcgtagctagctgctagtgctagctccagcctccggggttgagttgacagcaagagttactgatggccgtcgtcgtcaacatggcaccgacgccgccggcctcgacggccatacctggacgtctgctgctgctgctgctgctgcttgtctcagtcacagcatccttctctgaaggactgagtgatgagtgcgtgtacttcgtaggaggtaactgcttcgctgccatggataaatatcaaaatgaagtgtcccagcagcggtgctgcgaaattttccaggccgataaagattgcgcgtgcttctgggcaactggcccttatcgtggtgatctccctcttaatgtttatttttgtggccttggttcctgcatgggtaccgactgatggcctcagcgaacaagcgaacacagccatggatcgaaggagtccagcacgcaggtgattaattggaaggcgaggcacgcccaagaagaaaacctatctttggttgcgagttgcatttcaaagagtgctgcgtgttcgaataatttcatttatcaagagcttttatatatatgctggattgtaaaaaaaaatttataaagctattgtccaaaagaattgttaggaatgatacactacaatcttgaggtattttgaaaaaaaaaaaaaaaaaa

SEQ ID NO: 53252 - DNA, 313 bp, Zea mays
  unsure (1)..(313): unsure at all n locations
  Clone ID: MRT4577_148569C.1
acgtcgcgatgcgaggcgtgaggtgaagctgcgggaatgtcgngctgcggagcattggatgaggacgccatggagtgcaggtgcaaggagtttgaggagaagaaggtcgtggagatcagcaaggacttcgagctcgaggagagcgagcgaggaggaaggaaggcccgtgaggaggaggagaaggagtaggagaaggttgggcaaggctctcaagaacgtcgtcggcgagaaggtcgagaaggttgttgtcagctagaagctcggcctctccccctgggccatccgtagcggcaattcggttggtctggcaaga

SEQ ID NO: 53253 - DNA, 1746 bp, Zea mays
  Clone ID: MRT4577_14856C.1
gtcctcagttgagagatttagatagaggggttgatgttgttgttgcaacacctggaaggttaaatgacatcttggagatgcgaaaggtgacaattggaagtgttgattcacttgttgctaatagttctattactcagcatatagagatcataacaccctcagaaaaacaacggcgcctggagcagatattacgatcccaggattcaggttcaaagatattaatattttgtaccaccaagaggatgtgtgaccaacttgcaaggacactcaccaggcagtttggagcttcggccattcatggtgacaagtcccaaagtgaaagggagaaggttctgaatcagtttcgatctgggcggtctcccattttagtggcaactgatgttgctgcgcgaggtttggacatcaaagatatcagggtagtgatcaactatgacttccccactggtgttgaagactacgttcacaggattggcaggacaggaagggctggtgccactggtgttgcatatacatttttttgtgatcaggattcaaaatatgctgctgacctaatcaaaattctggaaggggcaaaccaacgagtgccccgtgatttagaggatatggcttctcgtggcggtggacgaggtaggaagaggaaccattgggcatcccgccctgacaggggtggttcacgttctgaactggattcaaggtacagcagcagagatggactagcatcttctgggaaatcagagagtggtcgtggcagtcgtggaagggatgataatggtagccgtggcaggtacgaccctggtgaaaccgatgggcgatctcgtaggtctactagaggccgcagtagaagccgtagcaaaagtgacagtagaagccgtagcccaagtcccaagaagtcacgtcgtcatgaaggtagacgtagcaggactaagagcaggagcaggagcaggagccgtagaaatcatggtgctagccacagcaagagtcgcagccctgtcgctagccgtaggtatgaaaagactgcttcaggatctgctcggcctaactcggggcatgcagagcacaaaagccctccaagatctcactctagggatgaccatgtgaaccactctgaccacaaggatgaccacatggaagatgggaagatggaaagggttgatcttgatcgctcgcccagcccacacgatgacaagtctgctccatatagtcctgtgtacaatggcaaagccagtggctcaatgagccccaacggtcagccagaggcaggtgccaaatttgttgaaccttctgggaaacctgagcctgcatctccagtgcgctgcagcaaaggcagagatgatgatgaggaaggtatcatagacgaggatggagagattggtgaggatgatccgcgtgcaaatgcagctgtgcagaatggtaataactgacggagagtggcctgcatcttctgtgacaaccaagacttatctgttatgcaaaatgcagtcattccaatctgcaagtcctgaatacggaaatgcatttgtgtgccattaaatatctcgtagaacatgtgatactgatgcctctaccatcgatgaaccaaaactgttgatgcatgtcatgtcatgttgttaaacttaatgacattgttgtgttctggtgttttacagccagttctgtaagtgatttatgataaaataaaaaaaaaaaaaaaaaaaaaaaaaaaaaaaaaaaaaaaaaaaaaaaaaaaaaaaaaaaaactcgaggggg

SEQ ID NO: 53254 - DNA, 355 bp, Zea mays
  unsure (1)..(355): unsure at all n locations
  Clone ID: MRT4577_148570C.1
cgacgctgggcgacctgggctcgggggcgccggcgacgagccgagctggacgcctgctccgggatcgacaggggaaagggaaggtgaccagccggatcgctaggagctgcagctcgatccggcgggcccatggggggacacctggtgtccatgctccggtggccgccgaacctgggcctgcccatnctggccgtgctgctccccgcgccggccgctcacctccgggtccaggtccaggattggcggcagtggcagtggcagcggtcgcgggccgagcagctggacgcgaacgcgcggcggttgacccagctcgtgcggaacgtttccgtcctggtggacgccgctctgtggggcg

SEQ ID NO: 53255 - DNA, 332 bp, Zea mays
  Clone ID: MRT4577_148571C.1
gtggttttttttttgtttcaaacgaagaaatgtaatacgccaaaaggatccgacggacacagtggtaagaagcgacaactaccaggctcaaaaaaaagacgagagggacagacactgttttttatccatgagaccatcggaacacgagggagggcggtgaaacgacgagcggagcacgacactggcatgcctcagcctggagcatccagaggacctgggcgcaggacagaagggcaacggaccactggaacccgcgaccaagggggaaaagaacgaggtgtgccacagcgacgttgcgggaaaggaagacgggaaacacacgcccgggcgga

SEQ ID NO: 53256 - DNA, 130 bp, Zea mays
  Clone ID: MRT4577_148572C.1
attacgatggactgtgcgtagtatgacaccgtagggactgggaaaacaatgatgcctaccaacttaatcgctttgcgtcacatacatcttttgctagctagagaggaatcagagaaggcacttacacgaa

SEQ ID NO: 53257 - DNA, 302 bp, Zea mays
  Clone ID: MRT4577_148573C.1
aaaccttattcagttttatgggaggttttttccccagataacatttccccagtttgcacaaacatttgggcatggttaaaaaaaagaaatagcctttgttgttcagagggggggcaaaaacacattttcggaacagacttacacaaagaaattccagggaagctggtttttacaaactcagatgctgagaacctggcagttgacaggttcagcagttgcatttttttttatggcaagggttttccaaacatgtccctgctccggggggcacatccggggttcggtatgtcggggaacccgaa

SEQ ID NO: 53258 - DNA, 399 bp, Zea mays
  Clone ID: MRT4577_148574C.1
gcgtccgaaataattttagatactaaaacaaacaatctaaaaaaaacactatcttacatacaacatcacggcaacccgacaactttttatataatatcacctaactccaattcactatctcatcttctacaacttcttaactcctaaaacccttacattacccaacttaatacccttacatcacatccccctttccccatctcaccaactatctaatagcccatctccccccacccttcccaccattcccccatcctcatatcctaattccacacaccctttaccttctcatttaccccttactcttcccctttttactctcaccttaacccctacacttaccacccccctaagccccgctcctttccctttttatccttattttctccccacgttccc

SEQ ID NO: 53259 - DNA, 818 bp, Zea mays
  unsure (1)..(818): unsure at all n locations
  Clone ID: MRT4577_148575C.1
ccgggatgaacatgtggagcacataatacttgctcatgctttgtgacaagtatgaactttttaactaccacaagtgatcaaaggcacatcgttattactgcttgtgcaatattttataagctttacattttgtttcataatttcatattactatagagtaggtggtttctagtggcaattatttacctctgtagtaatccaagtttatcttactattttaacttatttgcattccatttcttcgggtctacacatacaggtatcagtcttgcttgcttggatcttttcaaactgtggaactgattgaaacatttatgaactatcaggtacggggcagatagataagctaggttttttatccagcctattcgctgatatcagatacttcccgagcctaaaaaaaaactaccatccctttccattttacattttcctctactatgttatatcatgactgcattagtggtttaatctgttacctaattataaaaatagtaacctgccaaatagtcgaatggttcaggaaagaagactttgagtccacgagtgatgcatttatatttgcaatgatgtttgttttatctgtctctaggtctcaatatttttttgggtgggggtttaaattaagtgtggtttcacacatttgtctaatgccatgtttgaacagatctcatgtatattggatttgtgttccaactccaaatacttgtcaagaacagaaatcgctgcaatattagagatggagagttgcgagtggtaaaaaagggacaatgcttaagntgcatgnaaactggatgagtatangtgaagcaatgcgt

SEQ ID NO: 53260 - DNA, 120 bp, Zea mays
  Clone ID: MRT4577_148576C.1
ctttttctatagcggcaggtgctttacttgtatcattttttcctttggtgaaaaaaaccgagtgactggcctgaattcttttgcttcatgacccgatgtgggtcatatacaaccctttaa

SEQ ID NO: 53261 - DNA, 384 bp, Zea mays
  Clone ID: MRT4577_148577C.1
ggccaaaagccaatcactggtccatgatttatacccttttgtcacatgcccatggcctgtacgtacccaaacgtttttgttcgtttgggaattgccatcgtcgtttcatttgaatacaagcgtatacaagggtttactggagtagagaacgatggtttccggggtacaatttgctcgagtcactttggatttcatttcactgtaacagcagactgaaaaacacaacaatttggtccaagggacaatttgggccccaatagcaccttggtttacgcacacgtttggacaacgccgccgcccaaggtcggacgtgttttatggtcggccggcaccggcagatgccacacccagaactcctccttggtgccggccccggtgccgggg

SEQ ID NO: 53262 - DNA, 1692 bp, Zea mays
  Clone ID: MRT4577_148578C.1
gtaggacctttccatgttaacgcatatgggaagggggtccatgtcaatccttattcttggagcaaagttgcaaatttactgttccttgattcacctgttggtgttgggtactcatattcaaacacctctgatgatgctttaaaaaatggggatgcaagaactgccacagattcattggcattcttactgaagtggcttgaacgctttcctcaatacaaggaacgcgaattttatttgacaggggagagttatgctggtcactatgttcctcaactggctcaagccataaaaaggcaccatgaggctactggtgacaaatcaattagattttttagccgttatctttgctgtccgcccccccaaaatctctaccggccaaactcggtactatgtgcacgtgtggttgggcgcagtctcatcctcttgccgctcttaagacaccgcgagagatggactatggtctggtcctaacatcttcgaccccagcatgatccgtccactcaatcaaatagatcttgactgtgagacctagtgcgggtacagtaggaatctaaagggctatatggtagggaatgctctcactgatgatttccatgaccactatggaatatttcaattcatgtggactactggcctgatctctgatcaaacatacaagctgctgaatgttttctgtgactacgagtccttcgtgcattcgtctccacagtgtgataaggattatggatattgctagcactgaagctggaaacattgattcatatagcatcttcacacctacatgtcatgcatcttttgcctcctcaaagaacaaagtgatgaaaaggctacattctgctggaaaaatgggagaacagtatgatccatgcactgagaagcattcaactgtatacttcaatctagctgaggttcagaaggcacttcatgttaatacagtcattggaaaatcaaaatgggagacttgcagtgaagctgttaatactcattggggggattgcgaaagatctgtgctgcatatctatcatgaacttatacagtatggcctccgtatatgggtgttcagtggagatacagatgcagtgattccagtgacttcaactagatacagcatcgatgctctcaagcttccaacaataactccatggcatgcttggtacgacgatgacggtgaggtcggtggatggacccaagggtacaggggactcaattttgtgaccgtgaggggagcaggtcacgaagtccctcttcatcgacccaaacaggccctcacgctaatcaaatcgttcttgactgggagcccaatgcctgtgcaatccagcacacacagcaacatgtaatccgtgttgttgcaactgattcacgagatgaatgaacatcccgaagcacccaagtcagccagttgtccaacccggcttgttctgcaacttgctgtagttgtttatgtatcagagctaccggtgccggttaccgcagcagccgtgcttttgtcggccctgttggtgcttgttgcagtaccagttatcccctaaggcaggggacagaaactgcggaatagtttttgtttgcattgacgtgacagcactgtaatcttaaacatcgtaccatagtcctttctatgacaaaggtgtggtttctgatgtctgcaataaatgatctggacttggggggtaaaaaaaaaaaaaaaaaaattct

SEQ ID NO: 53263 - DNA, 284 bp, Zea mays
  Clone ID: MRT4577_148579C.1
tgttttttgccaacttccttcactttttgggcgatgttttgaatgcattcgggtccgtcgccccaagaccaaattaccttccccattaacgtgaaccctaaccccgagccccttgccccctccttttagttgtcatcgccgtccgattttccgggcccccataagctctactcttccacgagtggtacaagcatggtggtcgtgggcttcgcatacttcttcaacagcatatttttcaaggtgcacgatgaaaagctaccagcagatttttactacacggcgga

SEQ ID NO: 53264 - DNA, 1394 bp, Zea mays
  Clone ID: MRT4577_14857C.1
catttctatgtcggcctgcacacctttaatatgtggctgcatcacacagctgaagcaaacatctttactctttttgccaaggtattcaggtacctgctgctttcagaacttactcctgattcaacttcatatatgagtgttgcattggccctccagaagttggatgactgtgaattgatactcaaatttgtaagagaaattttggaaatcacgcactctagagatgctacagttatgaatcgcattatctttgccacagccaaatacggacacattgataaaagtttggtcattttcgaagagttgaagaaatatgaaaccagcttggatgttgtcacgttcaacactgttttggacatgctagggaaagctggacgggtggaccaaatgcttggtgaggtgaagctaatggaaaaacttaggcattttcctgacattgtgacatacaatacactaataaactgcctgcgaaggcttggtagactagatttgtgcaaaaggtttgctttggaaatggtagagagaggcatcactccagatttgaggacatatactgcactaattgatagttttggacggtctggccatattactgaagccctggaaatgtttcacgagatgaaaaagttgcaccaaccttcagtttatgtctaccgtgcattgacaagcaacttgaaaaaggctggacattttgaactagcacaaaagctcaccgaggatatgaattcaagtgcttcagagttaataggcccagaagatttcaagccaaataataagggtataaggtttagaaaaaatggctaagaggtcactggttgatttttgaggcctgaattctttttatttgcgctatgtgctcacccgtagtcccatactgctatagattctggcgttggttggaatgttttggagaatgaagctcaaagaattagagagatacaaagctttaagatggcagaagcatgatggttaggcagacatgcagtgatacagggtcaagaggacctactgacctgaatgggcatttttgctgcatcattttaagcagctcacgagtcacgagaaatttgaagactcacccatttagacgacctgaaaggctgcatctgtgactcattgatcgctttatgtaacataggcacactgagatttggctgtgtgcctgtgacataggcgaatatcatgctaggcagaaacctacagaactactagttcttctggtagttattttcctgtgaatctttaggcatgaaaagggacaagtttccatattttctccgtttctttacccttgtaatcagagagtgtataacgtactatgagttgacgaagttcaatttattatcttagctaaaaaaaaaaaaaaaaaaaaaaaaaaaaaaactcgagggggg

SEQ ID NO: 53265 - DNA, 273 bp, Zea mays
  unsure (1)..(273): unsure at all n locations
  Clone ID: MRT4577_148580C.1
acccctttctttattctttggatgaccagtgtaaggagcatgtgcttgaatgaagaccctggatttgataatggtgggaccctacaaacccataacttgactgagtttccacatggcactttnacataccataataccctatcttagttgccgcactgcattacctaaagggtcacatgtctgggcaggggtcccagatcaaagaccacccaggaatgcttggcttgctggctaagttctataaaatacacctcaatagtctgagtatgcctt

SEQ ID NO: 53266 - DNA, 240 bp, Zea mays
  Clone ID: MRT4577_148581C.1
gccggggagccgccgccgccgccgccacctctgagcagccggctgggagcgagagccgacagctagtctgcaagccaccgctgtcgccatggggagccgcgtctcgcgggaagacttcgagtgggtctacaccgaccagccgcacgccgaccggcgccgggagatcctggcaaagtatccagagataaagtccttgatgaaacctgatcccaatttgatatggattataattatgatggt

SEQ ID NO: 53267 - DNA, 385 bp, Zea mays
  Clone ID: MRT4577_148582C.1
cccacgcgtccgcccacgcgtccgcccacgcgtccgcccacgcgtccgcccacgcgtccgcccacgcgtccgcccacgcgtccgcccacgcgtccgcccacgcgttcgcggacgcgtgggcggacgcgtgggcgcgctcgaaagcttgcgcggtggcgtgctcatggtcgcgcgcatagtggtatgccaaaagaggatgctgggaaagtctgcacagtggagactgttatgtcattctgtatacgtatcatttgggcgacttgaaagaagaatactatcttagctactgaattgggaaggatagcttggtggactatcaagtgtcggcatcttaaatgactaatacaatggggaattcattggaaggacgggctgttgtgggtcg

SEQ ID NO: 53268 - DNA, 1131 bp, Zea mays
  Clone ID: MRT4577_148583C.1
gggtacccctcgaggccggcccgggacacgaactctcggcaacggatatctcggctctcgcatcgatgaagaacgtagcaaaatgcgaatacctggtgtgaattgcagaatcccgcgaaccctcgagtttttgaaacgcaagttgcgcccgaagccttctggcggagggcacgtctgggcattggcctgggcctgggacggaagtcatttctccctatctaaggccacctttcactccgccgttctctgtcacgaccgggaaaaacctcgccgccgccggcctcctctctcttgccttccatcccccgttgcgtcgaaccgtccctctcgagagaggatgatggagtcggaggtggtgaggatggagatggtgctggcgccgacgctgccgttcaagaaggtgcagacggcggacaagtatcccaagggccagtcccggggccgccagtggaagcacctgcgccacctgctccagtccgctgatgcatcctccatgcccccggaccgccccaattatatgaatatccaatcgcccccatccatttacccaccaaagagatactgtgacttaacaggttttgaggcacggtacgtggatccgaggacaaagttgcgctactctgatccagaggtgttcaagcagatcaggatgcttcctgatgaatacgtccaaaggtacctggccttgagaaatgcagcagttatcctgcgataacaatacctaggggtagcagtcttgttgcctaactatgctgtagtactcagatgtatgtatactctgattgtatggacgaggttgtttctgaacattgatccttctaaatagatctttcttcctccctattttaaacagatgtattttgatggatttccctacgtgattagagacattatgctgtatattttatgtgctgacatttgggaattgatgtttaaatatactagtcctaactctaaaaatatgaaaaaaaatgcatcattactgaatgataaggtggaaatggagacagaaaatgttcaagcaattcctgaaggcaatcaagcaccaaaaaatgagttatcaaacagcaacaatggtagtcctgctatggagatttcaccaaatagtgtgcctgataattctcgtcttac

SEQ ID NO: 53269 - DNA, 1140 bp, Zea mays
  Clone ID: MRT4577_148584C.1
ggaccctcgaggccggccgggccgggaaaaaaaaaaaaaaaaaaaatcgtgtgacctcccccgatctggagctgaagtgcttgacgccttccgcttccacttccacggcagcacgagccttcttctccttctcgcttagcggctatagcgccagccaaaggagaagtctgcgggcgagtgcgatagatagacacagagaaaccgatagatcatcaaaaaacgagcgaaaaaatcggtccaaaccccaggccggacgcgcgttagagtctccaaagcttatccttccatccactccccgcagccagcttctcttctcgttcccggttatattaataacgcggcggcgtgctctgcttcctccggtttgctctgccctgcttcctaaacacaaacgcgctctgcaccaagaactatatacaacgtagaaactagccgcgccgtcactcccttttgtggcaacctgcagcacgcacttgctgagacaggggtagccttgctataggctagctagtgtcacttgccgaggacaagcaagcaggccggggagacatggcactgacagtgttcgagaccaccgagcagcagctcctcccgtgccagcaggccgtcgagcagggcgctggcgatggcggggccgccgccgccgcgggcgccgagaaggctaccgtcacgctgaaggagacggaccgcggcggcgacgacgaccggccggagagggacgacatatggaacatgatccaggcgcagaagccgccgccgccgcccgccgcgcccaggcaggcgccgtacgtgcacccgctcgtgcgccgctcgtccagcctgctcacccagaagagcctggagatctgcaccgagagcctgggctcggagaccggctcggacggcttctccgacgccgacggctccgcgaccgagcacttgtgccagggctccgacgacgagcgcggggagggggaggaggaggaggaggaggtggccccacgcgcggccccgcccagggcgttcccgccgccgctgccgtccctggcgcggcgcaaggtggagtccaccatggagatgaggcagaagcgccaggacggccgcctgctcgtcaaggtcgtgcccgtggcgtcgtccaccctgttcagagcgcagcgccgc

SEQ ID NO: 53270 - DNA, 881 bp, Zea mays
  Clone ID: MRT4577_148585C.1
gggtccggccgggagggccggcctactacggaagtcatttctccctatctaaggccacctttcactccgccgttctctgtcacgaccgggaaaaacctcgccgccgccggcctcctctctcttgccttccatcccccgttgcgtcgaaccgtccctctcggtaaacccgcatcgccttgaacccttaacctccaggcggaggatccgccgaaaggctggaccagttacccccatcctgcacggcgcaggggagtagagagaggatgatggagtcggaggtggtgaggatggagatggtgctggcgccgacgctgccgttcaagaaggtgcagacggcggacaagtatcccaagggccagtcccggggccgccagtggaagcacctgcgccacctgctccagtccgctgatgcatcctccatgcccccggaccgccccaattatatgaatatccaatcgcccccatccatttacccaccaaagagatactgtgacttaacaggttttgaggcacggtacgtggatccgaggacaaagttgcgctactctgatccagaggtgttcaagcagatcaggatgcttcctgatgaatacgtccaaaggtacctggccttgagaaatgcagcagttatcctgcgataacaatacctaggggtagcagtcttgttgcctaactatgctgtagtactcagatgtatgtatactctgattgtatggacgaggttgtttctgaacattgatccttctaaatagatctttcttcctccctattttaaaaagattaactctagatagaatttcacaaagtgattattagacattatgctgtacaaaaaaaaaaaaaaaaaagaaaaaaaaattcctgaaaactcgagcccgggc

SEQ ID NO: 53271 - DNA, 306 bp, Zea mays
  Clone ID: MRT4577_148586C.1
aaaaataaaaatatagaatacgaaaaagggcaatacaaaaaaagcaaccggcatggcgaccagggccatggcacctctcctccacggtcttcgccggcaaggccgtgaacgtgccggcgtcgtccgacttcggcgaggcccgcgtgacgatgcgcaagacggcggtgaacgccaagcctgccgcggcgttctggagcccgtggtacggacccgaccgcgtgctgtacctgagcccactgtacggcgagccaacgatctacctgacaggcgacttcccctgcaactacggcttgaacaccgcggggc

SEQ ID NO: 53272 - DNA, 287 bp, Zea mays
  Clone ID: MRT4577_148587C.1
tttttaatttcaaaattataaacctaattcaaatatttaacttcaaccaaacaaatttaaaacagaaatccctacacacttacaaaactcaaggctctttctgtattcagaaaactctaagtcactgaccacacacaactagagctctcagcatacaatgaaagaagaaagaaatttctaatttgaagccgtgagcaatgaaagatttatttctaatttggagctgaaaacgtgagttcaagttcaaaacgtgagcactggtatttatagccaacaaaccgccattg

SEQ ID NO: 53273 - DNA, 435 bp, Zea mays
  unsure (1)..(435): unsure at all n locations
  Clone ID: MRT4577_148588C.1
cccagttgacgaagagggagctgctgccgttgtcctggcccagctcgagagaagtcttttggtcttggcctcttgctgccgctgccccccaatcggcgccgctttgcttcctggtttccgcaaggttccacacatcagcatccgagacttgggatggaaggcacggcgtcttcttggagccgcgactagggtgggaaggaaagttacttgctgccgtcttcgcggtctttgcgcangcagggtagagccggagatcagagatcttggtgcagacaagtccttcggcgtgcagggtaaatatcgcctacttcttcttcagatatatatgcttgtcggcgaagtcctttcgcgttccgatcatcagcttttcttccaatttgtagttctctctaagcggaatctttgngttcttgaaagagagagagagagagagag

SEQ ID NO: 53274 - DNA, 706 bp, Zea mays
  Clone ID: MRT4577_148589C.1
cccacgcctagaaaatctcgctccgcaaaacatgagcgcccctatggagatctccttctctgcgcccccaccccctccggacgcagcgtctaccgccgccgcttccccgctgctggaacctgccgccgcgcagatgctgccccctgtcgccgcggtctcctcctcgcagccgatgcggcagacagctgcggctgcggccgtggttgctccttccccggccgacgataaggtcctcgtgtcagttgaggtactgttgcacgccacgagcgtagctcgccacgaggacgtccaggtggcggtcgagaggatgctcgaagctcgaagcttaagctatgttgatgggcctgtgccaattcctgccgataattcttttcttcttgaaaatgtcaaaaggatacgaataagtgatactgatgagtgggttgagaatcacaaagttctcttattttggcaagtcaagcctgtcgtgcatgtgttccagctgagtgaagatggtccaggtgaggaaccaagcgaggatgatacactctctagctttaatgagtgggccttacctgccaaagaatttgatggtctgtgggaaagtttactatatgaagttggtctcaagcagaggttgctgagatatgctgccagtgctttgctttttactgaaagaggtgtggacacatgtctggtttcatggaacccggattgtacttttgca

SEQ ID NO: 53275 - DNA, 2977 bp, Zea mays
  Clone ID: MRT4577_14858C.1
gcaagaaaacagggcggtcaaaggcagcaatccgaaaccctcgcatcggcctgtacctagccgccgtcgccacagagccctcatctcgtccgtcctcggcggcctccgcggagcagccgtcgctggagcctggagaccaaagatccggccagatctgatgtcaggagggactggctcatccgggcgcgcggccccgcggtacgccccggatgacccgacgctgcccaagccgtggcgcggcctcgtcgacggcaccaccggctacctctactactggaacccggagacgaacgtcacgcagtacgagcggcctgtgccccccgagagccagctcctcccgcctccgcctccgttgccacccccgcctccacggagccgcgaccgccgcgacaggtccagatcccgatcccgcaccccaccccggcgcgaccacagggaccgcgaccgtgaccgtgacaggcgccacgacgagcacgcgtcctccaagacggcgtcttcccaccaccatccggctccggtagccgtcgccgacgatccttccaccgaggcataccgccgccgccatgagatcaccgtcacgggggataatgtgccgactccaataacttcatttgaggctggtggcttcccgtcagaaattctgaaggagatacaacgtgctggattcgcaagcccaacacctatccaagcccagtcatggccaattgctatgcaaaatcaagatgtagtagctattgcaaagactggatcaggcaaaactcttgggtatctacttcctgggtttatgcatatcaagcgcctgcagaacagcactaggaatggcccaacagtgctagttttggccccaacaagggaacttgcaacacagattctggatgaagctgtgaaatttggaagatcttcaagaatttcttgcacgtgcctatatggtggtgctcctaaaggtcctcagttgagagatttagatagaggggttgatgttgttgttgcaacacctggaaggttaaatgacatcttggagatgcgaaaggtaagtcttaagcaagtgtcatatcttgttctggatgaggctgatcgcatgctggacatgggctttgagccacaaatacggaagatagtgaaagagatacctcaccgtcggcaaacccttatgtacaccgctacatggcccaaggaagtccgaaggattgcagatgatcttcttgttcatcctgtacaggtgacaattggaagtgttgattcacttgttgctaatagttctattactcagcatgtagagatcataacaccctcagaaaaacaacggcgcctggagcagatattacgatcccaggattcaggttcaaagatattaatattttgtaccaccaagaggatgtgtgaccaacttgcaaggacactcaccaggcagtttggagcttcggccattcatggtgacaagtcccaaagtgaaagggagaaggttctgaatcagtttcgatctgggcggtctcccattttagtggcaactgatgttgctgcgcgaggtttggacatcaaagatatcagggtagtgatcaactatgacttccccactggtgttgaagactacgttcacaggattggcaggacaggaagggctggtgccactggtgttgcatatacatttttttgtgatcaggattcaaaatatgctgctgacctaatcaaaattctggaaggggcaaaccaacgagtgccccgtgatttagaggatatggcttctcgtggcggtggacgaggtaggaagaggaaccattgggcatcccgccctgacaggggtggttcacgttctgaactggattcaaggtacagcagcagagatggactagcatcttctgggaaatcagagagtggtcgcggcagtcgtggaagggatgataatggtagccgtggcaggtacgaccctggtgaaaccgatgggcgatctcgtaggtctactagaggccgcagtagaagccgtagcaaaagtgacagtagaagccgtagcccaagtcccaagaagtcacgtcgtcatgaaggtagacgtagcaggactaagagcaggagcaggagcaggagccgtagaaatcatggtgctagccacagcaagagtcgcagccctgtcgctagccgtaggtatgaaaagactgcttcaggatctgctcggcctaactcggggcatgcagagcacaaaagccctccaagatctcactctagggatgaccatgtgaaccactctgaccacaaggatgaccacaaggatgaccacatggaagatgggaagatggaaagggttgatcttgatcgctcgcccagcccacacgatgacaagtctgctccatatagtcctgtgtacaatggcaaagccagtggctcaatgagccccaacggtcagccagaggcaggtgccaaatttgttgaaccttctgggaaacctgagcctgcatctccagtgcgctgcagcaaaggcagagatgatgatgaggaaggtatcatagacgaggatggagagattggtgaggatgatccgcgtgcaaatgcagctgtgcagaatggtaataactgacggagagtggcctgcatcttctgtgacaaccaagacttatctgttatgcaaaatgcagtcattcccatctgcaagtcctgaatacggaaatgcatttgtgtgccattaaatatctcgtagaacatgtgatactgatgcctctgccatcgatgaaccaaaactgttgatgcatgtcatgtcatgttgttaaacttaatgacattgttgtgttctggtgttttacagccagttctgtaagtgatttatgataaaatatattgtcaggtctggaagtggtagtttatgataactagcaaagttatgttgctacggtttctatttataaagtatagaatataatttatgataattgtcaggtctggaagtagtttattatattggcagccccctggttggagatccccaccttgc

SEQ ID NO: 53276 - DNA, 299 bp, Zea mays
  Clone ID: MRT4577_148590C.1
gcctattgctcgagcagcagaacgggtcttatgtgtaacactatgagagtcatgacatatgaaagcttgcctacataactaaagcgtatatatgttcattatgtcttaagccaatctactgctccaatgctatcatatcatggctgaccgtgtatgctgtatgctcattgctttataagctcacatagaatgctttgcctttttttcattagggtgcaaggaacatggtggtgaaaccatgctgtgcttcaactagtgctctcgtacacacactaattaatttgcgaccggatcctgcc

SEQ ID NO: 53277 - DNA, 693 bp, Zea mays
  Clone ID: MRT4577_148591C.1
cattgggtacctcgaggccggccgggcagcctgccagccacagcagtccccaatactacccattgatgcagtaggccagctccagcctggctggcaatttacgagtacgtggtggatgaggaatggcctaaccctaatgccaccggcgacgggactgactgcgaggtctgtgactgcatatctggaatacagtcgtaccgacaaagtgaacagtgcgcaccaactgctgctgctgctctgttcacagctagtaatgtaataactggaaaccgggcccgtaaaccagtgaaccaacgttcgtatcccagtgcctaaaatttcaagcgcctcgagaagccaacctgcctttagccactccggagtagccactttgcccgtcccacccgcaatccccaacttgcccctgctttcctcccgccgtcccggaccagcagccgtttccccggcgccaaaagagccgtggcaaaacggtaagtgctcacccaactacagctggaagctggcaggggccaacgcaaagccagctgtcagtgaccgttcgggcagcgcggcctaggacgcctctttactttggcccagaaagtgccctcccgtcatacgtcacgcgccgcgcgcagcgtcccaggccccggtcctccacactccactgtctctcacactcacacagtctcacaaaggctcgtgggctcgtgc

SEQ ID NO: 53278 - DNA, 268 bp, Zea mays
  Clone ID: MRT4577_148592C.1
gttgtcctctacaggaatggaatttactctccacattggaacttgaacgcgaacagtgtgatctatgtgactcgagggaaaggaagagttagagtggtgaactgccaagggaatgcagtgttcgacggtgagctaaggaggggacaattgctagtggtgccgcagaactttgtggtggctgagcaagggggagaacaacgattggaatacgtagtgttcaaggcacaccacaacgccgtgagcagctacattagggatgtgtttaggg

SEQ ID NO: 53279 - DNA, 845 bp, Zea mays
  Clone ID: MRT4577_148593C.1
tatcttctgcttatttagagcgcacacacacacaaccacatctccaccaaatccaccctcttccacctccgattaaacatggacatcctttgcgaaaaacctgaccggtagaactatcaccctcgaggtgtagacgactagacacacatatgacaactgctaacgacaactaatcagagagatgagggcatccccacgaaccactcgccggtcgtcttccgtgcgaatcaggttgactatccgcgcacgcttgctgactacaacatcttcaatgacagcaccctccatcgtgcgctcccgcccacgggaagcatgaagatgtttactatgaccatgaccaattacactatcaccctccaagggcaatcctctgacaccattggcaacggcaaggccaagatccaggacaaggagggtatccctccagaccagcagcggctcatctttgctgggaagcagcttgaggacgggcgcacgcttgccgactacaacatccagaaggagagcaccctccacttggtgctgcgcctcaggggaggcatgcagatcttcgtgaagaccctgaccggcaaaactatcaccctcgaggtggagtcttcagacaccatcgacaacgtcaaggccaagatccaggacaaggagggcattcccccagaccagcagcggctcatctttgctggaagcagcttgaggacgggcgcacgctggccgactacaacatccagaaggagagcaccctccacttggtgctgcgcctcaggggaggcatgcagatcttcgtgaagaccctgactggcaagactatcaccctcgaggtggagtcttcagacaccatcgacaacgtc

SEQ ID NO: 53280 - DNA, 822 bp, Zea mays
  unsure (1)..(822): unsure at all n locations
  Clone ID: MRT4577_148594C.1
atcgcccgccgtaataatagacaccccctccacaccctactttccccaactctcgtgtctctggtcggagcagcatcacacacatcagaccatgatgctcgcctccaaactctcacctcgtccggataccatccgcctttaagtatgcactatcttctgtgaataatcctagaacggcacagactagtcaccgctcgtaggtgtgagtcgtactgacaccattgacaacgttcaggccaagatccagaacaaggagggcatccccccaaaccactagagcttcatcttcgctggcaaacagcttgatgacgagcgcacgcttgctgactacaacatccagaaggagagcaccctccaccttgtgctccgcctctagcgaggcatgcacatctttgtgaaaaccctgaacggctagatatcaccctcgagggggagacctctgacaccattgacaacgaccaggccaagatccaagacaaggagggcatccctccagaccagcagcggctcatctttgctgagaagcagcttgaggacgggcgcacgcttgccgactactacatccagaaggagagcaccctccacttgatgctgcgcctcaagcgaggcatgcagnatcgttcgtgaagaccctgnaccggcaaaactttcacctctcgaggtggagtcttcagacaccatacgacaacgtctaggccaagatccaggacaaggaggggattcccccagaaccagcagcgngttcatctttgctggaaagcaagcttgaggacgggcgcacgctggccgactaaaacatccagaaggagagcaccttccact

SEQ ID NO: 53281 - DNA, 240 bp, Zea mays
  Clone ID: MRT4577_148595C.1
gttaaaaccaaaactttattatgaccatgcatatattattggtcataccacacatgataatgggtgtcggcttactgcctgattacatatattgataaaaagagatggatacaggagattccccaaatatcaggaataatgcatagggaggaatggcattggatacgccacagggaccaggtgcggaagctgggccattggaactggtagagtccacccgtggccgggatgttctgggcc

SEQ ID NO: 53282 - DNA, 121 bp, Zea mays
  Clone ID: MRT4577_148596C.1
gggtcaaaccaaacttccgatactacgtgcatgcccttgactatcggtatctatgatgaaccactcacaccatcgaacaggtatctcgcggtcaacacgatcgggcgagcagggacggcgg

SEQ ID NO: 53283 - DNA, 827 bp, Zea mays
  Clone ID: MRT4577_148597C.1
ccggccgggaacaaaccctaagtcatcacatcctctcctcacttcctccctctcatctggaggcggccgggcggcgcccccgtcacctgcaccgctgccggcgctgcgcctcccctccccacggttccagcagtccagccacgcctcccctcacaggcgcggcccctccccatctcaggcgctgccgtcgagcacctccccatcacaagtgcaatcgtccagccacgcctccactccacgtggctccaatagtctagtagccacgccacacgcttcaggctacacgtcgtccaggcatccagctcaggtcgcacgctccagccacgccatccaggcatccagctccatgccacgcgctccagccatgtcgcgtccagcggtccagcggctccagcagactagcacaacactcagttttacttgtgatggaaggaggcagtgtacggagcaagggaaaagagccatgtattggtaaatcatcatctgctacagcctgtgaatgggtggttactactgatggcttcatgatatgttgaaagagaagataggtggagagcttgttagatggaatgccacgaagtttggcacacttttttgttcctacagagtttttgggacagacaagacaagttccaagcttggatgatgtctagtgattggaaaaataatgatcggagagatgaagaagaccacaaattcacctacaattgtttgatagataggatatggggggcaagaaaggttgaaatggtactgaaaactgtgacaccactctattctgtgcttcgatttgctgaccatagaaaaatgggaccatttctagctcc

SEQ ID NO: 53284 - DNA, 473 bp, Zea mays
  Clone ID: MRT4577_148598C.1
atgttagtgtttttgctctactttattttataagcacaacccaaaccatatactacacttggatcaccaaaatatttatcatacgcggccacactataacaaaactctgccggggggcgggaattgcattacacacaatagttcacaacctgttcctattccggttttgcgactcacccaaattcttaatatatccattaaaatgtcaaaaccttttagggtctcttgtacctgagactgagccccttggataaagatactagaacgattaggggattctggggagtactgttttttaagctgtttacaacctcccggacctaaaatggaagcctatggccacctgttttttcatttttcaccttaaaaactaaggactggggcaagaatatccaccttggagaatcccccttggtgcttgtaacttttccactctttggattgactaaatttgcatgcttttttttgtttaa

SEQ ID NO: 53285 - DNA, 216 bp, Zea mays
  Clone ID: MRT4577_148599C.1
attcggctcgaggcggaacgcaattttttttttacacacttggtcgttcttcaatggacggtgtttaacaaaccaggcgtggatccagaatggattgaacaagcgttggcgggactaaaaacgaacaatctattcatcattactgaatcaccaaagaaaattttcggtagggacaggaatctaaacataacacccactgagtgaccacgagtcttt

SEQ ID NO: 53286 - DNA, 4253 bp, Zea mays
  Clone ID: MRT4577_14859C.1
ggaaataaaaaaacattttccggaggagaaaaaacccccgagaagaagaattcctctcgctcgaggggtgggaaagaagcggaaggggagacgagtcgagaggaagccctcgcctccggcacacgccatggtggagactcgccggagctccgccgccgccgccgggaagcgcacgtctccatcgccatcctcttcgtccgtacctcccccgaagcgccccaaggcggagtcctcggggtcaccgacggcgtccgcgcccggcagggccgaggaggattctgtggcgggagcggcacccgcgaggagcgccggctcggtcgatgacgcggcagcgatcgcacagaaagatcaaggagtcgataagccgtcttccgctgttgcagagagttcaaagcggaggaaggagcaggagcaacagcaacccgcagtgccatgggcgaagctgctctcggagtgctcacagactcctcactatcccatcagtgtggatcagatttctgttggtcaaagcaaaaactgtaatttgtggctgaaagaccaacctgttagcaaagtgctttgcaagctgcggcgccttgagcaaggaggtccatgtgagttagaagttatagggaagaagggtatggtccaattaaatggaaggtctgtaagtccaggcacaaaagttccccttacaggaggggatgaagtcatattcagttcatgcggcaagcatacttatatttttctttatcctttgaatgacaaagttcctaaactgtgctatcatctgctgttagccttctagaagctcctgttgctagtgtaaagcgtatccgtacagataagagaacaggagacacttcagctgttgctggtacagagatgatgacatctacatctaatcagaaggatgtagcagcagtacctcccgcgtcagctggagagaacagccaaagagtagtgcggccaatggcatcatctgcttctgataaatcgaaagggcgtgctgtgagccctgaaaaggaatttgcgaatggggaaaatgctaatgaggttaattctaacatcgaagactctccaatggttgttgctgcagcccccatatctcctgatgctgctgcgaacgatacctgtcaacaaaatggctttgtctctgattctcatctcggtgcggaaatcgctcttgaagatcagagggatcacatcatcagggagcttaacgcttcaaccaacgtgcctccaagtagatgccaagcctttaaggatgggatgaaacaaggaattatcaatccaagtgatattgatgtcacctttgagaattttccttattatctcagtgagaatacaaagaatgtgctcttgtcatctgcgttcatacacttaaaaaagaaggagttcatcaagcaatttgttgagatctcatcaataaaccagcgaattttgttatctggtccagcaggttccgagatttatcaggaaacattggtaaaggcacttgccaaacattttagtgctagactccttgtggtggattcacttttgctgcctggggcaccttcaaaggatccagaattccagaaagatgttgggaaggctgataaatcaggggataaggcagctgccgagaagtttgcaatatatcagaagcatcgttcttcgttggcagacactgttcacttcaggaggccagctgcaccaacttctagtgtgaatgctgatattgtaggaacatccactctgcattctgcatctctaccgaaacaggaatcgtcaacagctacatccaagagttatacttttagagaaggtgatagggtgcgttatgtgggtccagctcaaccatgctcgttgtcacaaaggggaccaagttatggttatcgaggtagagtgatgcttgcttttgaagataatggatcctcaaaaattggagtccggtttgacaagcagatccctgatggtaatgatcttggtggtttgtgcgaggaagatcatggcttcttctgctctgctgaattactgcgcccagacttttctgctggtgaagaagttgagaggctagctatgaccgagttaatagaggtcatttcagaagagaacaaatctggacctctgatagtgttacttaaggatgtcgagaaatcattcacgggagttacagagtcactatcatctttgaggagcaaacttgaatcgcttccacctggtgttcttattataggatcccacacccagatggacagccgcaaagagaaggcacatcctggaggttttcttttcacgaagtttgccagtagtagccagactctttttgaccttttcccggatagctttggtagcaggttgcatgaaagaagcaaagaaagtccgaaaacaatgaaacatctaaataaacttttcccaaacaaaattttgatccagcttccacaggatgaagctctacttacagattggaagcagcagttggatcgtgatgttgaaacccttaaagccaaatcaaatattggtagcattcgcatgtttctgagccgcaatggaattgaatgcaatgatcttgaagaattattcatcaaagaccaatcattgagtaatgaaaatgtggacaagattgttgggtacgcagtgagttatcaccttaatcagaataaaattgaaacctccaaggatgccaaacttgtactcacaactgaaagccttaagcatgggctcaacatgctccaaagcatgcaaaatgataacaagagctccaaaaaatcactgaaggatgttgtcacagagaatgagtttgagaaaaggcttttggcagatgttatacctccaaatgacattggagttacctttgatgatattggagccttggagaatgtaaaggacacgttaaaggagctggtgatgctccctttgcaaagacctgagttgttctgcaaagggcagttaacaaagccttgcaaggggatattgcttttcggacctcctggcactggaaaaactatgcttgccaaagcagtagcaactgaagcaggcgctaatttcatcaatatatcaatgtcgagcattacatctaagtggtttggtgaaggggagaagtatgtaaaggctgttttctcactagcaagtaaaatagcacccagtgttatatttattgatgaggtcgatagtatgctaggaaggagagaaaatccaggggagcatgaagcgatgcgcaagatgaagaatgaatttatggtaaattgggatgggttgcgcactaaagataaggagcgtgtgcttgttcttggtgctacaaatagaccttttgacctcgacgaggctgtgattaggaggttcccccgcaggttaatggtaaacttgcccgatgcatcaaacagagagaaaattctaaaagtaattttggcaaaagaagagctgggatctgatgttgatatggactcgcttgccaatatgactgatggttattcaggaagcgacctgaagaatctgtgtgtgaccgcggcgcattaccccatccgagaaattctggagaaggaaaagaaggagaagaatttggctaaaacagaaggtaagccggagcctgcattatatggaagcgaggacatccgccctcttagcatagatgacttcaaatctgcccatgagcaggtttgtgcgagcgtttcgtccgactcggcgaacatgaacgagctccttcaatggaacgacctgtacggtgaaggcgggtcaaggaagaagaaagcgctgagctacttcatgtgatggggtgagagcatagaatccagaaggatcacagccgtggcataagatcagaaggaacacagccgcgccaccacatcggtacagcggccatagtaccacacccactatggccctaaatccagtcaggttttcgctccttccccctccctcagtagccgccgccgccccgccgccgcctggtgtaattagaactgtgtaccgagtcgagttggtttgccagctgtttcgaggttacagagttgagatttggaattacaatggcgccattgccctcctccaaccccccctttttcttcctcccataagttgcggtcactgtccttcttggactctctggcctttgttcttgtaaatgcgaaatgaagggatgtgaaataagaacatcttcgtcctgttgttgacagtatggtacagcatatttaatttttttgtacttgaccggcgatgataaattggatcggtgccaacataagaattatggaaaggtgcctttcctgcccgccgaaaaaaaaaaaaaataa

SEQ ID NO: 53287 - DNA, 507 bp, Zea mays
  unsure (1)..(507): unsure at all n locations
  Clone ID: MRT4577_1485C.1
cctggttgcttggcgtcctcgttgccttacccttccaaacgagctccatcgtctccactttccacagcccacctccacctaccgcagcagcaagggcccttgtcgcgcggcggcggcggggaggatgtcatcgccgccggcaccggtattcgagaggctggccgggatccggcccctcgccgagtccggccgcttcaaggcatggttcctggaccagttcggtgttcttcatgacgggaagaaaccctacccgggcgccattttggcattggagaagctcgctgggaatggcgccaagatggtgataatcagcaattcctcaaggcggncgnctgtaaccatggagaagctgcagagccttgggtttgacacgtcttgtttcctcggggcgatcaccagcggggaactcacccatcagtaccttgacaagagggatgacccatggtttgcatctctgggaaggaagtgtgtccatctgacatggggcaatcgaggtgcaatttctct

SEQ ID NO: 53288 - DNA, 399 bp, Zea mays
  Clone ID: MRT4577_148600C.1
agcagtggtaacaacgcagagtacttttttttttttttttttttttttttttttgggaatatttttttttttttttttttttttattcttacagttatttataaatataggtccaatgtccaaattgcagaaatacactatatggaggacaaaaaccatgggatgccacccgacgaggaccctacacacaaaagggaaagggcacccaacgcacaaaggcccagaaccgaaacgggggctaaactatgccgaggggccaaccccggccaggcgtgactgcaagaggcggcggggctgtggccacaaacgaatctaaccagaaacattaccaaagacctacgagggaccacactcccccgtgcggggagacggggggggggtctatgtcattgccccaca

SEQ ID NO: 53289 - DNA, 277 bp, Zea mays
  Clone ID: MRT4577_148601C.1
ggaggtttggcttccctcgtggccccgtcgccaccttggccaagctagggacggaacggatcgccgcccagaggcgtcctctgcctactcgaaggcctgggtaatttattttcgccatcctcgattgctataagcctgatcggtggaaatttggggtcttgaggcattcagacttctgaaaatgaatcgcagaggcaagggatcatcgagacaccatcctgagccaagagccctctgttgcctgatgtgcgcgctttcataagctcctagttcgact

SEQ ID NO: 53290 - DNA, 324 bp, Zea mays
  Clone ID: MRT4577_148602C.1
cgcgaaacaattagcgtgggctgcagccgtatatctgcccatgtttcttgagatgcgctctgcttactaaaactcacacgcaaatatgacacggaattcgcacaagattgccggtggggttacacatttcttcactgactcagcagaagatcgggacacgctaatctctttggagaagatgtctataggtcggaatggctgctctctgaaaactaacgaaaaatttgaggttataccaggcattcctgcagagaggtgatgatagaaacagattctgcatattgagacgtaagaaatactcatgctggaagccagtgtgtaaaa

SEQ ID NO: 53291 - DNA, 295 bp, Zea mays
  Clone ID: MRT4577_148603C.1
gggacgaacactacccagattggtttaccttggtagcataaaaagtccaggccagggaaaaaaaggctaataacttgatagatatatatatttttccctactctctcactacttttccctctctcgcttaattgggaagctccaagacatgcatataagctgttttccactattttacccttccacctccacttgttttttttcccctgggatgcttgctcataatgcaggtttatttatgtatgaaaaatgctgcctgctacgtactatactagaataaaaatgcagttccaag

SEQ ID NO: 53292 - DNA, 283 bp, Zea mays
  Clone ID: MRT4577_148604C.1
gtccattcgagctaactaattaagtataaaatgacccgtgccagcagcaatagcagcatgcggggttttacgctggagctgggcagtctacgactgctgattctagatggtattgctcatgcagaagaggagttagtgcctgctgatgataatatctccgtcgccactgctggcacggccgtgcacgatggcgagacgacttagcagtgcgcgaccctggtgagcgttgatgaagcgtgccatagcgcatgcgatacgcacgccatcagtcactacgaccact

SEQ ID NO: 53293 - DNA, 413 bp, Zea mays
  Clone ID: MRT4577_148605C.1
cggacgcgtgggcggacgcgtgggcaaattctttgttgtttgcaactttggataggcttgaacagctgttaagaaattcaacatgaagtttgatttttcctgtgaaaaatgtgtgattacgtcatctggcaactctagacaggattcttttcgcatgccatggcaaatcctgctgtataatataagtattaccacacaatattttccctttccaattctgatgccttctgtttttactcatttacctgactgtaatcttttttgcttctgcaggactgctgctttcctgtgctgattgcagtatttctagtggatgatctagcacctttgtggctttgtcgtttagcctgtgcggcttcattaatttcacaagtttgatgccagttgaagcaccgaggtgaactgtgaggaaa

SEQ ID NO: 53294 - DNA, 533 bp, Zea mays
  unsure (1)..(533): unsure at all n locations
  Clone ID: MRT4577_148606C.1
tcgggttcgctcgccagcggcagccatggtgaagtactcgagggaaccgtccaatcccaccaaatccgctaaggctatgggtcgggacctgcgtgtgcactttaagaacacacgtgagaccgcttttgccatcaggaagctgcagttgagcaaggctaaaaggtatcttgaggatgtgattgcccacaagcaagccattcccttccgaaggtactgtggcggtgttggacgtacagcacaagctaagtcccgccactcgaatggtcagggacgttggcctgccaagtctgctaaattcattttggatcttctcaagaatgcagagagcaatgctgaagttaagggattggatgtcgatacgctgtatgtgtcgcatattcaggtgaaccaagctcagaagcagcggcgccggacttaccgtgctcatgggcgcatcaacccttacatgtgnttcccatgccacatttgagctgatgctntcaggagaaggaggagcctgtgaagaaaggaggctgagacccaaattgcaccca

SEQ ID NO: 53295 - DNA, 278 bp, Zea mays
  Clone ID: MRT4577_148607C.1
gaccgaaaaaaaaaataccttttcatttaaaggtttccaatttcctttataacatttaaccaccccactattattaggtccaaaaaaatatcccccaaaatatttccaaccaaccataaatatatttttagcttacacacctgatggggatgcccctcctgttgactccacgcttggataacggcttgagcagttcatacagaactatcccttctctcaaccggttactgaactacggtttgttgttgcactccttaattaatatctacatcttcttt

SEQ ID NO: 53296 - DNA, 868 bp, Zea mays
  unsure (1)..(868): unsure at all n locations
  Clone ID: MRT4577_148608C.1
gcttcctcacttaaaccgcacccctcgccgccggccgccgccacgccctcagcatggctcacctccgcctcctcctttcccactcccgctgccacccgcagccccatcgcctcctcccgctcttccgcttctccacctccaactccggcgaccccccaccgccgaccatcaagcccgtctcctacgccccgaagccgcaggccccacccgaggaggcctcctcgccggatgcccggagcgctagccccgggtggcaggactcgcctcccaggagatttgagcagcagccgccgaatccgccgcggcagtttacgcggcaagaggtgcggttcgtcaaggacgcggggcccgcgatcgcgccggtgtcgtacccgagcagggttgcgccgcttccggaagaccgtccagcggaagatggggctggggaaggggtgaatgagcaggatctgcgcggcgaggcggagcggattgagatgaatgctgagcgggcgaggagatccatcttcggcgtgccggtggaggaggagacggtgccgtacccatcgctgatacccgctgcgaagcggccgcagaaggtcgccattgatctcgtcgatgcactccgcgaaatcaagaccagtgcaaatgagaagaagcggaattttactgaaacagtggaagctcatgtgatgttaggcgttgatccacgtcgtggtgaccagatggtccgtggcgccataactttgccgcatggcactggcaagactgttagggtagcagtatttgcggaagggcctgcagcagaggaagctagagcagctggagcagatggtgntggtggtgacgagctgattgaggagattcgcaaaggaggagggcaactaagttt

SEQ ID NO: 53297 - DNA, 217 bp, Zea mays
  Clone ID: MRT4577_148609C.1
ccaacgcgtccgattggttttagaccggtcgggcgcggcctgcaattgcaagccggggaatccaaaaagccggcccggccgaagggtcaatcgttgtttccgccggttgcaagatcggagccagcagggacaggtcgtcggggaactagccttgctgaaccccggggaaaaaaagggaaaggtgaaaaaagggtggttggcggtccccttcgggccg

SEQ ID NO: 53298 - DNA, 428 bp, Zea mays
  Clone ID: MRT4577_14860C.1
gattcccggctgcggcccacgcgtccgggccacctcgcctactcccacaccaactaggcgctcctccgccccaggtcgttgctcgtccaaattcgaggtgtgctggctgttccagggggtgcttgacaacctgggtcgtcttagccagcatcactttctgttattcaagttcgctaactagtttcttttttttatctattccttcaattacttgcttctattattctcttttttcttttaatattctatttatttttatctttatttatttttaacttctttatttatttacttcttttttcttctattattttttttttatttattttttttttatattttcttttttttttttttttttattcttttttctttcttatttttttttcttttttttatttttttattcttttttttatctctatttt

SEQ ID NO: 53299 - DNA, 860 bp, Zea mays
  Clone ID: MRT4577_148610C.1
cccacgcgtccgcccgtcattaccaggtatgctattcccttgctgcccctcgctccctctcgctccggtcttccgtttgcgccgtctgcgttctccattcggtgagtactccagttcgtccgttcttggtccaggtgagcgcgaactcctacccttgtgcggctagggttcgtccgcttcccctcctctgccctctcctctctgccgctggtgttggatctgtgcttccctcctcgattccccctcctcccctctgcagtctcctgtcgggcgcgtcgccggagcagggtctgtgctccccgtcgcctggcctgttcgtcctctactccggcatcgcttccccgtggagtacccaaagattctcaaaccggcatggcaaacgccgccgagagatgtgctctgaaagcgagcgtggccgctaatggcgctcgtcgtgcggctacctctgcggcaaacgccgccgtggttgctggagacctatgtgctgcaacatctgtgggtaaccaatccactgtttccaccctagatgttctcataacagctacttgcgcggagactcgagctgaatcggcatggggtgaagctcgcctcgctgccttgctggccgaggaatccagggtttccaacttgcaggtttgctttgctttgtctgaattgtgttgtcaatgattggaatggtatgaatatcagttgttgccctatgatgcatcttgctagctgacttcatatgtagctgaggacgtttgcatcacaattgttgctgagggcgtttgcatcacttactctcggttaactgacttcatatgtgttcatggatcagttctgtttactaaatttataagtgctgtaaccgtgtgatg

SEQ ID NO: 53300 - DNA, 1453 bp, Zea mays
  Clone ID: MRT4577_148611C.1
gatcggggtgcaaatccttggctggggtcgcataccgcaccgagctcactccccctttcgccttcgtcccagatctcaagcccgccgcagagaacgacaggacccaaaccccaactccacaatgaggccgtcgctgatgagatccacctcccagctcctccgccgccggagctactcctccgcatccgggcagcccgagcggaaggtggccatcctcggggcggcggggggcatcgggcagccgctgtcgctgctcatgaagctcaacccactcgtctcctccctctcgctctacgatatcgccggcaccccaggtgtcgcggccgacgtctcccacatcaactcccccgccctggtgaagggtttcatgggtgatgagcagcttggggaagcgctagagggctcggacgtggtgatcataccggccggcgtcccgaggaagcccggcatgaccagggacgacctattcaatatcaacgctggcatcgttaagaacctcagcaccgccatcgccaagtactgccccaatgcccttgtcaacatgatcagcaaccctgtgaattcaactgtaccgattgctgctgaggttttcaagaaggctgggacatatgatgagaagaagttgtttggcgtgaccacccttgatgttgttcgtgctaagactttctatgctgggaaggctaatttaccagttaccgatgtgaatgtccctgttgttggtggtcatgcgggtatcactatcctgccgttgttctcacaggccacccctgcaaccaacgcattgtctgatgaagacatcaaggctctcaccaagaggacacaggatggtggaactgaagttgtcgaggcaaaggctgggaagggctctgcaaccttgtccatggcgtatgctggtgctgtttttgcagatgcatgcttgaagggtctcaatggagttccggatattgttgagtgctcttttgttcaatcaactgtaacagagcttccattctttgcatctaaggtaaggcttgggaagaatggagttgaggaagtgcttggattaggtgagctgtcggactttgagaaagaagggttggagaagctcaagagcgagctcaagtcttcgattgagaagggtatcaagtttgcaaatgataactagataaggccattttgcagattatagcagcaattgaaacctttagtagcaattgaaacctttagttgcgggatcttctgatttcattctacccttttctgtccctttttgtgagggagtggaaggtattacaataaaaaacctgatgggcaaagcttacaagagggatttattccagcaggcaggcacataacttatgtcaagttttgtactgaaccagtcgtatatgagctttctgctgccttttataatcgacggtgctgtcttgtgtgtgtattgcaagctgcgaccagggatagatttttttaactc

SEQ ID NO: 53301 - DNA, 870 bp, Zea mays
  Clone ID: MRT4577_148612C.1
aaaatgaaggtcaatgaggcaataatgatacaggttacattacatccaagcgtgattaaatataaggccttgttcggttgtttgggattggagtcccggattaattcctagccggattacttctctaatttaggccttgttcgtttgtgtcggattgcactcggaatcgtttcagctaatcaaagtttatataatttagagaaacaatctggttaggaatcgttccgacccaccaatccggcacaaacgaacaaggccttatatagatttttgatgagctagaatgaatcctggcttattccggtataaccgaacaggccctaaatgtccttgtcaggcttggagtttcacttaatatggaaagcatctctgcatactaaacaaaaaaaaaatcattgtattacaggatttctccgtgacaattgtatttaaacaggcttcccgttcaacttggggaaggggtcttgtttgctgaggacaaggaccttactcttgtgagcaaagtacccttttataaggttcttgtatataagacatgccatgatgcactccacctcatccacatccatgtcgatttcaagccatttcagagcttttacgacaacatctagcttaatctgatgtgccttagctggttccttctgtctctgaatgatgtggattttcttaactaatctctgatagacttgaagttcaagtttctccagtacaaggtagacgccagatttcaaaaattggtcttcgtgcctgtctagagcttgcctgagaagcctgagatctcctctcttaagtgcagtgacaacatctgcatactcaagcaaactataccgctccaaaagagtcctttttggcagtacacctattgaaagc

SEQ ID NO: 53302 - DNA, 265 bp, Zea mays
  Clone ID: MRT4577_148613C.1
gtgttttttttcctcatttttttaacaaaagcggggggggccggaatgaacggttacgggcagcttaaccagacggaactcaccgctggtccaaggaaaagcaaacgatgcgagcggcgccggctcataggcggctagagacagcttacgcagttaccccacgggctcacagttgcagcctgaggtgagcggtcctgggagagagagctggatgatagctgatctgcactgcacacccctgggttggtcggctttggattttatt

SEQ ID NO: 53303 - DNA, 254 bp, Zea mays
  Clone ID: MRT4577_148614C.1
gattttctaacaacagctagttcatttttgaactaaatcgtgacaaaaaaaagaacggatagagtactatttatggtctgggtactgatagcagtagcaccattcttttgtgccctgttactcaatggggttgagtggttgacatgtttagagaaaaaaaacaaggctaatttgtatactcacataaacatctgtagagtatttcgcgtagtacttttaagtggtaagtgacactgtgacaatgtgcaatttac

SEQ ID NO: 53304 - DNA, 299 bp, Zea mays
  unsure (1)..(299): unsure at all n locations
  Clone ID: MRT4577_148615C.1
ngttggttcattcattncagtgcacgcgtactgcagctaacggttcgtctcgagcgctcaacagcaggctgcagatctcaccatcattcacgcaacttcatctactatccgcctccagctgcacccatcgagcaccgaactgcggcggcatgattgcttgcggcgaggaggtcgcgactagcggggggatctccgcgaagaccaccctgtgggaggagttcgaggtccagatcgtcgccttcgaccgccactccaacctcctagttatccaggagggcgtggatagcgcggagaggggg

SEQ ID NO: 53305 - DNA, 2319 bp, Zea mays
  Clone ID: MRT4577_148616C.1
cggacgcgtgggagagaacttaaaaactttgtttgactttgtgtgcaagggaataaatgcattggagtacaaggagcatttgcactatgatgtggtcaagagtgccgacccagaactgaagaaagcaacaattcaaataaatgtctataagcaacatcgtcagacaatccagctgcggccattccattgccaattgttaagtccatgcttggtccataccttgttttcctctcttccactgtcaatgggtatgaaggtacaggtcgatcattgtctctgaagcttctccagcaactagaatcccaaagccagccatcccacgagtctaatggagcttattccagtaggctctttaagaaaattgaattgaacgaatctattagatatgcctctggtgaccctgttgagacctggcttaatgacctactttgtttggatcttgcaaactccattccaaatatcagcaggctacctcacccaaaagaatgtgatctgtattatgtcaaccgggacacacttttctcatatcacaaggagagcgagatatttttacagcggatgatggcactttatgttgcttcccactacaaaaattcgcctaatgacatgcaattaatggcagatgcaccagcacatcatttgtttgtattgcttggccctgttgatgaatccaaaaaccagctccctgatatcctgtgtgtaatccaggtttgtttggaaggacaaatctctcgaaagtcagctatgaaaagccccactgatccgcgttcaccttccggtgatcaaataccatggaaattttgtgaacagttccaagacaatgtatttccaagtctctcaggagctcgtatagtgcgaattgctgtccatcctagcgccttgaggcttgggtatggctcagctgccattggccttctatctcggtactatgaagggcaaatgagaagattatttgatgacgatgaggaggaaacggaagagcctgatgtgaagattactgaagctgcagagaaggcttcactgctagaagagaccataaaacctagggcaaatcttccaccactccttgttcatcttcatgaacgtcgtcctgagaagctccattatcttggtgtatcttttggactgacccaagagcttttccgcttttggcggaagcacaacttctacccgttctatgtcggccagattccaagtgctgttactggtgagcatacctgtatggtgttgagacccttaaacagtgatgacatcgaagttagtgagtcaaacaaacatggatttttggatccgttttaccaagatttcagacaaagattcaggcggcttttgggaacttctttccggcatcttaattttaagcttgcaatgagtgtcttggcttcgaagattgattactcaaaccatgagccttcagaatacgataataatagcacttcaaagttattggaagacatgctatcaccacatgacatgaaacgactagaggcgtattcaaacaatttagtcgattatcatctgattctggatcttgtacccatccttgcacatcagtatttttcagagaggcttccagtgtcattacatggtgcccaagcagctgttttgttttgtctaggcctgcaggacaaagacataggcactgtgaaggaagagctcgggatagaaagggaacaggttctatcgaacttcataaagacaatgaagaagctgtatggttaccttcataacattgcagggaaaaaaatcgaaacaaccttacctcgactgaaagagattgaaatgccccctcttagcaaatcgatggatgaggaccttgcagaagcagccaaggaagtagaggaacagagaagagccgcaaatgaagctcctgtggacccaaagattctgcagaagtatgcaattggtgacgacaatgagatcgacaaggccctgcagaacaccaaggtgtctgcaagcggcattatcagtgtgaagtccaacagaacaaagacagacaagaaagataagcacaaggaaacaggcaaatcgaaaaggaaaggaacagacggtggcagatccgagttgaaaaagaagaggtcttaaggtatttcccttaaattgggtctgccacacagctgacctcccttttgagctctggtccagcgaggagtaccatcgtcagatgggttgaacgaccatgccaattcctgagcgagttctagtgtctatgtctctggtcgctgttccacagattttgttgtaacatttatttgatataatatatactttatccatgaaaaaaaaaaaaaaaaaaaaaaaaaaaaaaaaaaaaaactc

SEQ ID NO: 53306 - DNA, 1674 bp, Zea mays
  unsure (1)..(1674): unsure at all n locations
  Clone ID: MRT4577_148617C.1
gctccaaaccgactttgtatcgtagtggttaaagacttagactgctcttggtgagatcttgaggtcgattcctcgaatcgcattgaatttactgcgtttttaaaaaaaaaaaaaaaaaaaaaaaaaaccattggcctcgagccggccgggccctctcttcttccccaccacctcctactccgctgcaaccccaaatctctccttcctcgcatacgcgcgcagcagaggagctgagaccaacgaagaagaagaagaacaaccgagcaagcacaagcttagctagcgtggaggtgtccaaggcgacgacggccgccgcgccaggctagccaaccagctgctcatcgctcctagctgcggagccgatggctggagccgacgtcgacgtcgggacggagctccgcctcggcctgccgggaggaggcgccgatgcggccaaggctgccaagaggggcttcgaggacaccatcgacctcaagctgaagctgcccaccgccggcatggaggaagctgccgctgccgccgccgccaagccggagccggccgccgagaaggccaagaggcccgccgaggcgccggccgctgatgccgagaagccacccgcacccaaggcacaagctgtgggttggccaccagtccggtcataccgcaggaacgtcatgaccgtccagtctgtgaagagcaagaaggaagaggagcctgagaagcagcagtccgctgccaacgccggcggcaacggctccgccttcgtgaaggtcagcatggacggcgcgccctacctgcgcaaggtggacctgaagatgtacaacagctacacggagctctccgttgctctgaagaagatgttcagcaccttcaccacatccgggaacaacatgaatgagggaaaactggttgatccggtcagcggtgctgatgtggtcactacttacgaagacaaggatggcgactggatgctcgttggcgacgtcccgtgggagatgtttgtcgagtcatgcaggcgtctgaggatcatgaagagttctgaagccataggtcttgcaccaagaacgaaggacaagtgcaagaacaggagctgaagaagatacagcgttaaagatgttgcccattgtgtcaaaagaatggtgcccttgcagtgtgctgcggtttttctagaaatataatgcgttttaattactagttggagggagacctgtcttgttcaatttgttcatggaccagaagcaataatctatctgtgtgtagctggattggtgttatgcgatgtcccctaccgtgtgtcccagaatctacttggtgattttatcccagtgttgttaatcaagcttgtgtgattgttaagtaaagggcatcaatgagactattattattatggtaccttgtaagttaacctgtttgttaattgtcattataatatttgacaaaaaaaaaaaaaaaaaaaggcccctgccaaaaaaaaaaaaaaaaaaaaatcgagggggtttcttgttcaatttgttcatggaccagaagcaataatctacctgtgtgaagctggattggtgttatncgatgtcccctcccgtgtgtcccagaatctacttggtgattttaccccagtgttgttaatcaagcttgtgtgattgttaagtaaagggcatcaatgagactattattattaaaaaaaaaaaaanaaaa

SEQ ID NO: 53307 - DNA, 167 bp, Zea mays
  Clone ID: MRT4577_148618C.1
atgacaccgagactttcgtaccaaacccggattactacaggcaagcctatgtaccaaatatgccactacaaacttgatttgctacctccatatgcaatggcactaaaccacggtatatattcagtgccttgttgtggcatcagctcatggggacaggagttctttct

SEQ ID NO: 53308 - DNA, 617 bp, Zea mays
  unsure (1)..(617): unsure at all n locations
  Clone ID: MRT4577_148619C.1
tcggtgacagnagcagtagtggacgacccgatgcagatcccgaggaccatgatggagggatggcacccacagcagatcgacgagctccctgaatccttctccggtggatgggttgggttcttttcctatgatacggttaggtatgttgagaagaagaagctaccgttctccagtgctcctgaggacgataggaaccttcctgatgtgcacttgggactctatgatgatgttctagtcttcgataatgttgagaaggctaaggaacatattatggctggggatatcttccagattgttttaagccagaggttcgagagacgaacatatgccaacccatttgaggtttatcgagcattacggattgtgaatcctagcccatacatggcgtatgtacaggcaagaggctgtgtattggttgcgtctagtcctgaaattcttacacgagtcagtnaggggaagattattaatcgaccacttgctggaactgttcgaaggggcangacagagaaggaagatcaaatgcaagagcaacaactgttaagtgatgaaaaaaagtgtgccgagcacataatgcttgtggacttgggaaggaatgatgttggcaggtttccaaacca

SEQ ID NO: 53309 - DNA, 442 bp, Zea mays
  unsure (1)..(442): unsure at all n locations
  Clone ID: MRT4577_14861C.1
tggtcccaaataaaagttggatagtactaaatagcagtcttcaagttcaacacaaacaagcataataagctaaaaggcaacataagtagtttttgatactctcatctctcaatgaagtctcaaactctcaatatccatcatcaaactcatcgacaatgagatcaacattgncttctctgccttcttccccaccattagcttcatcagcatcactcacatctatgtcatcatgtggatcaaccccaatgtcatcatcactagaatcatgtgcttcttcttcttcaacttcttgngtcctcattcttgcacgccttgtgtaggtttgtgtctgtctagcttgccttggaaggntgcgcccttgaagtgactctgatgctccagtagcaatatcaacatgatcccatgttaaagcattaatatcattattatcgctgccaggatg

SEQ ID NO: 53310 - DNA, 243 bp, Zea mays
  unsure (1)..(243): unsure at all n locations
  Clone ID: MRT4577_148620C.1
aattcccgggacgttgagctcatctagggacacctgcgttgtcttgttgttgttgtgncttggccttttgttgccttggtgacaatgtttgccgcccggttccgccccgctatgtgtggcctgccggtacttggtggggtggtttcgttgtttccgtccactttatctgttgcctatcatttccttagtggatatttacttgcgccgttagtgttcgatatattcaacaccttctgaattcat

SEQ ID NO: 53311 - DNA, 881 bp, Zea mays
  Clone ID: MRT4577_148621C.1
ccggccggcgacacgactctcggcaacggatatctcggctctcgcatcgatgaagaacgtagcaaaatgcgatacctggtgtgaattgcagaatcccgcgaaccatcgagtttttgaacgcaagttgcgcccgaagccttctggcggagggcacgtctgcctgggcgtcacgcaacaagctggtggagtagctagcaactcgagggatgaattgaagactagatgataggcttctccttctgatgtgccaccgataaaactgcagctagctagcaccttgttgccaagcaatgcaagatctctctgctgagatcgatctgaatacctaaaatatctatccggccggtcatcagctcgatcttaagcaggataacaagatggcagaaacattcgacgtggtttcagtgcacggccgtcagttcaaaatggcgaccttcgccttctacgcaaacaaaactatcaccaaagcttcgcacacaagcttgcatggccacagtaccatcctagcctatgaaccggtgttatcctaattgagcttttcttttcgtcaaaacatcctcgacccctcttccctagaggttggctcttacctccgtttttctggtttctcgtgccagaattaacgttcttgaccttgtaaggccctccttctatgtctacatccttctcgcatctgatgtttctttctttcttgctacatgcgggatcagtctcatcattgccatgtttcccagactcccgcgtctacctactttctgctccattctatccctcctgagctagttgttgatcccatgtaataataaccatgtttggttgatataaaaaaatgttagtttttttttggtggcgttgaaaaaaaaaaaaaaaaaaagcggccc

SEQ ID NO: 53312 - DNA, 1665 bp, Zea mays
  Clone ID: MRT4577_148622C.1
cggacgcgtgggcgaactgctgctgaagcatccactctatcttaggcctgacgtgaattctggcatcgaaggacagttttcttcacttattgaatctacagttgctaaactcagagatcctcatgtatattatttagttgaggggccaattacatctagtcaatcacatcgttctattatcttgcgtggcgatgatttaagctttgattcacatacacatggaaactcaagaacagacagttgtaccacaagtattgtaacttgttcagaattcttcacagaaaagaggtatgacctctcattgacaagagagactgcagatgcaattgcaataactgtcaaccaatcagcgcctagcttgaagcctggcggtacccctgtggtagagtattttcctgcctcagcacctgccagcctcatagtaatcaccttgaagcttgacatactatgctactcatcaatagactttccagtggcggctgctgtatctgaacttgttattccaggattagcagatcagatgattgtaatgaagagaattattgcttcagagataactcaacaagcacagcttcaaccattccattttattccttctggttggcatgttccagtaacagctatatacaatacaagatatggtgagactgaggagagctggattgttttgcgaaaatacctgcatttaaggctaggacttcccttagatcggcctttgttgcgaatttctaatgcattgactttcggtggcatgggaaggaggaagaaaagcatgccaagaagtggttcttcgctgcttcgagacatccacagagaacttccatctagtggtgtatccggaggtgttatgtctttgattgatggttcatatgagtattatcattatcttcacgatggtattgatgacaatggatggggatgcgcatatcggtctctacaaacaattgtctcttggtacagattgcaacaatattcatcaatagatgttccttctcacagggagattcagcaagttcttgttgaaattggtgacaaggatccatcatttattggatcttgtgagtggatcggagccattgagttaagctttgtcctcgacaaactgctgggcgtgagttgtaaggttatcaatgtgaggtctggcgatgagcttcctgaaaagtgcagagaacttgccaggcattttgaaacccagggaactcctgtgatgattggtggtggagtcttggcttacacccttttgggagttgattataacggagccagtggagactgtgcatttcttatccttgatccgcactacactggtactgacgatctcaaaaagattgtaaatggcggatggtgcggatggaagaagtctgtcgacagcaaaggccgaagcttcttcttgaaagacaagttctacaaccttctactaccccaaaggccaaacatggtgtgaaacctatattgttcaatatgttaatagtgcagacgtgcaggttcacgaggcacagatatttatgcttgtgatagaggtttatggttgcgatagcagaagttatgatttgtaaaaaaaatttagtgagacattatattgtttttttaataaatttgtagtgagtaaattaaattaaattaacgaaaaaaagtaaaaaaagaaaaaaaaaaaaaaaactcgag

SEQ ID NO: 53313 - DNA, 1372 bp, Zea mays
  Clone ID: MRT4577_148623C.1
gggtacctcgaagccggccgggaaaaaacatctgcaaatgttataggcttgtctacaaattgacaaggattcagtagcaatgctttgctagctggttttaacaaaaaaaaaaaaaaaaaaaaaaaaaaaaaaaaaaaaaaaaaaaaaaaaaaaaaaaaaaatttcatggctggcttgccagttctagttttacgggggccatgaagctctctcctaataaagataaatttatggaggtcattaggggaactggggatatcaatgcagatatggagaaattttgcacaaccttctctccttttctcaaaaaaaatcacgagtttctggcgagcgttggtcttgatgatatgaaggcttcgtaaagcgatctccaagggggtgagacgagagacgccctaccgtcgattccatatcgtcgctccgatattctgatgccggaatcctgcttttccggctagcttaccgatacctcctaggtggtttccagtccgcacccttccaacctctactatctttttttgtgaatttacctccaccgaattcgggcagctcaccatttcttggagtttggtgtcctttctcgagtgtttccttcctccctcccgggttctactgctgagtggcatctttcttgtgcaacttgtccgttgaccacaggcggagaaatttgttctcggcacacattctctgccacaatggacgatggagctgacctcccctgccaactgctcttctcccacccggagatgcctgacagcttcgacgagttcttcaacagcgccacgacgacctgcacccacacgcacagctgcaacccgcccggcccctcggtcgccatgcacacccacacgtgcctgcacgcgcacaccctggtcctgggcagcggtggggaggacgacgacgacgccagggaggactcggcgaagccgcgcagaccgctggggaacagggaagctgtgcgcaagtaccgggagaagaagaaggcgcacgcggcctttctggaagaggaggtcaagaagctccgcgccgccaaccagcagctccagaggcggctgcagggtcatgcagctttggaggcggaggtggcgaggctccggagtctcctgctcgatatccggggcaagatcgacgccgaggtcggcggcgtgctcccgtttcagaagccgtgcagtgtgggctccgtggcgtgtgccgatcctgctctgtgcttaacggcacgagttggaggcgctaggaggctccagcggaaattgatgtcccaaaaggcttgcgtcattccatggatgttgttgcgagcttcgtgagttctgatcccctggctgaatgagcgcgtttgcctgattggcagtttttttttttttggggcctctgc

SEQ ID NO: 53314 - DNA, 303 bp, Zea mays
  Clone ID: MRT4577_148624C.1
acccgacgacgacctggtccgcctccgcgtgctttccaaaaaggcagccgccttcatcggcgctccaggcccaccacggttggccgctagccgtgccagccccccacagcctgacaacgacagggagcgctcctacgctggcgcctccgacagctcccacacccaacgcgcaagccgtgaagcgtcccgggagaccctgccatgtcccgactacggagccaccccaagaaaagacgccatccgctgccccctcatagaacccgactcgcttcaaatcctcgccaaccacacccgaagagctga

SEQ ID NO: 53315 - DNA, 2010 bp, Zea mays
  Clone ID: MRT4577_148625C.1
cggacgcgtgggcgaactgctgctgaagcatccactctatcttaggcctgacgtgaattctggcatcgaaggacagttttcttcacttattgaatctacagttgctaaactcagagatcctcatgtatattatttagttgaggggccaattacatctagtcaatcacatcgttctattatcttgcgtggcgatgatttaagctttgattcacatacacatggaaactcaagaacagacagttgtaccacaagtattgtaacttgttcagaattcttcacagaaaagaagtatgacctctcatacaatttctgtttgctagactgcagatgcaattgcaataactgtcaaccaatcagcgcctagcttgaagcctggcgttacccctgtggtagagtattttcctggtacgtggaaatcatcaaaccacctcatttgttgtgtcccgcaacgcacgtacccagacctgtggacaggacgcctcggaccagccagcggtcatggccatgcacctgccagcctcatagtaatcaccttgaagcttgacatactatgctactcatcaatagactttccagtggcggctgctgtatctgaacttgttattccaggattagcagatcagatgattgtaatgaagagaattattgcttcagagataactcaacaagcacagcttcaaccattccattttattccttctggttggcatgttccagtaacagctatatacaatacaagatatggtgagactgaggagaggcaaagtgagctgcgaaaagaactgcatttaaggctaggacttcccttagatcggcctttgttgcgaatttctaatgcattgactttcggtggcatgggaaggaggaagaaaagcatgccaagaagtggttcttcgctgcttcgagacatccacagagaacttccatctagtggtgtatccggaggtgttatgtctttgattgatggttcatatgagtattatcattatcttcacgatggtattgatgacaatggatggggatgcgcatatcggtctctacaaacaattgtctcttggtacagattgcaacaatattcatcaatagatgttccttctcacagggagattcagcaagttcttgttgaaattggtgacaaggatccatcatttattggatcttgtgagtggatcggagccattgagttaagctttgtcctcgacaaactgctgggcgtgagttgtaaggttatcaatgtgaggtctggcgatgagcttcctgaaaagtgcagagaacttgccaggcattttgaaacccagggaactcctgtgatgattggtggtggagtcttggcttacacccttttgggagttgattataacgaagccagtggagactgtgcatttcttatccttgatccgcactacactggtactgacgatctcaaaaagattgtaaatggcggatggtgcggatggaagaagtctgtcgacagcaaaggccgaagcttcttcttgaaagacaagttctacaaccttctactaccccaaaggccaaacatggtgtgaaacctatggtgttcaatatgttaatagtgcagacgtgcaggttcacgaggcacacatatttatgcttgtgatagaggtttatggttgcaatagcagaagttatgatttgtaaaaaaaaattagtgagacattatattgttttttttttataaatttgtagtgagtaaattaaattaaattaacgaatttgagagttttacaggcaaaaattcaatatggtaatagtgcaaacgtgcaggttcccgaggcacagatatttatgcttgtgatagaggtttatggttgcgatacagaagttatgatttgtaaaaaaaatttagtgagacattatattgtttttttaataaatttgtagtgagtaaattaaattaaattaacgaatgagaattttacaggcataacactaaaagcagacgttttgcttgagacgtcatgcttaacatgtggagtctgtgtatttggt

SEQ ID NO: 53316 - DNA, 2547 bp, Zea mays
  Clone ID: MRT4577_148626C.1
gccggccggtaactcggcagtttactagttgacgcccataatgacccattctaccgtcatatacatacaccgttggcacgccatctaatcagcgaagaggagacgacgactgctctgcctttcttccctacaggaacaggacgaatcaatcaatcattcccctctgcagccgccggccctcagcaagcaagcaagggacagacgcggcggggatgggcagcggggtccgggcgctgatgcgccggaagcaggtagactccgagcggacgcgcgccgccggcagcgcccaccagctccgcaaggagctctccgtcacccagctcgtcgccatcggtgttgggtcgacgattggagctggcgtctacgtccttgttggcacagttgcgcgggagcattccgggccggcattgacgctttcatttctgatagccggaatagcagctgcgctttcagccttctgctatgcggagctggctagccgttgcccttcggcaggaagcgcctatcattattcgtacatctgcgttggcgaaggagttgcatggttgattggctgggctttgatacttgaatacacgattggtggatcagccgttgcccgtggcatttctcctaatctagccttattttttggaggacaggatagtctgccatggattttagcacgacatgagatcccatggcttgatgtcgttgtagatccttgtgcttctttcctcgttttcgtcgtcactggccttctctgtgtggggataaaagagagttcatttgtgcaaggagttgtgacggtcttaaattgctttgtgatgttatttgttatcatagccggtagctacatcggcttccaaacaggatgggttggctacaaggttgctggcggatttttcccttatggagcgaatggaatgcttgccgggtcagcaactgtcttcttcgcctacataggatttgattcagttgccagcacggctgaggaggtgaaaaatccacaacgagatctgccactgggaatcggaacagcattgtcgatttgctgttccttgtacatgttggtttcagttgttattgttggtctggtaccatactttgctatggacccagacacccctatttcatctgcttttgccaaacatgggatgcactgggcaatgtatcttgtaacaactggtgctgttcttgctctctgctcaaccttgatgggatctatattgccacagccaagaatattgatggccatggcacgagatggcctgctaccatcattcttctctgatgtccataagacgacacaagttccagtcaaaagcacagtagtgactggcatctgtgcagctgctcttgctttcttcatggatgtctctcaactggctggaatggttagtgtaggcacgctactcgcgttcactatagttgctgtgtccatcttgattcttagatacgttcctccagatgaggtacccctcccatcttccctgcaagcatcattccgcttgagccaagaaaatgacgaggaaaagctgaggggtacccttggagatgatgatcatgagcaaggctcagctgaaataagtgatgttgtagtagaaccaatcactgaccccctgatcgagaagcagctatacgcaagcaatttgagtgaggcaaaacggcgtaagaccgcggcatgcagcatcacatctgtttgcataggggttctgatcctcacgacgtcagcctcggcaacattcttgcccttcccggtgagatgctccgtttgtgttttgggtggcatgctcctcctagctggtctgggcatgctctgctggattgaccaagatgatgggaggcactcctttggccactccggaggattcatctgtccgtttgttcccttgctgccggtaatgtgtatcctcataaatacatacttgttaataaatcttggtggcggcacgtggatgcgagtgggggtgtggctagtgatgggggtgttcgtctacattttctatggccgcacccacagctcgttgacggatgtcgtgtatgtccctgtggccgaggcgaatgagatatacgggtcatcctcttcgttagggtttgtggcgtaaagagagatggaaggagatgtttgttgaagcctatcttgagccagtcatggtacttctcacaaaaacctcaaagatcctgactggagcaggtacctgcttgagctattgtgttgcaggcatgggtttgaagaattcaatttgtacgtcatatttttaaaatgtgtaaattgtaacgcacggctaagcttgtgtgtctctgttggaggaatgtaaatattagtatattgcatagaactatatataggtggtgccaatatacaggtgtttaaaaaaaagggggggggtcattctaggaatctgtatgttttactacgaacttgttctaaattcctaggaattcaaacaggcatgtctgaggcgtattatgtggttaaggcctcaaaggtccaaacacattttatttcatgttgaaatgaagattacacgagcagaaatgctcacggaaaaaaaaaaaaaaaaa

SEQ ID NO: 53317 - DNA, 857 bp, Zea mays
  Clone ID: MRT4577_148627C.1
gccggcggccgtccgatcttcacaccgcagccgctcgctcccctcttctcctggtcctcgtgcgcgcgcgcgagacagagagaggcgagtggcaatggcgagctctggcagctgccactcgctcctctcttcagcctcaccaatctcgcctgcgctcttctcgcgacaccgagcggccgccgtcggtggaggagccagccgggcgagtaaagtgcaatcgcaggtcaggtgtcttgctagagatgaggattcgaaggggtgcgcaaacgtttccaaggccgagactaatgaagaaaaagaaactacgccttcatcaagacgaagatgtctggtctgtctcggcgctgttaccttgatcagcgcgacaggaccaccaaacggactcgctgcggatgcgatgaacaaggccggggtacagaaagctgtttgcaggaactgtaatggcagtggtgctgtgatatgcgacatgtgtggtggcacagggaaatggaaggccctcaatcggaagagggcgaaagatgtttatgaattcaccgagtgcccgaattgctacggccgcggaaagttggtgtgccctgtctgtctcggaactggcctgccaaacaacaaggggctcctgcgacgcccagaagccaagcagctgctcgacaagatgtataacggcaagatactgccgaggtcgtagagcactctttaccacgcccaggattttgttgagtcgtcgagtaggaatgacgctcggatcgatgtagccctagtagagtgtaaaattgctgttagccgttcaagaaagattttttacacatacatgaaatgaacctttttttttccaaaaaaaaaaaaaaaaaacggacgcc

SEQ ID NO: 53318 - DNA, 759 bp, Zea mays
  unsure (1)..(759): unsure at all n locations
  Clone ID: MRT4577_148628C.1
cggcacggggcatcgatgaataagtancaaatgcgatacctggtgtgaattgcagaatcccgcgaaccatcgagtttttgaacgcaagttgcgcccgaagccttctggcggagggcacgtctgcctgggcgtcacgcgacacgaccgtcggcaatccccttctcggctctcaccgcccaccactgatcggatcacgtcggcgtcccatctcctcctccacgacacagaacgccgctccctttccgggattctcctctccaatcgcagctaaaacgcaacgcactggatcggacgtcgccaaaaagatcggtggcgacaccataaagaaagaatccgagaaaaggcgaaaggggaggagagaaaggggaggcatctttcttgtgcgacttgtccgttgaccacaggcggagaaatttgttctcggcacacattctctgccacaatggacgatggagctgacctcccctgccaactgctcttctcccacccggagatgcctgacagcttcgacgagttcttcaacagcgccacgacgacctgcacccacacgcacagctgcaacccgcccggcccctcggtcgccatgcacacccacacgtgcctgcacgcgcacaccctggttctgggcagcgggggggaggacgacgacgacgccagggaggactcggtgaagccgcccagaccgctggggaacagggaagctgtgcgcaagcaccggcagaagaagaaggagcacgccgccctttctggaagaggggg

SEQ ID NO: 53319 - DNA, 683 bp, Zea mays
  Clone ID: MRT4577_148629C.1
tcgaggctggccggggctacatttttactgtagagtagtgagaagaagagtgtcatgtaagttatagagtagaaacaagttctactaatgcataaaaccatttctcaccatctaccccatgaatttgagataggcttatatttaaactctggaaagtggtggaatgtcaaattccaaactaaataagttactttattgagtgaattccaattcctctaaaataaagagatccaagcgccccgtaaaagaaattagtttattcatttgggaaaataagaatcccttggaaaaaaatagttgccatagtagcccttaagggttagtttgacaacctcattttccaagagattttcattttctaaaattagttcatttttacttgaaaaatgagaatcctttggaaaaatggagttaccaaactagcctaataaaatttatttatatgaccaggtgaaggccatggagttgattgataagttggaagttacgaggcgaggaccatatagtggtggtctaggaggaatatcgtttgatggtgacatgcaaattgcactttctctccgcaccatcgtattctcaacagcgccgagccacaacacgatgtactcatacaaagacgcagataggcgtcgggagtgggtcgctcatcttcaggctggtgcaggcattgttgccgacagtag

SEQ ID NO: 53320 - DNA, 535 bp, Zea mays
  Clone ID: MRT4577_14862C.1
aaaaaaaaataagaatacccggccacgaccgacagttattgggggggggcggccggtagcttacacaatcgaccactggtacaataaagggggggtagattatggggaaagaggaggcctgaaaattttattctcctttttccagagagcctcccgtttttgatccttttccagtccctttcaccaaaagcgtacgtactccgccgcagctacgggggggcgggggtcacctacccccctgctgcggctgcgggtggggcgcgacccgcgttcgccgagcaacgtccgggggcattttttgcaggtcctctagcgtgtccggcttctcgtttttcacgttatccatcatcaccagcatttcctgcatgaagtcggagaaatcctggtcgtcgtcgtttaggggatcgaagagcccggcgtcgtacatggccttcttccccttgtccgataaaactgagtaggcctcctggatccgctggaaccgccgcttggcctcgccggccgcgccgggatcgctggcccccggtccgggtgc

SEQ ID NO: 53321 - DNA, 2596 bp, Zea mays
  Clone ID: MRT4577_148630C.1
atttttacttgaaaaatgagaatcctttggaaaaatggagttaccaaactagactaataaaatttatttatgtgaccattgggtacctcgattcgggacgggactccccagtcccccttcaccgtaccgagacccaaaccaagccgcctcgccagcacccagcagcccgcatcactcgtctccattaaaatcggttttctccttggaaatctgctggcgagtcccaggacccgaatgccccactcttattacctgctaattttgaatttcctaatcgggttgcagctgcttatataagctcactaaccccgcattcgcttttccgactcccacctccagccaaatcgggctatagatcaaacgctgcactgtagggagcgtgaagccagcggcgaatggaatccctagccgccacctccgtgttcgcgccctcccgcgtcgccgtcccggcggcgcgggccctggttagggcggggacggtggtaccaaccaggcggacgagcagccggagcggaaccagcggggtgaaatgctctgctgccgtgacgccgcaggcgagcccagtgattagcaggagcgctgcggcggcgaaggcggcggaggaggacaagaggcggttcttcgaggcggcggcgcgggggagcgggaaggggaacctggtgcccatgtgggagtgcatcgtgtcggaccatctcacccccgtgctcgcctaccgctgcctcgtccccgaggacaacgtcgacgcccccagcttcctcttcgagtccgtcgagcaggggccccagggcaccaccaacgtcggccgctacagcatggtgggagcccacccagtgatggagattgtggccaaagaccacaaggttacgatcatggaccacgagaagagccaagtgacagagcaggtagtggacgacccgatgcagatcccgaggaccatgatggagggatggcacccacagcagatcgacgagctccctgaatccttctccggtggatgggttgggttcttttcctatgatacggttaggtatgttgagaagaagaagctaccgttctccagtgctcctcaggacgataggaaccttcctgatgtgcacttgggactctatgatgatgttctagtcttcgataatgttgagaagaaagtatatgttatccattgggtcaatgtggaccggcatgcatctgttgaggaagcataccaagatggcaggtcccgactaaacatgttgctatctaaagtgcacaattccaatgtccccacactctctcctggatttgtgaagctgcacacacgcaagtttggtacacctttgaacaagtcgaccatgacaagtgatgagtataagaatgctgttctgcaggctaaggaacatattatggctggggatatcttccagattgttttaagccagaggttcgagagacgaacatatgccaacccatttgaggtttatcgagcattacggattgtgaatcctagcccatacatggcgtatgtacaggcaagaggctgtgtattggttgcgtctagtcctgaaattcttacacgagtcagtaaggggaagattattaatcgaccacttgctggaactgttcgaaggggcaagacagagaaggaagatcaaatgcaagagcaacaactgttaagtgatgaaaaacagtgtgccgagcacataatgcttgtggacttgggaaggaatgatgttggcaaggtatccaaaccaggatcagtgaaggtggagaagttgatgaacattgagagatactcccatgttatgcacatcagctcaacggttagtggacagttggatgatcatctccagagttgggatgccttgagagctgccttgcccgttggaacagtcagtggtgcaccaaaggtgaaggccatggagttgattgataagttggaagttacgaggcgaggaccatatagtggtggtctaggaggaatatcgtttgatggtgacatgcaaattgcactttctctccgcaccatcgtattctcaacagcgccgagccacaacacgatgtactcatacaaagacgcagataggcgtcgggagtgggtcgctcatcttcaggctggtgcaggcattgttgccgacagtagcccagatgacgaacaacgtgaatgcgagaataaggctgctgcactagctcgggccatcgatcttgcagagtcagcttttgtagacaaagaatagtgtgctatggttatcgtttagttcttgttcatgtttcttttacccactttccgttaaaaaaagatgtcattagtgggtggagaaaagcaataagactgttctctagagaaccgaagaaatatggaaattgaggttatggcttatgactgtcgtttgttcagtatgaaactagatttccaactgtgccttagaagtttgcaaatgtcttgttatataagggccggctcagtagactagtcatgtcttttaatacaactcatgtggtcctctttgttgcatattatattgcatagttatatgttagtgataaaaaaaaaaaaaaaaaaactcgacaaaaaaaaaaaaaaaaaaaaaaaaaaaatataaagggcgcccgcgctatagag

SEQ ID NO: 53322 - DNA, 2843 bp, Zea mays
  Clone ID: MRT4577_148631C.1
gttaccgaccacgacaactatctggccagcggcttacactcgataccttctagctaggccgctgccacgtcaaaactagctcctccagacaacatctcagctagccgaagccggtccattagcatgcagcagcagcagcagcgctagtacgagtagacgtcgtctccgggtctccactctccacacagaaatccgcatccagaatcaccggagatacgagtccgcgcgtacgttgcagttgaattgtgaagagaggctgtgcgcactgctgctgctgcttcttcttcttcttcttcgacgcgtgcgtacgtgcacatggatgctgctgacctcccgtgatcttcgatctctccacacggcggcaagcgatcgatcgagaggcgtggtcccgtggcgtccaccgacacctagctgctgctgctagctcatcgatctgcttgatctctagctgagactactccgagcaaaaatgcagcagccaggaacaacaagctaggccccctcacgcagaccgcacgaccgagcgcgcggcattgaccgacccatcgccgccgtcttgccgcctcgatcgaccatgacgcttgcgagcacggacaaggtggtgctgggatgcatcgcgttcagcatcttctgggtgctggccgtcttcccctcggtgccgttcatgccggtgggccgcaccgcgggctcgctcctgggcgccatgctcatggtgctcttccgcgtgatgacccccgaggaggcctacaaggccatcgacctcccgatcctgggcctcctcttcggcaccatggtggtcagcatcttcctggagcgcgccgacatgttcaagtacctcggcagcgcgctggcgtggcggagccggggcagcaaggacctgctgttccgcgtctgcctcgtgtccgccgtggccagcgcgctcttcaccaacgacacctgctgcgtggtgctcaccgagttcatcctcaagctggcgcggcagaacaacctgcccccgcagccgttcctgctggccctcgcctccagctccaacatcggctcctccgccacgcccatcggcaacccgcagaacctcgtcatcgccgtgcagagcggcatcaccttcggccagttcctcgtcggcgtcttcccggccatgatcgtcggcgtcgccgccaacacctgcatcctgctctgctacttctggaggtgcctctccgcgccggagaaggaccaggagggcggcgccgccgccgcggggcccgacgtcgccgtcgtggccgacgaggaggtcacctcgcacaggttcacgccggcgcggatgtcgcgcgcctcgtccgtcaacgggggcggcgccgacgccgactgcgtcggcgagctcatccgccggagcgatagcctcagccgggccgacactacgctaggcatgagcatgaggagccggagctacaactcggagggcggcgacatccaggtcgccatcaggtccatgcgcgcgtccagcatgtcgcaggagatggtggaggtgtccaccgtctgcgacaggcgcgacgacggcggtgccgggcccagaaaggtcaccaggaccaccagccaccagcgcagcgtcatcatcgaggacgcgcccgaggctgacgccgccgacgacgacgacgatggccacaagggcaaggacggtgacagcgtcaccaacaaggagaagaggtggaaggtgctcgtgtggaagactgccgtgtatctcaccacccttgggatgctggccgcgctcctcatggggctcaacatgtcctggtccgccatcactgctgctcttgtccttctcgcgcttgatttcactgacgcacaggcgtgcctggagaaggtgtcatactctttgctgatcttcttctgcggcatgttcataacggtcgacggcttcaacaggaccggcatacccaatgcgctctgggagctggtcgaaccgcactcgagaatcgacagcgccaaaggcacggcgcttctcgcagtcgtgatcctagtcctttcaaatgtggcctcaaacgttccaactgttcttctgctgggcacaagggtggcagcgtcagcagttgcaatctccccagagtcagagaagaaagcctggctcatactggcatgggtgagcacggtggccggcaacctgaccctcttgggctcggcggcgaacctgatcgtctgcgagcaggcgcggcgggcacagttcttcgggtacaacctcaccttctggagccacctccgcttcggcttgccgtcgaccatcatcatcacggcgatcggcctgctcatcgtcgccagttactgaacggaaccccacacaagctagggtctcggcctcgcacaagcggcggggtgtgtagccagatggcaggcagaacgctgcagattggcctttgtttgtacgttgtaactgtttttatgtcgtttgtgtaagtctgtacgtttcgcgcaaccgatgccgcaaggcgccgggttgcccatctgctaaggcaaataatgcgcaagactagtagatggcatggagtatagaagggcggcaccactgttctaggaaggcaaaaacttgctctagctagttcaggtaggagagccggcgaaaatgtatggtgtgcttctcgatttggtaatgtcaagggacttgtccttatgtttggagcaaagaaacatggttgtatgattctgccactagtaaaaaaaaaaaatgtacctgcggttttagagctattttgtggtggcgtttttagtaccgtcagtgctagtggttagtggaaatcgatattttcaatggtggctattttggactgaaaatgcatttttcactagcggttatcttaaagcaaccgtcatgg

SEQ ID NO: 53323 - DNA, 518 bp, Zea mays
  Clone ID: MRT4577_148632C.1
gccggccgggttccgaatccagctaccagcctcgggcatccacctccccgtcactctcacgctcttcgtgacagacgcctcccctcttgccctccacctaaatcctcccgaatgacgcacatgagctccataggcggcatcttccactctctccttggccatgcctgacatggcaatcaactcaaattttctattcttctccccggagagagaagggtaacacgttcctccgcctgcaaccatggcctatgatatgtgtatcctgcgctgccataaatgatacagaggacaaggaatgtggagttgcgaacaagcacttagctcttcctgatcacgctgaacgataggacgaaccgaaattctctggatttcgacgcgtattccatgaacacggatgagattgtgaagggccttgaagagctcttcaatattagcgcgaacgagttcggtacgctcacaattgacaacgatgaagacgccgctgacctcgttgacaagacttgctgctaggaaggcat

SEQ ID NO: 53324 - DNA, 188 bp, Zea mays
  unsure (1)..(188): unsure at all n locations
  Clone ID: MRT4577_148633C.1
cnggngccantcaagcttttgtgaacttggnacctacactactttgtgatgccggtgctnctgtngtacangtttgcaccatattattcaatgcctacatgtacattaccagatgcacaggtgttnctgcacatattagttggtggttctnatcccaagacactnacanacctgatgttgattggttg

SEQ ID NO: 53325 - DNA, 421 bp, Zea mays
  unsure (1)..(421): unsure at all n locations
  Clone ID: MRT4577_148634C.1
ttcttaactcctactttntnnaattatcttattnacctacaantattttnnaaaacagacagtgtattatcaaaaccacacccccaccaaaacttaccctattatcaacctcctattcaacccttttcacaatcacctctatctccttttcctcacctcntcaatcaataaattccntttccttcctttcataatccacacccaccacaanaacattccctcaattaaatccacctttaaactcaaccataccctctccctccccctttacctcttatcacctctcccaatcattacaataatgtttcctttcttctttttccattttcaaaatttttactattttttttcttttcacttttaaattttaaaattcaattatttaacatatttccataactattttcaaatcctctttatt

SEQ ID NO: 53326 - DNA, 434 bp, Zea mays
  Clone ID: MRT4577_148635C.1
gacgctgcgatgtattcgggatgcgacaaacccaggttttcagccctaataggatccgactagggaatcgcagctcggcatcttgactcttgcatcactccttggatgcttcaacatggatgagtcctattacagcatgtacctttggcgcatttattggcacaaaacatcagggcacagcaactacaacaactagagctagcaaaccttgctgcctactctcaggaacaacagcttcttccattcaaccaactagctgcattgaactctgcttatttacagcagcaacaactactaccattcagccagctagctggtgtgagccctgctaccttcttgacacaaccacaattgttgccgatctaccaggacgctgggcctaacgctgggacgctgtgacaactgcgacaatggctggcgtggaaccaactggg

SEQ ID NO: 53327 - DNA, 3233 bp, Zea mays
  Clone ID: MRT4577_148636C.1
cccgccttctctctccctccgaatccaaacgcggacgcaaatgttgctccacgccggtccctcgttcctgctcgcaccacctccgcgctttgccgccgctccgtcgtcagcttcgccgaggcgatccaggacaccgcaatcctcgccgccgacgtcgcatttcgcgcgccccgctgatcccgtggcccaaagggtgcgtcccgtcgcgccgaggccccccatggcgacggcggaggagggcgccagctctgacgtcggcgtcgccgtcgccgagtccgcacaggggttcttgttggatgcgagggcttactgggtgacaaaatccttgattgcatggaatatcagtgatcagaaaacttctctcttcttatatgcaagcagaaatgctacaatgtgcatgtcgagtcaggatatgaaaggttatgattccaaagttgagctgcaaccagaaaatgatggacttccatccagtgtgacccagaaattcccttttatcagctcttatagagccttcagaattccgagctccgttgatgttgccaccttggtgaaatgtcaacttgctgttgcttcatttgatgctcatgggaacaggcaagatgttactgggttgcaactacctggagtattggatgacatgttcgcctacactggaccgcttggtactatttttagtgaagaagctgtgagtatgtacctatgggctcctacagcacaggatgtaagtgtgagcttctatgatggtccagctggccctttactggaaacagttcaactcaacgagttaaatggtgtttggagtgttactggtccaaggaactgggagaaccggtattatctatatgaagtcacagtatatcatcaaactacaggaaacattgagaaatgtttagccgctgatccttatgctagagggctttctgcaaatagcacacgaacttggttggttgatattaataatgaaacattaaagccacttgcctgggatggattggcggctgaaaagccaaggcttgattccttctctgacataagcatatatgaattgcacattcgtgatttcagtgcccatgatagcacagtggactgtcctttccgaggaggtttctgtgcatttacatttcaggattctgtaggcatagaacacctaaagaaactatctgatgccggtttgactcatgtccatttgttgccaagctttcaatttggtggtgttgatgacataaagagcaattggaaatgtgttgatgagattgaactgtcaaaactccctccagggtcagatttgcaacaagctgcaattgtggctattcaggaagaggacccttataattgggggtataaccctgtggtttggggcgttccaaaaggaagctatgcaagtaacccagatggtccaagtcgtatcattgagtaccggctgatggtgcaggccttgaatcgcttaggtcttcgagttgtcatggatgttgtatacaatcatctatactcaagtggcccttttgccatcacttccgtgcttgacaagattgtacctggatactacctcagaagggactctaatggtcagactgagaacagcgcggctgtgaacaatacagcaagtgagcatttcatggttgatagattaatcgtggacgaccttctgaattgggcagtaaattacaaagttgacaaggcaagatttgatctaatgggacatatcatgaaaaagacaatgattagagcaatatacaataaatgatgttatagaggttcaaagatatatggaacatttctttatagaggtaaaccaccctattttccaggcactgggattggtagtttcaacgatagaatccgtgatgctataaatggtggcgtccgtttaagaatccactgcaacaaggtttctctactggattgttcttagagccaaatggattttatcagggcaatgaaacagagacaaggctcacgcttgctacatacgctgaccatatacagattggattagctggcaatttgaaggactatgtagttatatctcatactggagaagctagaaaaggatctgaaattcgcaccttcgatggctcaccagttggctatgcttcatcccctatagaaacaataaactacgcctctgctcatgacaatgaaacactatttgatattattagtctaaagactccgatggacctctcaattgacgagcgatgcaggataaatcatttgtccacaagcatgattgcattatcccagggaataccattttttcatgctggtgatgagatactacgatctaagtcgcttgatcgagattcatatgactctggtgattggtttaacaagattgattttacctatgaaacaaacaattggggtgttgggcttccaccaagagaaaagaacgaagggagctggcctttgatgaagccaagattggagaacccgtcgttcaaacctgcaaaacatgacattattgctgccttagacaaatttattgatatcctcaagatcagatactcatcacctctctttcgcctaactacagcaagtgatattgtgcaaagggttcactttcacaacacagggccctccttggttccaggagttattgtcatgagcatcgaagatgcacgaaatgataggcatgatatggcccagatagatgaaacattctcttgtgtcgttacagtcttcaatgtatgtccgtacgaagtgtctatagaaatccctgatcttgcatcactgcggcttcagttgcatccagtgcaggtgaattcatcggatgcgttagccaggcagtctgcgtacgaccccgccacaggtcgattcaccgtgccgaaaaggacagcagcagtgttcgtggaacccaggtgctgatggatgcctttcgctagcgagcaagtgcattcggcatccaagtcgaagcaaacgaatgaaataagagaaggccatcgaataaaacgaagtatataaatagattgaataagacgttgcccaagttgccaaggcacgctttgccatatgtatgcgttgaaaaataaataaataaataaataaataaataaataaataaatgatgttatagaggtacaaaagcattggaacatttctttatagaggtgaaccaccctattttccagtttccatgtgtgaattgtgattagcatatgtatggaataataatataaattaattttatgcaaaaaaaatttgtgtgttgtgtcgtggatgacaacatcaac

SEQ ID NO: 53328 - DNA, 177 bp, Zea mays
  unsure (1)..(177): unsure at all n locations
  Clone ID: MRT4577_148637C.1
agccgggttgcaaaataaaatccggnccggaccaatttaccagcgtatctgagagcctgagacgatggccgactactatcacggaggtagtgttatgtactccaattccgactagtgatattatgtcgataggaacggtggcagcgtgagggtgtgctccccgcccgtccagtacta

SEQ ID NO: 53329 - DNA, 2795 bp, Zea mays
  unsure (1)..(2795): unsure at all n locations
  Clone ID: MRT4577_148638C.1
atcagctcttatagagccttcagaattccgagctccgttgatgttgccaccttggtgaaatgtcaacttgctgttgcttcatttgatgctcatgggaacaggcaagatgttactgggttgcaactacctggagtattggatgacatgttcgcctacactggaccgcttggtactannnnnagtgaagaagctgtgagtatgtacctatgggctcctacagcacaggatgtaagtgtgagcttctatgatggtccagctggccctttactggaaacagttcaactcaacgagttaaatggtgtttggagtgttactggtccaaggaactgggagaaccggtattatctatatgaagtcacagtatatcatcaaactacaggaaacattgagaaatgtttagccgctgatccttatgctagagggctttctgcaaatagcacacgaacttggttggttgatattaataatgaaacattaaagccacttgcctgggatggattggcggctgaaaagccaaggcttgattccttctctgacataagcatatatgaattgcacattcgtgatttcagtgcccatgatagcacagtggactgtcctttccgaggaggtttctgtgcatttacatttcaggattctgtaggcatagaacacctaaagaaactatctgatgccggtttgactcatgtccatttgttgccaagctttcaatttggtggtgttgatgacataaagagcaattggaaatgtgttgatgagattgaactgtcaaaactccctccagggtcagatttgcaacaagctgcaattgtggctattcaggaagaggacccttataattgggggtataaccctgtggtttggggcgttccaaaaggaagctatgcaagtaacccagatggtccaagtcgtatcattgagtaccggctgatggtgcaggccttgaatcgcttaggtcttcgagttgtcatggatgttgtatacaatcatctatactcaagtggcccttttgccatcacttccgtgcttgacaagattgtacctgggcacgacctcagaagggactctaatggtcagactgagaacagcgcggctgtgaacaatacagcaagtgagcatttcatggttgatagattaatcgtggacgaccttctgaattgggcagtaaattacaaagttgacgggttcagatttgatctaatgggacatatcatgaaaaagacaatgattagagcaaaatcggctcttcaaagccttacaattgatgaacatggagtagatggttcaaagatatacttgtatggtgaaggatggaacttcggtgaagttgcggaaaatcaacgtgggataaatggatcccagctaaatatgagtggcactgggattggtagtttcaacgatagaatccgtgatgctataaatggtggcagtccgtttgggaatccactgcaacaaggtttctctactggattgttcttagagccaaatggattttatcagggcaatgaaacagagacaaggctcacgcttgctacatacgctgaccatatacagattggattagctggcaatttgaaggactatgtagttatatctcatactggagaagctagaaaaggatctgaaattcgcaccttcgatggctcaccagttggctatgcttcatcccctatagaaacaataaactacgcctctgctcatgacaatgaaacactatttgatattattagtctaaagactccgatggacctctcaattgacgagcgatgcaggataaatcatttgtccacaagcatgattgcattatcccagggaataccattttttcatgctggtgatgagatactacgatctaagtcgcttgatcgagattcatatgactctggtgattggtttaacaagattgattttacctatgaaacaaacaattggggtgttgggcttccaccaagagaaaagaacgaagggagctggcctttgatgaagccaagattggagaacccgtcgttcaaacctgcaaaacatgacattattgctgccttagacaaatttattgatatcctcaagatcagatactcatcacctctctttcgcctaactacagcaagtgatattgtgcaaagggttcactttcacaacacagggccctccttggttccaggagttattgtcatgagcatcgaagatgcacgaaatgataggcatgatatggcccagatagatgaaacattctcttgtgtcgttacagtcttcaatgtatgtccgtacgaagtgtctatagaaatccctgatcttgcatcactgcggcttcagttgcatccagtgcaggtgaattcatcggatgcgttagccaggcagtctgcgtacgacaccgccacaggtcgattcaccgtgccgaaaaggacagcagcagtgttcgtggaacccaggtgctgatggatgcctttcgctagcgagcaagtgcattcggcatccaagtcgaagcaaacgaatgaaataagagaaggccatcgaataaaacgaagtatataaatagattgaataagacgttgcccaagttgccaaggcacgctttgccatatgtatgcgttgaaaaataaataaataaataaataaataaataaataaaaggtacaaaagcattggaacatttttttatagaggtgaaccaccctattttccagtttccatgtgtgaattgtgattagcacatgtatggaataataatataaattaaattttatgcaaaaaaatatatttattataacatactcctattttaacccatatctcgg

SEQ ID NO: 53330 - DNA, 1866 bp, Zea mays
  Clone ID: MRT4577_148639C.1
cttattaccaaattttacatgttacatcaagttttataatgtacataatcagagtgattacaaaaaagtgattcaaaggaataactttgaactgttataaattgtttataagttcgaaacatatgctagcttaagggaccatcctcaataagaagtatataagggttacttagaattataagaaggccgagcccaccggcacttaacaccatcaatagcagcacaaagttataacctgaaaaacaacagggaataaaaccctgagtaaggaattactcagcaagacttacccgactaaagaaaagactctcaaggatatgctggtttgtcgggaatcaaggtaaggcttaccaaatttcaaagactcattttgcagaagagcttactagtagtgaatccttatgccaaaactttacttcacaagttaaatatttttcctgaatctagatttacctaatctagagcattcatttatcctacactagcttccttttaaaatccaacttttgtttctcttgttatctacgatgagtggtcagtgagttgagtctccatgaccgaggagcaacgacgattcgaaccaattatacccagctggggattcctaaccacacgacatatgtagcacttaacccttgcatatgtcaaccgttcccatagatcctccacaacgtgaaccgatccgcgctacccgggagcacagtactcctccatccagcctctagccaggagggtacacgctattcccaccatctcccacgcccagtgcgcggttgtcttttcacatatggaatagccgagttcaggcttaccggagcatgtggctagttgcaaagtctccacaacaacaggcctacatcgatcagtccttaatcaacgcagatgggcgaactttcctgctcaacgtctagtctacattacatattatttcccaaaacttgatacctgagagagacaccctacttgaatgatgaaatcattgcggctacaatgggttcatcatcacaagtccttttatttcacaaactcccatatcccgtgttacacatcatcttttaataaccaatcctaaattaaaaacaatcctaagcttcacacgacacaactacttcaccatcgcgaacaccatcataccatatatatatctaccaatattctttcactgaaagtagtaattcaaattttagttcatatatcaacgatttttttccgtaaatatatacacatctttataagtgattaaaatattttatcatcacacaggcctactaatattctactcggtccaccaattcagctaattgactggaatagcgaaataacttgctataactgaatctggctcgataaacgcaagaacctcgaagtcgacgagagttccgtgactcgcaatttattgagcacctagtgagcatcgcgctgaacctctctttcttcttcatctaattccattcttccacattgagcgcttgcgaccattccaatagctgactcgaatacacgagatcggtaatggttctccgattcagggaatttgtcgagtgcttggctggcaggtgtcatattggactacgcttctttgtcacgcaatccagtgatttctctcctctgtcgatggtatacggctactgagctggacgacgatgtggactagggactaacataggaagttgcggccaccacatgaccaagataacgacgaacaacatagggatagtaggaccttcaaggacgacagggtcgaggccgagtcagaatcctagactagatttttctttgtcgaacaccggctgcatgatgggagtccgacagcacggcgctcaccaataacttaatctaacctcgaggccaccagggcgagatgct

SEQ ID NO: 53331 - DNA, 164 bp, Zea mays
  Clone ID: MRT4577_14863C.1
acatacggatactcattggccgacaccttttgatgcttagacgatggcttcacgattcagacccgaggatttatcaatttacgcggtgcgagccgctcactgaggaggacgtcatggcactgtgcctcatcgccatcaagatgctcatagcggagaatcacttg

SEQ ID NO: 53332 - DNA, 386 bp, Zea mays
  Clone ID: MRT4577_148640C.1
taaaaaaaaaaaaaaaaaaaaaaaaaaaaaaaaaataaaaaaaataaattaaaaaaaaaaaagaaggaaaaaataaaaaaaaaaaaaaaaataaaaaaaaaaaaaaaaaaaaaaaaaaaaaaaaaataaaaaaaaaaaaaaaaagatataaaaaaaaaaaaaaaaagggggggcccgttttaagggttcaaactttcctctcccgccctgggaagttttaactttttttttggggcccctaaatttaatttaactgccctacttttaaaaaggcgggtgggggaaaacccttgtggttccaaaatttattggttttgaagcaattccccttttccccagtgggcgtattaccaaagaggcccgcccgaatcccctttccaaaaatt

SEQ ID NO: 53333 - DNA, 138 bp, Zea mays
  Clone ID: MRT4577_148641C.1
actggcgatggtgaccgcgcaaactccatcgcgcgcagaacaagaccgctgaagtccaccaccagcgccttccgtggggagagtgaagactgaccaaacagaagcctctaccaagggcggcctaccccctccacatgg

SEQ ID NO: 53334 - DNA, 927 bp, Zea mays
  Clone ID: MRT4577_148642C.1
aattccacggaacagctttctttccccttctccttcgtcttcgccgtgtcaggtggatcagcggccggcactgacgatgtcgtccctcaactcgctcttcaaccgctcctcccccttcggcaccaaatgcaaaacatgcttgaatttgatcatttcgaggatcaagctgctgcgcaataggagggagatgcaactgataaatatgcgcaaagagatggttcagtatcttcagacaggccaggagtctattgcgaggattcgggttgagcatattattcgggagcaaaatatattggctgcctatgagattgtcgagcttttctgtgaatttgttctggcacgagtccctattgttgaggcccaaaaggaatgccccatagaattgagagaagcaatagctagtataatctttgcatcaggaagatgctcagacttgcctgagctaatgcatctccgtaatttgtttaccaccaagtatgggaaggagtttgttgctgctgctatggaattgcgccctgattgtggtgttaatcgcacaataattgagaagctttcagttaaggctccatcagcggaatcaaagttgaaggttttgaaagctattgctcacgagtacaatcttgactgggattcatctaatactgaagcagaattcaataagaaatacgaagatctgctggatgattcaggatcatcagtccgccaaggccaaacacctacaattgagagctctccagcctcttccatttccagagataagccatctattctacctgtcaacgacacaagcaaaaacaaaactcccgagtccccaaagtcacctgctgtgagttcaagagcatatgctgccaccaagagtaatgtggccagtcaagagcatcagccccctgctgcggagagatcatcctgcgctggcccaggctcgtc

SEQ ID NO: 53335 - DNA, 706 bp, Zea mays
  Clone ID: MRT4577_148643C.1
acagcggaaatcttattaccaaattttacaagttgcatcaagtttacattgaacatgatcggagtgattacaaaagtgattcaaagaaataactttgaactgttataaattatttataattttgaaatatatgctagcttaagtgaccatcctcatacagaagataaagacgtgatatacttatataagaaggccgagcccaccggcacttagcaccatccacaacagaacaaaactataacctaaaaaacaacagggaataaaaccctgagtatggaattactcagcaagacttacccgactaaagaaaagactctcaagggtatgctgacttgtcgggaatcaaggtaaggcttatcaaatttcaaagactcattttgcggaagagcttactagtagtgaatccttatgccaaaattttacttcacaagttaagtacttttcctgaatctagatttgcttgatctaaagcattcactagtcctggtctagctttcttttccccaaattcttatttcacttataaactacgatgagtggtcagtgagttgagtctccatgaccgaggagcaacgactattcgaaccgattatacccagctggggatccctaaccacacgacgtatgtagcacttaacccttgcatatgccaaccgttcccacagatcctccacaacgtgaactggtccgcgctacccgggagcac

SEQ ID NO: 53336 - DNA, 277 bp, Zea mays
  Clone ID: MRT4577_148644C.1
ccaatctacaagcgcccctctccctctctctctctctcttcgccgtccgaagctcggccggccaatctaatcgacacctcgccgacatggtccgcaagttcttcgtcagtggcaactggaaatgcaatggaaccacaaatcaggtcgagaacattgtcaaaaccctgaatgaatgacaggttcccgcttcacatgtcgtggaggtcgttgtcagccctgcatacgtcttccttcctgagagcaagatccagctgctccaccagtccatgttcggctc

SEQ ID NO: 53337 - DNA, 549 bp, Zea mays
  Clone ID: MRT4577_148645C.1
tacgtaagctcggaattcggctcgaggcaagatggcggagtacgacttgactactcgcatcgcgcactttttggatcggcatctagtctttccgcttcttgaatttctctctgtaaaggagatatataatgaaaaggaattattacaaggtaaattggaccttcttagtgataccaacatggtagactttgctatggatgtatacaaaaacctttattctgatgatattcctcatgctttgagagagaaaagaaccacagtggttgcacaactgaaacagcttcaggcagaaacagaaccaattgtgaagatgtttgaagatccagaaactacaaggcaaatgcagtcaaccagggatggtaggatgctctttgactacctggcggacaagcatggttttaggcaggaatatttagatacactctacagatatgcaaaattccagtacgaatgtgggaattactcaagagcagcagaatatctttatttttttagagtgctggttccagcaacagatagaaatgctttaagttcactctggggaaagct

SEQ ID NO: 53338 - DNA, 318 bp, Zea mays
  unsure (1)..(318): unsure at all n locations
  Clone ID: MRT4577_148646C.1
ccggccgggataatctcacagaataataaaaatcatggggcaagnctcacggntcgtcctcctcgncgtcgtggcgctgctgtncgccggcctcctcccgcaggcgttgggtaagggtaggggaggtaggggacacggtggcgncgnnaacncgnaggccgccggnatttgctttcgnagnncgntcccggaggtgtggacgnncancgncgggcggnacgcgnncaagnanccggnnatcgacaacntggncgtgctgaanatgcaagtggacgcgnncgccaagcgcancgcgcaggcgcgnaagnncgccacgaa

SEQ ID NO: 53339 - DNA, 330 bp, Zea mays
  Clone ID: MRT4577_148647C.1
gcggggggcgagccatctgtgatcacaacagtggcagaacttgttgtccctccaaggaaccaaccccatgtgcctgaccttggtgcctactatgaccgacatcggttggactcctttcagtcccactttcctttttcccagcttcctgcccaggggggggggggggctatcactcttttcccccctacctcctgtcgacggggggggggaacatctctttctgtttacccgtctgtccgtactgggcttcgcggcctatttgcaccctcattaacttctgcggtgtgaccacctagctgtgcgtacccgtgcttgcttcggggggctgcc

SEQ ID NO: 53340 - DNA, 737 bp, Zea mays
  unsure (1)..(737): unsure at all n locations
  Clone ID: MRT4577_148648C.1
cggccgctcgaggcggcgggccgggcccactcccagagataccattgctcctgcctcttgttcagccctgtgatggatgaagcttgcaacgaggctctgtgccgtgaggccgcctgcgtttggcaaggagaaggagaagatcaccctgacgctgcttcttgcacctcgccctcgggaacgtccagcgggtcgtcgtcgtgctcattggggttgaatctgggtgatgggtcgacttactccccacctgatgattattcttcggagttgtcttcagcgtcgtcgagcaccttgcatctggactccgaggcagaggggcctctctacgagctgtcttcgctgctagcccagcttcctgccaggagagggttgtccaagtactacccagggaagtcccaatcattcacatggatatctaatgctacatgtcttcaagaccttggaaaggaagttacctacagcaagaggatgaagacatgcaagagctacgcagcaggattaggcatgaaccagcggtcaaatcacttaccgaggacatgcaacaagatgatagccaagaggccctcaaaaagttcatttgcttgtcaaatgtccagagcaagcagcaccaacctcttgtacaggagtgccaatttacctgcacaccagaacaaggaagatgtacaaatgcatatgaactcttaactagctacnactataatgccaggactccacttcccatgaacatacagtacttactg

SEQ ID NO: 53341 - DNA, 312 bp, Zea mays
  Clone ID: MRT4577_148649C.1
ggcagaaaaactgagttcattaaatatgatgtatcaaacatcagcaggacactgtcaccgagtgccaaaactaatccatagattaacatacaagcacagactcatgccactgataatcaggaaaataaatatcactactgcaaacatggtaacatctttcaacaatatgcacagaacatgttgacaagaacaaagggtaacaacatgagctgaatgaaataatgaacttcttttctctagatctcgaccctgtatacagaaggaacttatgtcatatggtacagaagccctgcctatgttagcatactgatc

SEQ ID NO: 53342 - DNA, 992 bp, Zea mays
  Clone ID: MRT4577_14864C.1
ccgcacgagatttttctcacgccctccccgcggaattatacctttttttttctctctcgcgcgcctcgcttccttcgaatccatccatctctcgcctccctttccaattcgatgcctttgtagcgctgctgcctcgcccccgccgcgtcgtcgcgggtccccggcttcgcttgctgctgcgcttccagcgtcatggacgggggatccggcaatgcctccagcggcggagcggcggtgtgctgctactacgcgctcctcggcgtccgcaagagcgcctccgccaccgacatacgcaccgcgtaccggaggctcgcgatgaagtggcacccggaccggtgggccagcgatcccggcgcggccggcgaggccaagcggcggttccagcggatccaggaggcctactcagttttatcggacaaggggaagaaggccatgtacgacgccgggctcttcgatcccctcgacgacgacgaccaggatttctccgacttcatgcaggagatgctggtgatgatggataacgtgaaaaacgagaagccggacacgctagaggacctgcagaagatgctggcggacatcgtgaacggcgacggcggggacggcgtaggcgggcgcgtgccgccggcgccgccggacgttgctcggcgaacgcgcgtcgcgccccacccgcagccgcagcaggcgcgtaggtgaccgccgcgccgccgtagctgcggcagtacgtacgcttttggtgaaagggactggagaaggatcagaaacgggaggctctctggaaaaaggagaataaaaatttcaggccatcttttgatcataatctacccctcctttattgtagcagtggtcgattgtgtaagctaccggccgcgccgccgcaataactgtcggtcgtggccgggtattcttactttttttttatttatctcgtcgacatttcgatttattgtctactgccattttcgctcgtgtgctgtgctcgatctagacaagca

SEQ ID NO: 53343 - DNA, 233 bp, Zea mays
  Clone ID: MRT4577_148650C.1
agccccagagcttcgaccgccgacccactatcggggggggcgacttcccaggcccacacaagatcagggaggcgcgcgatctggcaaacggctccgagacaccgggcgcggagtcatcgtagagttcacacgtggctgacgacttcataccccccaccttggacgagtatctgcctgcgacgctgggcaggagcaagtgtgtcaggcgggagacactgcaccctccatgtggg

SEQ ID NO: 53344 - DNA, 349 bp, Zea mays
  Clone ID: MRT4577_148651C.1
tcgatctaagggcatctctgccagggcacttgccgtatcttatccagcatatacaacaagacaggctctgagaggggatacccaagagagaaccgcttacccccccttgaatgaaagacttgttcagttgtccgatcaggattagcacgaacatgtacctggtgaaaataagccccgctactcattcaaaaaaatcgcacggtcactgggatacccttgtaataaagcaaccttgtgatgctccaacccaagcgctaaatggtactgcggagaatgtgctaaaaggcgtgtgcatatggacagactttctgtgagcaccttaggctggtcccacatgtaggagggggta

SEQ ID NO: 53345 - DNA, 169 bp, Zea mays
  Clone ID: MRT4577_148652C.1
acgctcgagcgtcgtaactcggaatcggtcgagcaagtccacggcgaactctcggctatcatgtctagccgcgagcaaggcgggaatgatctggagcatggcggcgccaagcggcaccagcaggtgctacgcgacaacatccagggcatcaccaagccggcgattcgca

SEQ ID NO: 53346 - DNA, 557 bp, Zea mays
  Clone ID: MRT4577_148653C.1
gccgggccggggcatccggaactacgagatgagcacccaccacttcttcccggctggggggggaggacaaggggctccactgagttcaatggacctgtattcttctggggcatttctgaatctggctgccaccttagtctgtgctgcaattatggctctcccagcctgcatagagatgctgggcatcatcccggtgcttctgccgttcatccttggggccctgtgctcacaggcagtccatcgtcatgcttgcctggtgcagccgccagggcaggatgacgtcatctggcggccatgatgctcgatgttgacggcctcagcgggggaatggccctacacgccggcgcggtgatatccgtcgtcggcgggcgatgtgtccacttgcctctccttcgttgatggcatcctgctgtatcctcgttacagcgatgtccatgattctagttattgcatgtctgggttggctctatttacgggactggtcgtgcacttgatctttatgccacagcatccggacgagaacggttccatgccgagctgtactacctagagctgcc

SEQ ID NO: 53347 - DNA, 2681 bp, Zea mays
  Clone ID: MRT4577_148654C.1
gttcccgaccacgacaactatctgcggctcgcattacacttaatagacgtgctgttgacgataggctgcttctctgtgctccggttttgcaggatctaggcaggaacaaggcaggcccctcgtcccgcggctgaccacgcagagatcgcacgagtgtggcattggccgtcgtcgcgacgacactttgggtcatctatcatcctccgatccgtcgcctcgccgccggccggcgagcccgagagtaggaggccatgacgcttgcgagcacggacaaggtggtgctgggatgcgtcgcgttcagcatcttctgggtgctggccgtgttcccgtcggtgccgttcatgccggtggggcgcaccgcggggtccctcctgggcgccatgctcatggtgctgttttttaacacctagtagttgttgttgacgatatgcttctctgtgcttccggttctgcatgatccaggcagcagccaggaacaacaagctaggccccctcacgcagaccgcacgaccgagcgcgcggcattgaccgacccatcgccgccgccgccgcctcgatcgaccatgacgcttgcgagcacggacaaggtggtgctgggatgcatcgcgttcagcatcttctgggtgctggccgtcttcccctcggtgccgttcatgccggtgggccgcaccgcgggctcgctcctgggcgccatgctcatggtgctcttccgcgtgatgaccccggaggaggcctacaaggccatcgacctcccgatcctgggcctgctcttcggcaccatggtggtcagcatcttcctggagcgcgccgacatgttcaagtacctcggcagcgcgctggcgtggcggagccggggcagcaaggacctgctgttccgcgtctgcctcgtgtccgccgtggccagcgcgctcttcaccaacgacacctgctgcgtggtgctcaccgagttcatcctcaagctggcgcggcagaacaacctgcccccgcagccgttcctgctggccctcgcctccagctccaacatcggctcctccgccacgcccatcggcaacccgcagaacctcgtcatcgccgtgcagagcggcatcaccttcggccagttcctcgtcggcgtcttcccggccatgatcgtcggcgtcgccgccaacacctgcatcctgctctgctacttctggaggtgcctctccgcgccggagaaggaccaggagggcggcgccgccgccgcggggcccgacgtcgccgtcgtggccgacgaggaggtcacctcgcacaggttcacgccggcgcggatgtcgcgcgcctcgtccgtcaacgggggcggcgccgacgccgactgcgtcggcgagctcatccgccggagcgatagcctcagccgggccgacactacgctaggcatgagcatgaggagccggagctacaactcggagggcggcgacatccaggtcgccatcaggtccatgcgcgcgtccagcatgtcgcaggagatggtggaggtgtccaccgtctgcgacaggcgcgacgacggcggtgccgggcccagaaaggtcaccaggaccaccagccaccagcgcagcgtcatcatcgaggacgcgcccgaggctgacgccgccgacgacgacgacgatggccacaagggcaaggacggtgacagcgtcaccaacaaggagaagaggtggaaggtgctcgtgtggaagactgccgtgtatctcaccacccttgggatgctggccgcgctcctcatggggctcaacatgtcctggtccgccatcactgctgctcttgtccttctcgcgcttgatttcactgacgcacaggcgtgcctggagaaggtgtcatactctttgctgatcttcttctgcggcatgttcataacggtcgacggcttcaacaggaccggcatacccaatgcgctctgggagctggtcgaaccgccctcgagaatcgacagcgccaaaggcacggcgcttctcgcagtcgtgatcctagtcctttcaaatgtggcctcaaacgttccaactgttcttctgctgggcccaagggtggcagcgtcagcaggcccaatctccccagagtcagagaagaaagcctggctcatactagcatgggtgagcccggtggccggcaacctgaccctcttgggctcggcggcgaacctgatcgtctgcgagcaggcgcggcgggcacagttcttcgggtacaacctcaccttctggagccacctccgcttcggcttgccgtcgacgatcatcatcacggcgatcggcctgctcatcgtcgccagttactgaaccccacacaagctagggtctcggcctcgcacaaacggcggggtgtgtagccagatggcaggcagaacgctgcagaaaacagcatgcagcactgcctgacatcgaaggagatgttgtactgattggcctttgtttgtacgttgtaacagtttttatgtcgttcgtgtaagtctgtacgtttcgcgcaaccgatgccgcaaggcgccgggttgcccatctgctaaggcaaataatgcgcaagactagtagatggcatggagtatagaaggccggcaccactgttctaggaaggcaaaaacttgctctagctagttcaggtaggagagccggcgaaaatgtatggtgtgcttctcgatttggtaatgtcaagggacttgtccttatgtttggagc

SEQ ID NO: 53348 - DNA, 911 bp, Zea mays
  Clone ID: MRT4577_148655C.1
ttgggtacctcgaggccggccgggagcgccagtgcggcagagagtcgagaccttctagctaggccgctgccacgtcaaaactagctcctccagacaaccaatcagctagccgaagccggtcgattagcatgcagcagcgctagtagacgtcgtctccgggtctccactctccacacagaaacccatacaaaatccgcatccagaatcaccggagatacgagtccgcgcgtacgttgcagttgaattgtgaagagaggctgtgcgcagtgctgctgctgcttcttcttcttcgacgcatgcacgcacatggatggtgctgctgagtgctgacctccggccgtacgtgatcttcgatctccacacggcggcaagcgatcgagaggcgtggttcccgtggcgtcaaccgacacctagcagctgctagctcatctgcttgatctctagctgagactccgagcaaaatgcagcagccaggaacaacaagctaggccccctcacgcagaccgcacgaccgagcgcgcggcattgaccgacccatcgccgccgccgccgcctcgatcgaccatgacgcttgcgagcacggacaaggtggtgctgggatgcatcgcgttcagcatcttctgggtgctggccgtcttcccctcggtgccgttcatgccggtgggccgcaccgcgggctcgctcctgggcgccatgctcatggtgctcttccgcgtgatgaccccggaggaggcctacaaggccatcgacctcccgatcctgggcctgctcttcggcaccatggtggtcagcatcttcctggagcgcgccgacatgtaacgacacctcggcagcgcgcctcactggcggcatcctcaagctggcgcgggagaacaacctgcccccgcagccggtcctgctgggcctcgcct

SEQ ID NO: 53349 - DNA, 327 bp, Zea mays
  Clone ID: MRT4577_148656C.1
gaacaatcttcagtcgcactcaacaagctcgctagggtgtgggatgtatcatcagggaaagatggagcatgactcgaccataccgaggagcagatttatatggacaggatctgcgcgaagttacacggaggggactcctcgtccatatgtgactaggacgactaaaagaataaaggaatttcttgggcgtcaggaaccgaggccatttaagccaatacataccggtttttgagccgggagaggcccgatcactctgtcctctgaggaaatacgaccgacactcttgttctattgaacaacaagacgatctgatgctgcgtactctat

SEQ ID NO: 53350 - DNA, 305 bp, Zea mays
  Clone ID: MRT4577_148657C.1
tggacatatctacatatttacatggtgcttgcaaatataacaaaggagaagataggaaccgggagcataacatgacatatcacattccatgaaagggctcactggattaagttgattcaagtctgactgtacagctgtgcagactaactaacaacagggactgcgctggtcatcgctatacgactaaggaccgtgggaactccttataatccactgatccaacacatgcttgctgagtaagatcttactgaattttaccgtgtgctgtaaacgactggaactatactgtttttctattctgatga

SEQ ID NO: 53351 - DNA, 1771 bp, Zea mays
  Clone ID: MRT4577_148658C.1
tcgaggccggccgggggtattgcgagccaaaaaaacctcgctcgggccgggcccggccgggatcgtcccctccctccgtctccaccgcccaccactgatcggatcacgtcggcgtcccatctcctcctccacgacacagaacgccgctccctttccgggattctcctctccaatcgcagctaaaacgcaacgcactggatcggacgtcgccaaaaagatcggtggcgacaccataaagaaagaatccgagaaaaggcgaaaggggaggagagaaaggggaggtacaaaatttctacccgctagaggttagctagctcggcggcgagggaacgagagacgccctaccgtcgattccatatcgtcgctccgatattctgatgccggaatcctgcttttccggctagcttaccgatacctcctaggtggtttccagtcctcacccttccaacctctactatctttttttgtgaatttacctccaccgaattcgggcagctcaccatttcttggagtttggtgtcctttctcgagtgtttccttcctccctcccgggttctactgctgagtggtgaggtctactgccctgcacctgcaagtttgtttcatttgtgatgtgatccgttagtttgccccccagcaaccgttgctcagaaattcagttcttattaaagcttcaagacccttcaaggaacatcttttagacaagctcttgattccttcacctctctctctcttttcaggcatctttcttgtgcgacttgtccgttgaccacaggcggagaaatttgttctcggcacacattctctgccacaatggacgatggagctgacctcccctgccaactgctcttctcccacccggagatgcctgacagcttcgacgagttcttcaacagcgccacgacgacctgcacccacacgcacagctgcaacccgcccggcccctcggtcgccatgcacacccacacgtgcctgcacgcgcacaccctggtcctgggcagcggcggggaggacgacgacgacgccagggaggactcggcgaagccgcgcagaccgctggggaacagggaagctgtgcgcaagtaccgggagaagaagaaggcgcacgcggcctttctggaagaggaggtcaagaagctccgcgccgccaaccagcagctccagaggcggctgcagggccatgcagctttggaggcggaggtggcgaggctccggggtctcctgctcgatatccggggcaagatcgacgccgaggtcggcggcgtgctcccgtttcagaagccgtgcagtgtgggctccgtggcgtgtgccgatcctgctctgtgcttcaacggcaactcggaggttggaggcggctgggaggagagctcaagaccggcagccgcggactgtaggatcgatgaagtgcgagggatgtcacgggaaattgatgtcccagaaggattgcgtcattccatggatgttgttgcgagcttcgtgagttctgatcccctggctgaatgagcgcgtttgcctgattggcagttttttttttgggcctctgccagtgccagcttcttttggcttgcttgaaaggtcaaattttcatgtaattagaagaattgaggaactgataatgagtggaactacctccactgtggtccatgcttcttgtgctggtgttcagtgtgtatagggtacagaatacttacatatgactatatgggcactgaaagaaatctaaaatgcgaagctgtactgcaggtatgccaatgaagtgcccttgacttcc

SEQ ID NO: 53352 - DNA, 275 bp, Zea mays
  Clone ID: MRT4577_148659C.1
tttgtggaaatttatctgtgttggggcaaacgcttgaaagggagcgcggcatccgtcctccggccccataaacccattcacttggttctacaagagacaccaccaccggatgacccacaacacatgggtccccaacaatgcgaccttcaccttgaataagcttaaacagggctccagacagacattttttgtggacacgcacgaacacaaaccgctacggttcagggagaggaacaagcagttccatttccaccccacccgacgccatccctggg

SEQ ID NO: 53353 - DNA, 192 bp, Zea mays
  Clone ID: MRT4577_14865C.1
gcttctcagcaaacgccctctcgaagttcacaagctgattggcgccaccatcatgatgacgcctgaccgcgtcaccatgcgccgcatctgtgctatcatcatccgctgggatgacattgactgatacctcagcgtcttgagtgctgataacgtgattaggccgtttgctgagaagcactacgccgatctggt

SEQ ID NO: 53354 - DNA, 895 bp, Zea mays
  Clone ID: MRT4577_148660C.1
tgcgtcctcctgcttcccacccttccgtgcccggcaccggcagccggcaggggcaggaggagaggatcgccagttcgccgccgtcccggcaccggcggatgtcggatcgggagctccgtcctctgcgctccatcagaatcacaggggacggtcgatgcctgttcaggtccgtcgcttatggtgcctgcttgaggagaggaaagcatgcaccgagcgacagcgcccagaaggaactggctgacgagcttcgagccaaagtagctgacgagtttgtcaagagaagaggagacactgaatggttccttgaaggcaactttgagaattatgtgagacagatgagaaagcctcatgcttggggaggagaacctgagctgttcatgtgttcccatgttctcaggatgcccattaccgtctacatgtatacaagcagctctgatggccctaggatcatagcagaatatggccaggaatatggaatggacgatccagtccgcgttctctacgacggctatgggcactacgacgccctccagccatctctcgtaagaacacaatcaagactgcgaggtgtgtaggtcaccgggggctgcgctgcctaagcttcttctacaggacagctgcgtaactgcgagcagctcaagatttgacgacgctatttttctccagttcgacacagccgtatagcaaatacgaaactatgcctggccttgactgtaccagccttttctgttcttcaacgtttgatgtataaataaaaaaaaactcgtcacccgagtcagaaaatcagttgagctactacctggtaccatgcccgaaaaaaaaaaaaaaaaagcatcgagtgaccgaccgtgtaaagtttcttcgatcgtttttgctcaacaagaatgctgcatag

SEQ ID NO: 53355 - DNA, 478 bp, Zea mays
  Clone ID: MRT4577_148661C.1
aggggggaaagggccaaaatagggtttaatttccatgaaccccaaacaaaggcatgaactattctgggagggcgaagaggtaataactatacattaaaaacccgggaggggaacatggggttgggaaaaaactaccccgacccccccccccccaaaaaaaaaaatatagcctttcacgggaaccggaacaggggatcttttgggggggcacggggaaaaaaaaccgggaggtggggccaccgaggcccggaaaacctttgggtggggccaccaaaaactctgaaacttcttggggggggatctggaatcaaagggcccccaaaaaatatattctgcccgggggttaaaaaatcaagaaagcccgggggagagctaaaaccctgggggggcgggaaaaaaacaaacccgccagttttctgatcccaggaaaaaaaagaccgggaagatctggccccttggggggggggggaggaccccc

SEQ ID NO: 53356 - DNA, 1782 bp, Zea mays
  Clone ID: MRT4577_148662C.1
actcccacacgcctcgcctgctcgccactcgctccctcttcgcctcgccggcgtctgggaagcgccaccgccatcgccaccggacagcatgtccgccgacccgccaaaccagccggagcagaacggcgacgggtacgcgtacctgtcggggctgggcaacagcttcgcctcggaggccgtcccgggggcgctacccgccaacggccacaacagcccgctgctctgcccgctgggcctctacgccgagcagctctccggcacctccttcaccaccccgcgccaccgcaacctccgcacgtggatgtaccggatcaagccgtcggtgacccacgaccccttccacccgcggaccccgcccaacccgcgcctcctcgccgacttccacgacccgaacgccgccgtcgccacgcccacccagctccgatggcggcccgccgacctgccgccccgcgatgcagatgcggacctcgacttcgtcgacggcctctacaccgtctgcggcgccggcagctccttcctccgccacggattcgcagtccacatgtacgccgccaacaagtcaatggacgggtgcgccttctgcaacgccgacggcgacttcctcatcgtgcccagcaagggaagttgttgatcacaaccgaatgcggaaagatgctggtgccgcccggcgagatcgtcgtcattcctcagggcttccgcttcgccgtcgacttgcctgacgggccttcgcgtgggattgttttgtcacaccgagaacccatacttacctaaactgtgtgtgtgtgtgcaggtgccaatggcttggcttcgccgagggatttcctttccccgacagcatggtttgagcaggagcaccaccctggatacacaatagtgcacaagtatggtggcgagctgttcagcgccacgcaggatttctctccattcaacgtggtcgcgtggcatgggaattatgtcccttacaaggtgtgttgtatgccattgtacacctgtctgccattgagatgtgtgtcgctgttcctccacccccttctctttcagtatgatctgagtaagttctgtccattcaacaccgtcctcttggatcatggcgacccgtcagtgaacacagatggctggttgctgagaatacattccgcccaccctactaccaccgcaactgcatgagcgaattcatgggcctcatctatgggatgtacgaggctaaggccgatggttttcttcctggtggcgccagccttcacagctgcatgacaccgcatgggccagacaccaagacgtacgaggcaacgatcagccgtgctgctgccaacgagccatccaggctcagtggtacgttggcgttcatgtttgagtcttggcttatccctcgcgtgtgcccatgggctctggattccccgtgtcgggacctcgactactaccagtgctggatcggattgaagtcacacttttcacctcctgctgctgctgttgatgatgagaacgagtagctgcttacagcagcagtcttggaacggacaggcagcgaactgaaactggggtggatatgctgtacgtcgtgtcctgcttgctgtcggtttctgaagcttttagctggcagggacaggcggctgttggctttgctgattgcccaaccctctcctgtaatattaatcctaccagagaaacttaaacttgactcaaccgatatgctattaaataaataaagcaagcaagttaggatacgaaaaaaaaaaaaaaaaaaaaaaaaaaaaaaagaaaaaaaaaaaaaaaaaagcggcc

SEQ ID NO: 53357 - DNA, 2181 bp, Zea mays
  unsure (1)..(2181): unsure at all n locations
  Clone ID: MRT4577_148663C.1
gcggcctaatgatttcgatcctcgaaagtggccatcccctttttatatcatttgataccacaagacctgccatgttaagcaatatgtgcggtgtgcacatgagncacatcacaacgcaacagtgggttccaaatctaaatacgtagccccaccttgcaaggctgacctgtagaagcgaacaagacgcgtgagcacttcctttcaccccctcgaccccgatcgaatcgctcgaacaattcactgtgcatcgatctaggcttgcgcgaggatccaattccatccgctctcctttgaggtcgtgatcctcggagttggaggagttcttcgcgagcctctttttgccccgatttctttttggcttatttgtgcgagctttctcaggagcagaagaggcagtttgcaattccgatgcacccaggcctcaagatccaactctgaggccttctccgaggcatccgcatcgatctgcgcaagaagatgggtaacgcgggaagcaacggtggaggccccgccactggtcaccgccgtcggagctccggccacggccatcaccagcaggcgccgccgcctccccagccgcaggagactgcgcccaaccgctacgtgttcgcggccgccacgccgtacccgccccagtaccctaaccccaacccgccgcagtactacccgcagtacgggaactactacccgccgccgccaccatccgtgccggtgccccttccggcgccgtacgaccaccaccacaggccacccaccgccgcccctggcgagttcccgcccccacccaccgcccacccccacaactaccccggctgggccgggcggtatccctcctacggaccgcatctgtctatgccgacgccctacgttgagcaccagaaggccgtcactatccgcaacgacatcaaccttaagaaggagacgcttcggatcgagcctgatgaagaatgccctggccgcttcctcgtcgccttcacctttgacgccacggtcgctggcagcatgactgtttacttctttgcaaaggaagagctcaactgcaatctaacaacagtgaaagaagacctaattaagcccattactgttagcttcaaagagggtcttggtcaaaaattcaggcagccttcaggaacaggaattgacttttcagtgtttgaagaatcagatttattaaagcagggggacatggatgtatatccacttgcagttaaagctgaaacaacattatctgttgatcacccaccagaaggggatgaccaaaagatgataactcctaactcacagatcacccaggccgtgtttgaaaggaaagaaaatggggattatcaagtaagagttgtttgccagatcctctgggtcaatggaactaggtatgaactgcaagaaatatatggcatagggaactccatggaaggtgatgctgatgcaaatgatccagggaaagaatgtgttatttgcctctcagaaccaagggatactactgtcctgccatgtaggcatatgtgcatgtgcagtgagtgcgccaaggtcctgaggtaccaaaccactcggtgccccatctgcaggcagcctgtggagcgtctcctggagatcaaagtgaacaacaaatctgaagatcagcagcagacgccccaatcgccaccgctcccagacctggctccgcagcaggaaggggtgtagccgtgatcaaagtcagttctgaggtattatatggctcgaatttgcggaccttcctgaaggtttgttctctcatttgagcaacgggggatgcaactggtacttttacctttagcatatgtaagcttctggcatcgcatggctttgccgacctctgctgtatctgcctatctggaggtcggagagcaggatgtcaaggagagtgtgtatcatatatacatcatgcatgcgtgtgccatggctaccttaagaagcgtatcgaggaggattcctgatgcctggttgacttcctccagggaaaaaggggaagagaactagagaagaggtggtctcttaaatctgtacaaaaatgactatttcaccttgattccataccttctctgttatggcctgaaaaggtcgatgagtattttacttggagttataaaaaaaaagtcagtgcataggtcgcctctcggccaattatttaaaaaaaaaaaaaaaaaaagcggacgctgggtcgac

SEQ ID NO: 53358 - DNA, 469 bp, Zea mays
  Clone ID: MRT4577_148664C.1
gtatttcatactatatgcgccatgtaatgcagaaacttatatatgtaatattttaatttgtatttcaggtttgtttggaaggacaaatctctcgaaagtcagctatgaaaagcctgagtgagggccgttcaccttccggtgatcaaataccatggaaattttgtgaacagttccaagacaatgtatttccaagtctctcaggagctcgtatagtgcgaattgctgtccatcctagcgccttgagggtacattctttttacatttatgtgatttggtttatgtaagttgacatcattttgtatatcattctatgttttttgccttgtgtagcttgggtatggctcagctgccattggccttctatctcggtactatgaagggcaaatgagaagattatttgatgacgatgaggaggaaacggaagagcctgttgtgaagattgctgaagctgcagagaaggcttcactgc

SEQ ID NO: 53359 - DNA, 315 bp, Zea mays
  Clone ID: MRT4577_148665C.1
aaaaaaaaaaaaaaaaaaaaaaaaaaaaaaaaaaaaaaaaaaaaaaaaaaaaaaaataaggggaaaaaaaatattttttacacaacctttcaatagaagacacctttcttttgttgccccgcacgtttttttccctggtcgtcgtttttaaaccccttgtcttggtaaacctggggggcctcccttgttattcccctttcttcccctccccttttagctaattggcctttttcgtatgaggcccccaacatttgcccttcccgacttttgtttagcccttttggggaaacggccccccccccccccctgttcttt

SEQ ID NO: 53360 - DNA, 659 bp, Zea mays
  Clone ID: MRT4577_148666C.1
gccagctcctgcgcgagatcaaccacgaggatggcgtcaagctcgtcaatgtgcacatcaaccacgctgacatgtccctatacctcgcattcgattacgcagagcacgacctctatgagattatcaggcatcacagggagaagctgagttcctccattaacccatacactgtcaaatccttgctgtggcaactgctcaacggcctcaactatcttcacagtaactggattatacatcgagatctaaagccttccaacatactggtttggtgccaccaattatatagaaatataattgcacaatttctgcaaacttgtcctcttgctgatacttatttcatatgtgccactaaggtcatgggagaaggagatgaacatggaattataaagatagccgattttggacttgctaggatatatcaagctccactgaaaccattatgtgataatgggggttgttgtaactatctggtatcgtgctcctgagctgttacttggggggaaacactacaccagtgctgtcgatatgtgggcagttggttgcatttttgctgaactgcttacactgaaacctctattccaaggtgtggaagcaaaaaacctccgaacccttccaggtatgggcactttcactcagtaattattgttgttatcttgcta

SEQ ID NO: 53361 - DNA, 411 bp, Zea mays
  Clone ID: MRT4577_148667C.1
cgcccgcttacccatggagacgctgaaccaaagcacgtcgcagagcccgatcctcgaccaatccaacctcatcttctcgtcataggcttgacccatgcaccaccatcatgctagcagttagaagcagacgaggaccagcttctctggagctgactggcgatacgcaatcaatgactagcgacacagctactggctaagaatactagattagttcaagctaaactactctaagcatcttatgctgcgtctagatgaataaccagatgatgtgaacaagctctatcagaagttgcaatagcgtgcccatcgtgataaatgcagacctcctcacgcacaatacgattgagcagatctggcaagagatcaacaattgctgattgatccacaagaaagatgctacattctagaaca

SEQ ID NO: 53362 - DNA, 1295 bp, Zea mays
  unsure (1)..(1295): unsure at all n locations
  Clone ID: MRT4577_148668C.1
gggaaaacatagtcacagttaggagaatcaaaacccgagagcaatggaggcggtggggaagagcgtgtgcgtgaccggcgcgggcggcttcatcgcgtcgtggctggtgaagctcctcctctgccggggccaatacaaggtccgcggcaccgtgcgcgaccctggtgctagcaagaatgctcatctcaaggtgatggaaggagctggggaaaggttgcagcttgtcaaggctgatttgttggactacagcagtgttgcatcagcaattgccggctgtgagggtgtcttccatgtagctagccctgtcccttccggtcggtcctccaaccctgaggtggaggtcataggtcctgctgtaacaggtacaaccaatgtgttaaaggcttgctatgaggcaaaagttgggcgagttgtggtggtgtcttcatgtgcagctgtctatgctaatcctaattatcccaagggtaaggtctttgatgaagactgctggtcagatgaagcttactgcaggaagaacgaggattggtattttggcctccgaactctttctgaataataatgtatgtaggcggtgaaacagcattgccagcaggttaatcctggcatcatgctggagcagcactgnagntctctctctctttttttcatcccccatactatctagtggttcaggaccaaatagtaggcccagtgctgactgggaaattgtactcagtaatatggcgctgatatctaggatgttgctgactctcttcttcttacttacgaaaagccttcagcgtttggacgatacatttgcagttcacatgcaataaaaatttttgatatgataaacatactgaagaccatgtatccgtcttacccttatcccaaaaattttgtggaaaatgatgtcaactctgtatacagctttgagaaactgcaaaagctggggtggcccttcaagcctataaaggaatccccccgtgacactgttgaatcctacaaggcatttggcatcctgaattgaacatccaactaggactgtttccatttgctgttgcctccgaactcctcctgaataatgtaggggcagttaaacagcagcagccctgccgatttctttatttttcaaaattgttatctagtggttcaggaccaaataagtaggccaggtgctgactgttgtatggtttgtggcctattgtcgttgctaaaaactaaaaaaaaaaaaaaagggcgggcccccctttttttttttttttttttttttttttttttttttttttttttttttttttgttattataatttag

SEQ ID NO: 53363 - DNA, 913 bp, Zea mays
  Clone ID: MRT4577_148669C.1
ggccgcttttttttttttttttttagaaacaaccgaggtaaaccaagagcgagtttggcaacctattttttaaagttttttctttttcaaaagaaaataacctattttcaaagtttttattttttcaaaagaaaattaactaattttctaagggaaaacgaaaactctttagtaaaatgaggttgcactaaaagaggaatctagagaggtcccgatgaccgatcagtttccaatcagtagttccatgtgaggctgtcacgactacgactaccagtaccactgccacctgaaggagtgaaggatatcctacagcctccagccacgtgcaagcagccaagcactgcgcctgtgccttgaatcatatctgcggttcctcagcctagttcacattatggaaggaatcgatgatggcgtcggcaagataatcacacttagccagggacagcccagctaacgagatccgcccatccttggtcatgtaaatatgccatttatccgtcatgttgtcactctgcgctttgttcaagccggtgtaggagaacatgccaatctgcctcagaatgaaagaccagtccttgccgctcttgtccttggcagacaaactgtcgtagagcttctgtcttacattcttgatccgtccagccattagctccatctcttgtttccattcaccaaacatgattggatcaccaacaacgttggcaactatcttggcaccgtgaataggggggttcgagtacatgggacgtgccaatcgtttcagctggctctttaccctatctgcaacttctggtgctgagcacacgacatttatcgcaccaaccctttcagaatatagaccaaggttcttgctgtaagattgtgcaacaaacacttccatgccacgcttaacaaaaagcctgacagaacgcga

SEQ ID NO: 53364 - DNA, 290 bp, Zea mays
  Clone ID: MRT4577_14866C.1
ccggccggtgactcgtctctataccagaggaacacgctttgctctcgttctccctatctccgacgcacagacgtgctgcatagtcgcctgtcgatgtgcctaccttgttacaccgctagcacggtgggatggcgtatctagctcccgcgaccgccgcctcttccctccgcacccccatctacgtagccgcctcttcccggcgccgttcctttctccctgccgccgtcaaagccatcgccagttctgcacatcccatcctctcctccctccgcatggccgcctccgccgcc

SEQ ID NO: 53365 - DNA, 1126 bp, Zea mays
  Clone ID: MRT4577_148670C.1
aatcgacatatcttttcacaattcagaggttatgttgggatgaattatcctcaataattaagcacgttactgttagcttcaaagagggtcttggtaaaaaattcaagcaatcttcaggaacatgaattgccttttcagtgtttgaggaatcagacttattaaagcagggggacatggatgtatatccacttgcagttaaagctgaaacaacattgtatgttgatcacccaccagatgtgggtgaccaaaagatcaaaactcctaactcatagatcactcaggcagccaggtcgtgtttgaaaagaaagaaaatggggattatcatgtaagagttgtttgccagatcctttgggtcgatggaactaggtatgaactgcaagaaatatatggcatagggaactccgtggaaggtgatgctgatgcaaatgatccagggaaagaatgtgttatttgcctctcagaaccaagggatactactgtcctcccatgtaggcatatgtgcatgtgcagtgagtgcgccaaggtcctgaggtaccaaaccactcggtgccccatctgcaggcagcctgttgagcgtctcctcgagatcaaagtgaacaacaaatctgaagatcagcaacagatgccccaatcgccaccgctcccagcactggatccgcagcaggaagaggtgtagccgtgatcaaagtcagttctgaaacattatatggctctcgtttgcggaccttcaggccttccctaaaggtttgttctctcatttgagcaatggggaatgtaactggtactttacctttagcgtatgtaaggttctggcatggctttgccgacctctgctgtatctgcctatctggaggtgggagaccaagatgccaagaagagtgtgtaccatatatacaccatgcatgcgtgtgccatggctaccttaagaagcgtagcgaggaggattcatcattcctggttgacttcctccaggaaaaccaggggaagagaaggttgtctcataaatttgtacaaaaaatgactatttccagggaaaccaggccttctctgttatgccatgaaaaaaaaaaaaaaagcggcctgtgcctcgatgattatttccaaaaaaaaaaaaaaaaaagcggcc

SEQ ID NO: 53366 - DNA, 1314 bp, Zea mays
  Clone ID: MRT4577_148671C.1
ttttttttttttttttttcaacttaatgataactcaatttatttcgcaaatcatccttacagtaacttcaatgagaactcaatttatttcaaaagcatccttacagcactgaaagaactgtaattacaaatatcaccaaataaatgaaacaatccaaatattgacaacacaaatatgtaaacaagatgcatcccttcagaatcattaacaattttgtccaccacttgcagttcttgcatgtaactcctcaaaggtatcaccatccgacggtcgtctttcacctgacttagtatcatgttcaacttggacaatcggtttcctcctaggtgttagcttctttccagaagatgaagcaaattgagcccattcttgggactcattagttccctcatgtagttgcaagtcatctggtgtcgtgcttgcattttcaacttgctctacaaaaataggtcatctacgtcgttttggtacagaagactccccgcgttgatcatcgtcatcaacatagattttaggttttgctccaacctttgcatttactttcctgcacctcttccttgtcttcgcgcctgtgtatcgacactttgcacttcctgttctgtggccatactcaccacatacaccacactttgactgtcttgtagcttttacttttcccttatcaagcctgcattgacaatcacatcttatcaagcccaggtgggagatgttcaaaaaaaaatatcatcaggcaatttgccccatttgctagaagtgacaccctccaatgagatatcctgcacgttgctagtggtgacatttgcagaaccagagaattcttcatcaaagtccttctcattgccatctgccatctgtggcactgagtggggcgggtgcgggaggagctgggtgccgcctgggggtggggggtgcgaacgggaagtggacgccttgtctccggcgggcgcagcgctgggcggagacggatggctccagtcactgaactaactttcgatttgtttggatctagtgatcctattcttacggtgagattcaattaggatggttaaatgggattaaatgacaattatttaagaggttaacgataagagtggtaaatatttaatactatttgtaagagtggcaattggttaatgactctttgttagagtggcaaatctttagggctcgtttggcagcctggtttccctccgggatcccgacccaaccccctggtcacgaatccacgggctcaaatctcccccggggggaaaatttgcatttggctgcccatttcccgggcccgattcgcgtgaggtcgggcagcccggccgg

SEQ ID NO: 53367 - DNA, 838 bp, Zea mays
  Clone ID: MRT4577_148672C.1
cattgggtacctcgaggccggccgggagctagccaagcagacccgatcgaccgccgtcgttgcaatgcaagtggccgcccgcggtcggtcaccggcgttgcattgccccgtctcttagtttgtcgccgtcgtcggccgtcgatcggggcagagaatgggacggctctcctgcggcggcgtgcagcccaagctccgcaaggggctgtggtcgcccgaggaggacgagaggctgtacggtcacatcattcgacacggcgtcggctgctggagctctgtccctaagctggcagggctgcagcgttgcggcaagagctgccgcctgcggtggatcaactacctccgccccgacctcaagcgcggcggcttctcgcagcaggaggaggacctcatcgtggcgctccacgagatcctggggaacaggtggtcgcagatcgcgtcgcacttgccggggcggacggacaacgagatcaagaacctgtggaacagctgcctcaagaagaagctccggcagcgcggcatcgacccggccacgcacaagccgatcgccgcggaggcgggctcggcgctgctgcaccacgacgaccagagcaagccgcagcagcagcctgcggcggcggccgtgttcgacccgttcccggtgaccgacttcggcttcgacctgggcgcagcggcattgtacggcgaacgtccgacgcgtcgtcggacgccgggttcgtggccgactacagcagcgtgctggacgtgtcggagaacctgggctacggggagagctccagcaacagcagcggctggactgcgcggagatgggcatgccgtgctcgacagcgaggcgctgcac

SEQ ID NO: 53368 - DNA, 304 bp, Zea mays
  unsure (1)..(304): unsure at all n locations
  Clone ID: MRT4577_148673C.1
gaccctcgaggcctgccgggaaaagaaatgcgatcttgaatcgcactctcgataaatagtcaatatggcatcgtcactcaggacctttacgtcgtctcttaggctggccttgcctctggctagaccaacttccgcccgatccgggttccgtccgatcccgagcggaccatcgagtagccgatgggcgagcaccagtgccgatgttaacaaccacgggccttatctgacgttgngagagctcgcgaacaacaagggtgccacanagactcacgtacgattaggacgaggatggtcatccacgaaa

SEQ ID NO: 53369 - DNA, 354 bp, Zea mays
  Clone ID: MRT4577_148674C.1
gacaccaactaaccacataaaaagaccaacaatgtccccccaatggcagccccaacatagggtcggcttattctccgcgggcgctgctacagcaaccataccgcacccatgctcccacactgctaacaatctcctatatctcccctacttcccacatacctcttactagcggtgtgatcaccgagtgaaaacaccatacatcaaccatccagcatccaccacgcgcttctaacatgcatcataccattatcaccaacgatcatccaacatctgacatccctattacagcagtcacctattgtcccttaagaggcacacaacataacgacacaacaactacaacaacttgtgcta

SEQ ID NO: 53370 - DNA, 1208 bp, Zea mays
  Clone ID: MRT4577_148675C.1
ccagctaatcaaagtttatataaattagacaagcaatccggttaggaatcgttctgacccaccaatccggcacaaacgaacaaggcctatatataggcacaataccagacttgacaagagcaaaagcaggctcaacataaagactgagcaccaaacacggtttaaaagtggcaagagtctaacttctaaattaagcaagtgctttccaaaaatacatggccggaaagtagactagatactgtggctcgattccggaaggcggaacggaaaatattatgggtattgggtacagggattccgcgagggttctcattttttggcataggatatagccatggggttctccggggtgatcttgaagccctggagagcctgcatcgccaccatggactggccgtcgtcctcgaactccacaaaggcaatgcctggtttggcttcgatcatccggacttcccggaagccgggatactgctggaacaggatctggagcatcatgctcgtggtctggtctggcaagttctggatgaagaggatgttgttcggaggagcaggtggctcctgcgaagccttgcccagacgagacgcttgatagccagttccattgctttgagcagcagcagcattggggccagcttgctgtgcctcttctgctcgtcgttttttctcagcagctttctcctcttgcttcttccttttctccttaggtgcataagtaccatcttcttttgcaatacagtctgattttgtttttgcatattgtactcgcatttttttgccgtagaaatcaaagtcttgcaatccacggaaagcattggtagcagctgtaatctcgctaaacaccacccatgcctgccctctcagtttctgtgttttcagagccaccacatccagtatccttccatactgcgagcacagggcataaagcgatctcttcaactcttctttcttgaccttctcgttgaggttgttgaggtagatggtctggtttggggggatgtcggcggacagcatctcgtctacctcctccgctgctgccgccgccgccgccgcagacgaaaaacgcagagattggtggtggtggtggtggtggtgctttcggtttcgggccgggaagctcttgccgcgcgagagagcgtgttgggttcctttcctctctctcttctctggtgtgtccgaataggtgggcctaggctgtgtatttggggctg

SEQ ID NO: 53371 - DNA, 256 bp, Zea mays
  Clone ID: MRT4577_148676C.1
catactattattactattcgcatgaacatgctttcaccatttatactagagatccatatgtgccaagggcactataaacacatggctgtccttccacttttaacttaatgagcatacattgttaatgcttttgaactctaccatactctacattagtctcgttctcatttatggacatacatataatcgacattttattttaaacctgcatgcctagtggtttcaccttatgacctgtaacttgcaacattcttgg

SEQ ID NO: 53372 - DNA, 1331 bp, Zea mays
  unsure (1)..(1331): unsure at all n locations
  Clone ID: MRT4577_148677C.1
ggccgcttttttttttttttttttaatcaagacagcttatatatatcatagggtgcaataccgtaattgacaagagcaaaagccgagtgaacatagagactgaggaccaaacctgatttaaaagtgttaagagtttaacttcgaaatcaagcgagtgctttccaaaaacacatgactggaaagtgggtaccgtggctcgatttctaaaggcggagcggaaagatcttaggtctagtttggatactctagtattgagctcaatctacatgtattgaggtagattagggtgtaacttaaactaatttacaccacaatccacctcagcacatgtggatttgggatcaatactagagtaccgaaacaaagccggtacagagtcccctagggttctcattttttggcataggatatagccatggggttctccggggtgatcttgaagccttggagagcctgcatcgcgaccatggactggccatcgtcctcgaactccacaaaagcgatgcctggtttagcttcgatcatccgtacttcccggaagccagggtactgctggaacaggatctggagcatcatgctcgtggtctggtctggcagattctggatgaagaggatgttgttcggaggcgcaggtggctcctgtgaagccttgcccagacgagacgcttgatagccagttccattgctttgggcagcagcagcattgaggccagcttgttgtgcctcttctgttcgtcgttttttctcagcagctttctcctcttgcttcttccttttctccttaggtgcataagtaccatcttcttttgcaatacagtctgattttgtttttgcatattgtactcgcattttttttgctgtagaaatcaaaatcttgcaaaccacggaaagcattggtagcagctgtaatttcgctaaacgccacccatgcttgccctctcagtttttgtgttttcagggccaccacatccagtatccttccatactgtgagcacaaggcataaagcgagctcttcaattcttctttcttgaccttctcgttgaggttgttgaggtagatggtctggctcggggggatgtcgccggacagcatctcctcaacctcctccgctgctgccgcccgccgccgcagccgaagacgaagagacgcagagattggtgcgggtgctttcggtttcgggccggaaaattcttgccgcaagcgagagtgtgttggttttttccctttgtctatgagtaaggggttttttttttttttttttttttttttttttttttttttttttttttttnnnnngaattttttttccggccggctcgaggtcccaatg

SEQ ID NO: 53373 - DNA, 1108 bp, Zea mays
  Clone ID: MRT4577_148678C.1
acacctttgggggtttttttgaccaaactctgatttaaaagtgttaagagtttaacttcgaaatcaagcgagtgctttccaaaaacacatgaccggaaagtagataccgtggctcgatctcgaaaggcagagcgcgaaaaatcttaggactagtttgggtactctattattgaggtggattagagtgcaacttaaactaatttaagtcataatccacattggattgtgtcaataacaaagccggtacagggagtcccctagggttctcattttttggcataggatatagccatggggttctccggggtgatcttgaagccttggagagcctgcatcgcgaccatggactggccgtcgtcctcgaactccacaaaagcgatgcctggtttagcttcgatcatccgtacttcccggaagccagggtactgctggaacaggatctggagcatcatgctcgtggtctggtctggcagattctggatgaagaggatgttgttcggaggcgcaggtggctcctgtgaggccttgcccagacgagacgcttgatagccagttccattgctttgggcagcagcagcattgaggccagcttgttgtgcctcttctgttcgtcgttttttctcagcagctttctcctcttgcttcttccttttctccttaggtgcataagtaccatcttcttttgcaatacagtctgattttgtttttgtatattgtactcgcatttttttgccatagaaatcgaaatcttgcaatccacggaaagcattggtagcagctgtaatttcgctaaacgccacccatgcttgccctctcaatttttgtgttttcagggccaccacatccagtatccttccatactgtgagcacaaggcataaagcgatctcttcaattcttctttcttgaccttctcgttgaggttgttgaggtagatggtctggttcggggggatgtcgccggacagcatctcctcaacctcccccgctgctgccgcccgccgcgcagccgaagacgaagagacgcagagattggtgcgggtgctttcgatttcgggcagggaaattcttgccgcaagcgagagtgtgtggtttttttccttgtcttccc

SEQ ID NO: 53374 - DNA, 354 bp, Zea mays
  Clone ID: MRT4577_148679C.1
agctcgaattccgttgctgtcgggacaatctgttggccatcaacttggtgacaagtttagcaatgctgtgtaccagactgataggtcgaaaggcttttacttcctcagccccctccttcttagggataagagtaacaaatgcagcgttaagtcttccaaactgctggaattttctgcaccaaattgcagcaataacagccatcacatccgtcttgataattggccaacaaactttataaaatctgcctgtgtaaccatcaggccccggagccttatcagaaggtagttgcattatggattccagaacctcattttcatcaatctgcgcatctaaatcagtcaggtcatgagaag

SEQ ID NO: 53375 - DNA, 454 bp, Zea mays
  Clone ID: MRT4577_14867C.1
tggattgaccgaggcgtgagattatgtatgtgcaaccatgtcggtcggcttgtggtatgcaggtgtggagcacaggcacggtggtcgacgactgaggtgacgatcatgcgggcttgtgctgatggaccgggagcggtgcaggacaagtgttgggtcttggctgacggaccggagtagccaggtgacttgttgtggtggctgacacctgggacacgcactcacacaaggacatggcagagcagccatattgctggcgcagtcgaggactggtaggacacgtgtccaggacatggggaacacgcacgcggtgcgatacgacggtttgttggtggagcctcaaaaccaccctgcgctatgaatggtgggttttgccgagtttgggcctcaaaacttggcggtggcggttcgggagggaacctgtggtggcacgtggcctcacagcgaaacaacttcg

SEQ ID NO: 53376 - DNA, 1319 bp, Zea mays
  Clone ID: MRT4577_148680C.1
tgggtacctcgaggccggccgggccgggattcagccgtagtgtcccagccccaaatacacagcctaggcccacctattcggacacaccagagaagagagagaggaaaggaacccaacacgctctctcgcgcggcaagagcttcccggcccgaaaccgaaagcaccaccaccaccaccaccaccaatctctgcgtttttcgtctgcggcggcggcggcagcagcggaggaggtagacgagatgctgtccgccgacatccccccaaaccagaccatctacctcaacaatctcaacgagaaggtcaagaaagaagagttgaagagatcgctttatgccctgtgctcgcagtatggaaggatactggatgtggtggccctgaaaacacagaaactgagagggcaagcatgggtggtgtttagcgagattacagctgctaccaatgctttccgtggattgcaagactttgatttctacggcaaaaaaatgcgagtacaatatgcaaaaacaaaatcagactgtattgcaaaagaagatggtacttatgcacctaaggagaaaaggaagaagcaagaggagaaagctgctgagaaaaaacgacgagcagaagaggcacaacaagctggccccaatgctgctgctgctcaaagcaatggaactggctatcaagcgtctcgtatgggcaaggcttcgcaggagccacctgctcctccgaacaacatcctcttcatccagaacttgccagaccagaccacgagcatgatgctccagatcctgttccagcagtatccgggcttccgggaagtccggatgatcgaagccaaaccaggcattgcctttgtggagttcgaggacgacggccagtccatggtcgcgatgcaggctctccagggcttcaagatcaccccggagaaccccatggctatatcctatgccaaaaaatgagaaccctcggggaatacctgtaactgcccacaagattttccgctccaccttccggaatcgagccacagtatctactttccggccatgtattttttggaaagcacttgcttaatttagaagttagactcttgccacttttaaaccgtgtttggtgctcagtctttatgttgtgcctgcttttgctcttgtcaagtctggtattgtgcctatatatagggctgtctcgattatctgctgcctacagactacagtggtagaagttgggctgggcgggtcatggccgtatctctcgcttgaaggcgaggcgaaaatcatggccccatatccttccacctggtcaatggtcatggtgtatatatgcctatagtatattgccgg

SEQ ID NO: 53377 - DNA, 386 bp, Zea mays
  Clone ID: MRT4577_148681C.1
tcgaggccggccgggacgcgcaatttacctaacataataaactatgcgggcatgcctacccacggcttgtcctcctcgccctcgcggcgttgttgcctgccggactcttcacacaagggtcaatgaacagcaagtccaaggcgtatggtgccagagccgaactgccatggtctagggtgatctggttgcgcaccacattcccagaggcttgcatcgccagcatcgtggcggcgtgcatcccacaatgcggtcatggaccatatggccgagaagaacatctacgtgggcgactacgctcagcccaaaacgcagagcctgacactcatggacgccgtcgagcaccagtatttcaccaactgggacgcagtgccgaagacctgcatcac

SEQ ID NO: 53378 - DNA, 223 bp, Zea mays
  Clone ID: MRT4577_148682C.1
gcgtgtatatagtataatagatgatatgctgtttttctggttagttttcacattttgatatgattttgatttgtgaatgagtgcagactgggccgccagattgcagtatcctggtggtatcctgtggcttgcttgtggatatttagaatgagatgatactgcgtttcaacgcttgtactttacatgcaacctgttaccaacctgatacaaaaaaaggccccta

SEQ ID NO: 53379 - DNA, 156 bp, Zea mays
  Clone ID: MRT4577_148683C.1
attacttggaaacagctaccatacaccaagaacgacggaaacctgggtggatgcatacacatttgtgtgttatgctaaggagactgatgtcttaccagcacatgttagaggagaggtgtttgatatcgaagaagcggctgaatgatggacaattgc

SEQ ID NO: 53380 - DNA, 439 bp, Zea mays
  Clone ID: MRT4577_148684C.1
cagctgcctgtgtaagacggtgtaagaggattccttcccgtctacgttgcaccactatgagaggcctaagtaccacctccgaggtcgccatctcgtagagacctgggcctgctatacctatgcgagaaggaaggcatgtgagctgctggatgcctcaagaggatctaggaaatatcagtcatccttgtatgttctttagatgtcagatacaaatgttccttatttttcaaagcacagggtgctggcggtctcgttttccctgtcctggatggaagcaaacggacctgagtactttgaatggcccgcctcaaacataaactgtgagcctgtaagtgtacgtgtgcgccggtgtcgtcaagaagcaaagcaaatcatttaaatctgtccccaactcacagttggaacgcccatgttttgctatctctatccacatctgtca

SEQ ID NO: 53381 - DNA, 3113 bp, Zea mays
  Clone ID: MRT4577_148685C.1
caggacgaccccgcgcctcctccccaatactcaccaacgatggggcaccaggcgcagcacggcacggacgacaccgaggagctgctcgcagcccaccggcagctgtggtgccatgccctgggctacgtcaagtccatggcgctcaagtgcgccctggacctgcgcatccccgacaccatcgaccgctgcggcgggagcgccaccctgggcgagctgctcgccgcgagcgagatcccggcgtccaaccacgactacctccggcgggtcatgcgcacgctgacagccatgcgcatcttcgcggccagccacgaccccgccaaggccgacgacgcggacccgctcaccccggcgttcccgccgctcgtcagcagcagcagcagcgtcaacgacgccgccggcgcctcgaaggagaacactactaccccgagcatcctccccaaggtggcccccctggtccgccccaacaccatctccctgctgttcagcatgggcgagtggatgaagtccgaggtcgcgccgatcggctcgttggtccaggcggggctccggctggggctgtcggtgtgcgtggtggcccacgcggcctcgatgtgcagctgcttcgacgggcgggctgcaatcaatcggggcaggctgggcttcatcgaccccgatgtaccgcgctgtgtgtaagccgtggtccgccggtgcccgcacgtgttcgacggcatcaagtcgctcaaaaaagtcggcggcggccgcggcaccgccgccgccgccatcgtcgccgccttcccgcacatccagaggtgcaccgtcatggacctcccccacgtcgtcgccgaggctcccgccggcaccgccggcctgtccttccacggcggcgacatgttcgagcacatcccgtcggctgacgcactcatgctcaagtggatcctgcacgactgggatgaggacaagtgcatcaagataatggagcgctgcaaggaagcgatcggtggcaaggaagcaggggggaaggtgataataatagacacggtgctcggatctcgggcagacgacgacgacgacaagacgtgcagggagacgtatgtgttggatctccacatactgagcttcgtgaacggggcggagcgggaggagcacgagtggaggaggatcttcctggcggctgggttccgtgactacaagatcacgcacacccgaggcatcccgtccatcatcgaggtcttcccgtgatgatcatggatcgagagtcgatcatatatgcatgtttgtacgtgtttgtgtcataataaatcgatcgatcatgttgtttactctttttatttcggtatgtagttgcatctgtgggcgggctaaaataaatcacggccggccgggcttcatcaagcccatgtatccagctgtgtgtaataatgcaatggaaaacgaaccaaaaagaatgcttccattccagacacgactctcggcaacggatatctcggctctcgcatcgatgaagaacgtagcaaaatgcgatacctggtgtgaattgcagaatcccgcgaaccatcgagtttttgaacgcaagttgcgcccgaagccttctggcggagggcaccgcggccggccggggtgtcatcaatcaaatactcagacaaccatggggcaccaggcgcagcacggcacggacgacaccgaggagctgcttgcagcccaccggcagctgtggtgccatgccctgggctacgtcaagtccatggcgctcaagtgcgccctggacctgcgcatccccgacaccatcgaccgctgcggcgggagcgccaccctgggcgagctgctcgccgcaagcgagatcccggcgtccaaccacgactacctccgacgggtcatgcgcacgctgacagccatgcgcatcttcgcggtcagccacgacgaccccgccaaggccgacgacgcggccgccatctcttaccagctcaccccggcgtcccggctgctcgtcagcagcagcagcagcagcgtcgacgccgccgccgccggcgccggcgcctcgaaggagaacactactaccccgagcatcctccccaacatcgcccacctggtccgccccaacaccatctccctgctgttcagcatgggcgagtggatgaaggacgagagcgcggcgtccgtgtcgctgtacgagacggtgcaccggcagggggatgtgggcgtgcgtggaggacgacgcggccaacagggccagcttctacgagagcatggacgccgacacccggctcgtgatgcaggccgtggtccgccggtgcccgcacgtgttcgacggcatcaagtcgctcgtcgacgtcggcggcggccgcggcaccgccgccgccgccgtcgtcgccgccttcccgcacatccagaggtgcaccgtcatggacctcccccacgtcgtcgccgaggctcccgccggcaccgccggcctgtccttccacggcggcgacatgttcgagcacatcccgtcggctgacgcactcatgctcaagtggatcctgcacgactgggatgaggacaagtgcatcaagataatggagcgctgcaaggaagcgatcggtggcaaggaagcaggggggaaggtgataataatagacacggtgctcggatctcgggcagacgacgacgacgacgacaagacgtgcagggagacgtatgtgttggatctccacatactgagcttcgtgaacggggcggagcgggaggagcacgagtggaggaggatcttcctggcggctgggttccgtgactacaagatcacgcacacccgaggcatcccgtccatcatcgaggtcttcccgtgatgatcatggatcgagagtcgatcatatatgcatgtttgtacgtgtttgtgtcataataaatcgatcgatcatgttgtttaccctttttatttcggtatctagttgcatctgtgggcgggctaaaataaatcacggccggccgggcttcatcaagcccatgtatccagctgtgtgtaataatgcaatggaaaacgaaccaaaaagaatgcttccattccaaaaaaaaaaaaaaaaaaaaaaaaaaaaaaaaaaaacgatctagaactagtccccacgcgtccgcccacgcgtccgccacgcgtccgaaggggg

SEQ ID NO: 53382 - DNA, 209 bp, Zea mays
  Clone ID: MRT4577_148686C.1
ggcatgacgctaaatgtgacgctcgatgcagagaaatgaccatttaaaaaacgagaagcgtccgagggcaacggaacataatacaaaccgtgcggattgataccaaagacaagcgcggaactgaaagtgatggacacatggagcgctcacagtgcttattttacatattagatgtcatgttggaggcatcactcactagggagaggcat

SEQ ID NO: 53383 - DNA, 241 bp, Zea mays
  Clone ID: MRT4577_148687C.1
ggcatacactcaatcctatttgagattgcagaaccatcacccacccacgcaacaggcaatccttaagcgtaaactgaacaaccagaactgcataatgagagacctaactcacatctaaatcatcatgatcaatgactactacctaatctgcacacttgtcatgccagcagtattaatgaatcgacctaagcactagtgagacacaatttcattatagatccccatacttacatggaatttc

SEQ ID NO: 53384 - DNA, 601 bp, Zea mays
  Clone ID: MRT4577_148688C.1
tacttgcttccatgcctcggtagtttcggtcactattagttttgctatgcctttcctacataaataattttgctacctcaaaagcttctaaatatgatgatttatgctggagactgctaaccttcacacatctaataagatgaagcaacaagctagaaaagtggaatttgtcatatgtccggatgcaaaacgggtaacttcatgctttccacaatgtgtgtcgacatgatgcttgtagagatggttcgttcctttggttccatgctgacatattccttattattttgatgatatgaggatgattcaaattgattggttgttttttctaatttagcttggaccaatcttcaactcatggggcgcttcatcctcggcctcctacgcatgcacttctcctgcttctcctgctggtcatcgcccaaggtgcacttttcctccctgttctgttcacgtgcccatgtgtcattcttgtttttcactgtttaggatcgtgagggtgttattgcaataatagctgatggagaaatgagaatgattttcaaatgatgacaggattggcagaatgagagcgacaaaggaatgagctaaatcttttgaaata

SEQ ID NO: 53385 - DNA, 1334 bp, Zea mays
  unsure (1)..(1334): unsure at all n locations
  Clone ID: MRT4577_148689C.1
cattgggtacctcgaggccggccgggagtcccccgacccggagccaagccaacaaacagccgctccgccttcttccgcggctgcagccagcgcgaggtcatcattgaatggctgcaacgatgggttcaatatctgccaacggttcttaccaaacaaataggcccagtgcactaaagcaggcacctcacatgcaattccaacaatgttgcaacggtggacttaggttcttaagcaagcactcccaatccatgcgaagtaagatacaggtggctaaaagaagagctacagataatggaattcatccaaagactacgggacatcgggcacctattgtatgttctgctgggatgactattgtatttgttgcaactgaagtgcacccatggtgcaaaactggtggcctcggtgatgttgtaggaggactgcccccagctttggctgctatgggacaccgtgtcatgacaatagctcctcgttatgatcaatacaaggatgcatgggatacaagtgtccttgttgaggtaaatattggtgacacggtagaaactgttcgattcttccactgctacaaaagaggagtcgatcgtgtttttgttgatcatcctatgtttcttgaaaaggtatggggcaagactggagcaaaattgtatggtcctactactggaactgactatcgagataaccagttgaggttctgccttttgtgccttgctgctttggaggctccaagagttctcaatttcaacaattctgaatatttctctgacaaaatgggaagatgtgtcttcgtagccaatgattggcacactgctatttttgcatgttatctgaagagatgtatgagtggtggaggccgcggcggtgggcggggaggccgtgaagggggcggtgacggaggcggagaaggaggtcgccagcgagggcctgcagctggtggccggcgcggagctcgccggggacgggctagtgcagnccgcggtggtcgccggcgccgaggcgctcggggtcgtcgtgggcctatccgtggtaaatggtatcctgatgccttagcctagatggtgtaggctgctgggccttgtagtttcggccgaataacccccccgggctttagcgcttngttgtnnatgtnattgatatttggtgctgannaaaaaaaaaaaaaaaaatggtgtnttttggacaaagcctctagaaattggaatcgttaatggcttggatgtttatgaatggggatcctttnacagataagtacattagcgtgaaatatgatgcaacaacgggtaactgaagcaagggcttttaatanagagagtttgcaagcaggaagtcggatt

SEQ ID NO: 53386 - DNA, 340 bp, Zea mays
  unsure (1)..(340): unsure at all n locations
  Clone ID: MRT4577_14868C.1
aaaaaaacgggggcgcccgccgcgtccacccacacatacaaccacgccttttttagctattcatctggaaacaaaacggggcatcgcgaaattttatatttttgcgctcccccnnacccaaaaccaaccagcaaaaaatcacaaaccctttacttctacaatgacactcacacttacttacactctcaatattaccaatccactcacaactccacttacacttgctactcttcctaaaaataatttaaatgcttttgaactgttcgcaacatacattaagttaccttccaaagctcctactgtcattaaggatcataacccaccccctggatagacatta

SEQ ID NO: 53387 - DNA, 275 bp, Zea mays
  Clone ID: MRT4577_148690C.1
gaggacgatagcctcaccgtacgctagatcatcagcgagatgtacggcttctgagtaacccaccgctcttgcgctttctcggggaaggagcctaacaaggtggacagaaccagggcctacgtcacgaagcaggtcgccaagagcatcctggacagcggcttcggtcgccgctttctcgtagcacgtgtcctacggcatcgggttcctgaagtactgtatctgctcgtacgactcttagatcacgggaagataccagacaacgtcatgctaaacat

SEQ ID NO: 53388 - DNA, 851 bp, Zea mays
  unsure (1)..(851): unsure at all n locations
  Clone ID: MRT4577_148691C.1
catcggggacccgtcaccctctctcgttcattttgcgccatcttcctcgcctcctccacaagtccacctcccgactctaccaaaatcccaaaccctagacctccaagctcagatccctccccccaccttcaccccttcagagacgaacgcaccatgcggatccgcaagagtgcctctcgcctcctaggctctgcgtactccgcctccgccgccccgaccgttgatgcggcgcctcggctcgacctgctgccgccgccgcacccagcgccgtgctccgcacccgaatcctgcggcgggcccgccttctcgagcccctctgtctccactgcggagccctgtgagctcagccgttccccatgggacctcatcgccgacctctccctctccgacgaaaaggtggaggacgaactcgtggacaagtactttgtgcatgtcacgacccgggcgagctggctcttttcatccaccgtgtcagccaccacatccaccaagaagaagaagaagctgcctgctgcagtctacgaggatagcacgcagctgaggcgtgaggccgcgaaaaaaactgcaacgaatagggaggagggcgagactaagaagaaggcgaaggtgaagaaagaagaggtgcagcaggatggggcagcagcagcagcagcgcaggtctggaagtgcaagaagaacgatggcagacggtggcactgcaaccggccagtgagccaacctaacaccctctgtgagtaccatttcgtgcagaagcgctcctacttgaaccccggtttcgagttccactccacggcagaactggnaggggcagcgccagcgccagcgccggtgcatgcagctagctccagttg

SEQ ID NO: 53389 - DNA, 654 bp, Zea mays
  unsure (1)..(654): unsure at all n locations
  Clone ID: MRT4577_148692C.1
gtcccccgacccggagccaagccacaaacagccgctccgccttcttccgcggctgcagccagcgcgaggtacctggctggcattttgcatttgaggctatgggacaccgtgtcatgacaatagctcctcgttatgatcaatacaaggatgcatgggatacaagtgtccttgttgaggtaaatattggtgacacggtagaaactgttcgattcttccactgctacaaaagaggagtcgatcgtgtttttgttgatcatcctatgtttcttgaaaaggtatggggcaagactggagcaaaattgtatggtcctactactggaactgactatcgagataaccagttgaggttctgccttttgtgccttgctgctttggaggctccaagagttctcaatttcaacaattctgaatatttctctggaccatatggngnaagatgttgtcttcgtagccaatgattggcacactgctattttgccatgttatctgaagagcatgtataagccaaatggaatttataaaaatgctaaggttgctttctgcatacataatattgcctatcaaggtagatttgccagagcagacttcgaccttcttaatctacctgacagtttcttgccatcatttgattttattgatggacatgttaagcct

SEQ ID NO: 53390 - DNA, 2682 bp, Zea mays
  Clone ID: MRT4577_148693C.1
cgatcgcaaagtcgcgggccggtgcgggtacgctgctggtgaggcgcccgcggcccaccaccccatgtcaccatgtgcggtggccgcagtgctggtcatgcgggcatcggccggtgcagcggttgtgtggcgcccgtgcgctagcaactaggcggggcgcacgccgcctgtcacgaggccgatcgctttcccggccctcggcggtcggcgcgctgcgtcgccgcttgcttcctcctctacttgaagtgcccagagtcgcctccgcgcctgcaggaagcccccgacccggagccaaagccaacaaacagccgctccgccttcttccgcggctgcagccagcgcgaggtacctggctggcattttgcatttgaggcatttgacaggtcatcattgaatggctgcaacgatgggttcaatatctgccaacggttcttaccaaacaaataggcccagtgcactaaagcaggcacctcacatgcaattccaacaatgttgcaacggtggacttaggttcttaagcaagcactcccaatccatgcgaagtaagatacaggtggctaaaagaagagctacagataatggaattcatccaaagactacgggacatcgggcacctattgtatgttctgctgggatgactattgtatttgttgcaactgaagtgcacccatggtgcaaaactggtggcctcggtgatgttgtaggaggactgcccccagctttggctgctatgggacaccgtgtcatgacaatagctcctcgttatgatcaatacaaggatgcatgggatacaagtgtccttgttgaggtaaatattggtgacacggtagaaactgttcgattcttccactgctacaaaagaggagtcgatcgtgtttttgttgatcatcctatgtttcttgaaaaggtatggggcaagactggagcaaaattgtatggtcctactactggaactgactatcgagataaccagttgaggttctgccttttgtgccttgctgctttggaggctccaagagttctcaatttcaacaattctgaatatttctctggaccatatggggaagatgttgtcttcgtagcccaatgattggcacactgctattttgccatgttatctgaagagcatgtataagccaaatggaatttataaaaatgctaaggttgctttctgcatacataatattgcctatcaaggtagatttgcccgagcagacttcgatcttcttaatctacctgacagtttcttgccatcatttgattttattgatggacatgttaagcctgttctagggagaaagcttaactggatgaaggcagggatcattgagagtgatctggttctaacagtcagtccacattatgtcaaggaactcacttctggcccagataagggtgttgagttggatggtgtccttcgcacaaagcctctagaaattggaatcgtaaatggcatggatgtttatgaatgggatccttcaacagataagtacatcagcgtgaaatatgatgcaacaacggtaactgaagcaagggctctcaataaagagaggttgcaagctgaagtcggattgcctgtggactcgagcatccctgttatagttttcgtcgggcgtctcgaagaacagaaagggtccgacatactcattgcagccattccagagttcgtgggcgagaatgtccagataatcgttcttggcacgggaaagaagaagatggaggaggaactaacgcagctggaagtgaaatatccaaacaacgctagaggcatagcgaaattcaatgttccattggcacacatgatgtttgccggggctgacttcattatcgtcccaagcaggtttgagccatgtggtctcattcaagctgcaagggatgagatatggagtgagattcccatctgttcatccactggaggacttgtcgacacggttgaggagggtgtcaccggattccacatgggttctttcaatgtcgagtgtgaaactgtagacccagccgacgtgacagcagtagcgtcaaccgtcacgcgagccctgaagcagtacgacaccccggcattccatgagatggttcagaactgcatggcgcaagacctgtcctggaaggggcctgcgaagaagtgggaggaggtgcttctgggccttggagtcgaggggagtcgagctggtatcgacgacgcagaggagatcgccccacttgccaaggaaaacgtagccactccgtgagggcttggtggtgcctcggactcggaaacacgcgttggtgataggaagcgtcttctaggatcctcctgggcggccttgtggctggtggagtgaggtgtccagtcagacacggtttcgcctctactaccacagtaccactactacttcattgtaatataatccttggcattctaaaaaatgccatgcctggtctaattcttctgttcttgcggaacatacacttctcgcttccgttcggtcgacaacggttatgtaaatatagcgaatgctagcgggcagctcgaatcatcccaagtggtagggtcacgatggaattgtttgaaatggctcgttcttgtgcatagttcgcttctcagtggttgtttaaaacaggagagcacagccactgttgcgtaagtaatagtggctgtttctacaaaaataattttatgagacccaaaaaaaaaaaaaaaaa

SEQ ID NO: 53391 - DNA, 353 bp, Zea mays
  Clone ID: MRT4577_148694C.1
aaaaaaaaatcgggggggctcaatgccggcttgggattggaccattgtaaaccttccttacaacctcagaggggcgagcttgggggtaaaaacacaggtggggaacaaccaccacgaacccgaaacgaaatattcgggcccgagaccacccccgacgaaaataaaccccctttaaacttgggtgaacccgggagccgaaaccaacaaaattacttggctttaggggaccccaccggttatttcctccaattcccgttgttgttgccgcaaccccccccccggtttgcacccaccgttcccccaccggcggcgtagtcttcaagaccaccggcgtagtcttcaccgcccccccc

SEQ ID NO: 53392 - DNA, 1463 bp, Zea mays
  unsure (1)..(1463): unsure at all n locations
  Clone ID: MRT4577_148695C.1
acgactctcggcacggntatctcggctctcgcatcgatgaagaacgtagcaaaatgcgatacctggtgtgaattgcagaatcccgcgaaccatcgagtttttgaacgcaagttgcgcccgaagccttctggcggagggcacgtctgcctgggcgtcacgcgaaggaaaaagcattccaacgctgcatctgcactgcacggtacctcatgctcctctatctctaagaatttaaaagagaaggaggaggaaagtcctcgactgggctcgttccattaanacccccttaaccccttcgtttgggatttcttttcggggcaaaaaaatacccttctcccccaaacatcaagcctttccacaacatgcgcaaccctaatggtactgggaggtcattgttcccgcagctctcgcaccactcgccagcgcaggtgctcaggaacttcacgcacatcaggaatcttcggatcgagctcccttctggggatgtgggtactgaggagggagttctcctgaaatggcgagcagagtatgggagcacacttcagagttgtgtgatcctggggggtacccgggttgaccgcaagcctgttggtggagagcatgagcagtctttggaggataatggaagcatgccagagtctttctataccaatggtgggctgaaacttcgtgtcgtctggacaatcagctctctaattgcggcatcaacgaggcactatcttctccgctcaatcatcaatgaccattccacacttctgagcttggtactgacagatgccgatggccaaggcacattgtgcatgggagcagagcagctgaaggagttcagagagaaccagttgtcggcctcagcatgttccaacaggactcaggtcccagcctgcaacatgaagctcaagtatgctccatatcttgaactgcctggtggtatggcgttgcaaggcgccactttggtggctatcaaaccctcacctgacggaagcaatggaagccaccctaaccgtaaagaagccgacgcatttgtctttggagcatttgatgggccatttaaggctgctgtgaaggctttgatgaagaggcgcacttaccttctggagatgaatggcttctagaaatcttgtggtatcgagcttgttggtgctatgcatggcatatttagctaagcttttcatctttgtaatatccaagaaagcaccatctctagttgctgcttttagtctgctgttttagctctttgtacagtgttaacatttgattatataaaaatcgtatcaagttctctagtgtaatagcgaatcgctccatagttcaccatcctggcccctggtgtaatatccaagaaatcatatcagtttcgtaggtgtaagttgaaagtagccttggaaaaggagagccagtttatgccttcaggtacataacattcattttgggattgtgaaatgaaagagactgatctgatgccgaca

SEQ ID NO: 53393 - DNA, 273 bp, Zea mays
  Clone ID: MRT4577_148696C.1
ccccttcaattttttaataagaaacaggatgtacaatcaaaacactaactattttacacatcagtggcattagacaaatttatacctcaatgtttagacgagtctttaaaacactctgtcagaatgtgtgcaagaatttgtttcgtgattcatctgtacccctcaaactcttattctcattcacgaaggaatcatcattgacccgatgcaactaaacatttgcagggagatcctggtatgaagggggtgtttgcaactcgcgtttctggttct

SEQ ID NO: 53394 - DNA, 1296 bp, Zea mays
  Clone ID: MRT4577_148697C.1
acagtagcacactattttatttctagggtctttgcctttaagcctatacccattggttacctcgaggccggccggggctgaactcttaatctgaatgctgaatttctgatgcctggacctctggtcggttttcccagccctggacgatcaggagctctgatcaaccgatcacaagccgattaatcggactgatcgtccgattaatcgctctaatcgctctgatcggtcctctggcgatcagaagctgatcgccgatctgaaaacattggtactaccaccacggtccacggctctagaaccttctatctccttccatttgtgcatatacaaaccctcttcaaaagccggcagaatcacacacccgcctccaccgcgcctgcccacgataacccagaggcctcgagaagggctggaagcaccgagagcgctccagagatgtcgtcggatgagttgcgattggagctggacgagctgcggcggctggagggcctcgccaagcgcccccgcgtccagaccctcctcgccaacgagatccgcaacattgaagctaagatggcgaaggcaactgaaccgtcaccggagccactagcggcggcttccgcgcccgcggcggcggcgcgttctgatttgagctacgccacgttgggctcgttcagctgggaacaggacaacgagaagatcaggatatatattccccttgagggagtcgaacaagggaaggtggaggctactttcaagccaacatcggtagatgtaaagtttcatgatgtcaaaggcaagaattatcggtgtgccataccaaagctgaacaaggaaactgttcctgataaatgtaaggttgtggtgaagccaacaaaggttattgttacccttttcaaggcttctaaaggcaactggttagacttgcacttcaaggaagacaagttcaagccaagcatggacaaggaaaaggatccgatgtcaggaattatggacttaatgaagaacatgtatgaggacggcgacgaggatatgaaacgcacaatagccaaagcttggtctgatgccaggtctgggaagacgaccgattcgttgagcggattacgttgagctggcatatcggcctacggacttatgttactgatggttcaaacggtctttacagtgtcttgttggtgttagactgttaatgcttgtttatcttacatttgtagtgaagctggacgtgcgaggaatattgaattctcttcttgaaaccaaagaaataaaaaccataagtcttagacgtttaaaaaaaaaaaaaaaaaaaaaaaaaaa

SEQ ID NO: 53395 - DNA, 542 bp, Zea mays
  Clone ID: MRT4577_148698C.1
cactcctaagggcgattgggatcctcgaggccggccggggcgcagccctccattgttaacgcccaaaatacagggggaaaagcaagacgcgtgagcacttccttatcgtctcttcctttcaccccctcgaccccgatcgaatcgctcgaacaattccctgtgcatcgatcgatctaggcttgcgcgaggatccaattccatccggctctcctttgagctcgtgatcctcggagttggaggagttcttcgcgagtctctttttgccccgatttctttttggcttatttgtgcgagctttctcaggagcagaagggaagaggcagtttgcaattccgatgcacccaggcctcaagattcaactctgaggccttatccgaggcatccgcatcgatctccgcaagaggatgggtaacgtgggaagcaacggtggaggcgccgccactggtcaccgccgtcggagctccggccacggccatcaccagcaggcgccgccgcctccccagccgcaggagactgcgcccaaccgctacgtgttcgcggcc

SEQ ID NO: 53396 - DNA, 342 bp, Zea mays
  Clone ID: MRT4577_148699C.1
cccacgcgtccgattcctgttgcaggacaacagctggacggaattttggaattacacgtgcagagtagcagaaataactgctaggaatttctggaaattcatgttagggaaccagcgattctgtatcgtagtatggctgtacatacctgtccgctgagctattatcctattcctttgtcttgtacgttggaataaaatgcagcaaatgcttgccttacggtcaggaaattttgtaataagtacaaggaaatgcgccttcctaagcatttgctatgatatttgacaaacaaaattgcctgtttttcttttcaagaattgagctaatgatctctgcgtttgaat

SEQ ID NO: 53397 - DNA, 352 bp, Zea mays
  Clone ID: MRT4577_14869C.1
gcatcgcgcattatcgatgccaacgctgtgtgaagtgagaaagggctaattctagacccaagactttggtctaacggatcatgtctttgtaactgaatcatttgatgcaacaggcagcagctgccgacactgctcgtggcggtgtacgtcctggtggtgggcgcagcagcagtgtgcgacatgagcaacgagcagttcatgtcgtgccagcccgcggcggccaagacgacggacccgacggccgcgccgtcgcaagcatgctgcgacgctctggcggtggcggacctcaagtgcctgtgcggctacaagaactcgccgtggatgggcgtctacaacatctaccccaagcgcg

SEQ ID NO: 53398 - DNA, 602 bp, Zea mays
  Clone ID: MRT4577_1486C.1
gccggcctggtcggggtctcgacacttagctccactgctccattctcagacgatcgacattcacttcatgtgttcagccaccgctgatcgatgacaatagattaccgcctagggcgagtggcccgcgtatgcgtgctggatcatctcaccaccgactcttgcgacggcgtgggcgagcaccaccgcatccagatcattgtgaaggaccacggcaaccgcaccatgcgctcctacgacgacttcaacgtcttccacggcctcatatcagatgccgccgagatccacttcctctggatgcccatcgacaccgtctttgaagcgatccgctttatctacatgaaggacatccgatggacgtgtcctgagagatatcaagagagtggcccttctctgcgcatgtctgacgctgtggagaagcaatgtactgagtgctccatcaagggtgaggagaacttctccagcagactgaagagatctcctctatggatcttatccggatgcaagacattgatagaccttaccttgtgagcaccatcataaatgatgtgcttgacggacctgactacatatctgtctctgagaggcagacctccaccgtggct

SEQ ID NO: 53399 - DNA, 781 bp, Zea mays
  Clone ID: MRT4577_148700C.1
cattgggtacctcgaggccggccgggggagcaacaagctggtggagtagctagcaactcgagggatgaattgaattgaagactagatgataggcttctccttctgatgtgccactgcagctagctagcaccttgttgccaagcaatgcaagatctctctgctgagatcgatctgaatacctaaaatatctatccggcccgtcatcagctcgatcttaagcagatttctgatcccaagcttgttggctaacatggcgaatgatgatgaacctgtggacggcgaaaaccctagatctattacagcatcaatgataacaagatggcagaaacattcgacgtggtttcggtgcacgaccatgagctcaaaatggcgaccttcgccttctacgcaaacaaaactatcaccaaagctccgcactcaagcttgcatggccacagtaccatcctagcctacgaactggtgttatcctaattgagcttttcttttcgtcaaaacatccttggcccctcttccctagaggttggctcttacctccgtttttctggtttctcgtgccagaattaacgttcttgaccttgtaaggccctccttctatgtctacatcctcttcgcatctcatgtttctttcttttctgctacatgcgggatcagtctcatcattgccatgtttgccggtctcccgcgtctacctactttatgctcccttctatccctcctgagctagttgttgatcccatgtaataataaccatgtttggttgatataaaaaatgggtagtttt

SEQ ID NO: 53400 - DNA, 2053 bp, Zea mays
  Clone ID: MRT4577_148701C.1
gccggccgggctgtgcgacacgactctcggcaacggatatctcggctctcgcatcgatgaagaacgtagcaaaatgcgatacctggtgtgaattgcagaatcccgcgaaccatcgagtttttgaacgcaagttgcgcccgaagccttctggcggagggcacgttaccctgggcgtcacgcaggacacactctttggttgaactcttcgcaccttaccttctattctcaaggaaacctttatccatggcccgaggtatcatactgctcctgcttgtgacccccctcgccatctccatggcactgccatcactatcaacgagaatcgaagggagtgtcataggggagagatccaacttgttctcacagctgcactccgataattctagccctacagaaaacaaactccaaccaggtgaaaagtcctttgcatcggaggcatatgcggtgaactggaacgaaccaccagaccaacaatcgcaagactccctcgagcagctagagccgtatcgagtgatatggaagcaaccagtgcaaggtgaaaagtccttcgtatccgaggcatatccggcgaaatggaacaaaccaccatcaccaagcaagcaatcgcaagactccttcgagccagaggcatatcgggtgaaatggaacaaatcaccaccaccacaccaacaatcgcaagactccttcgagtcggaggcatatcgagtgaaatggaacaaatcaccaccaccacaccagcaatcgcaagactcctttgagccggaggcatatcgggtgaaatggaacaaatcaccaccaccacaccaacaatcgcaagactccttggagcaggaggcatatcgggtgaaatggaacaaatcaccaccaccacaacaacaaacgcaagactctttcgagcaggaggcatatcgggtgaaatggaacaaatcaccaccaccacaccagcaatcgcaagactccttcgagccggaggcatatcgggtgaaatggaacaaatcaccaccaccacaccagcaatcgcaagactcctttgagccgaaggcatattgggtgggatggaagaaacatgcgcaaggagcaacggacgttgctgatgagacaacgccagcacgtggtcatggtctgcatgtcgcgaccgggatgctcttcacgaggaagagcttgcttccagggacagccctaccggaaggtaccaagttctgcggccacggcttcctcgatcccgagaggtttgaactacgagcggatgcggatgccatcccgttcagctacagccagctcgacaccatcctgaggatgtttcggatccctcgggggtccaagaaggcagagcaagtcgccgccacgctccggacatgcgaggctgagtccccagaggctcatgcctgcgccacctccgagcaggcggcggccgacttcgctgcctcctcgctcggggtcagggccagcaagctggtcgcgctcgtcaccaccgtccatggggggaaggacgccactagatacgtggtggcgcccaacggcatcacacgcatcggcaaggcggcaggggccgcggccgtagtgccgtgccacccgatgccgtacccgtacatggtccactactgccaccagccggcggacgtggaggcgctccgtgttgagctgaccgggctcggagacggtggcgtgacaaccgcgatcgccatgtgccacgccaacaccatgaactgggacgatcgctacttccaaatgctgaacgtgacgcgcggcgaggagatctgccacttcatgccgcgcaactatgtgctctggctaccagctgccgagcttctagggaactagtggcaatgccactatgttaggtgtcgttgctttgataaaatgaagtgtatgacaatgacagcatcaacaattgttcgtatgaacatatggttggacatgataactgcgagaaagagaggatatatgttgttgcgccctatgaattgtgatatggtgttgtggtggaggatgcatcaaatgatggggaagctaccttagttgtgcaaactacttttaagaactccatttttcc

SEQ ID NO: 53401 - DNA, 288 bp, Zea mays
  Clone ID: MRT4577_148702C.1
ctcctgcccctctgcgctggcgggccgtagcgccgcgagcgagctgggccgtgggcggaggaggagtcgaggctgaccgaccccgtggtcggcggcgacgagcggacgcagattcggcagccgtgcgcggaatgcccgtggaaggaggggagagagggagggcgcatgctcagctgagctgagctgagccctgataggctagctgtctgcggtgctgtagaagaggtttcgtatgcgtgatggtcattggatgttactccaggtacagttcgtacaatgtgcttgggc

SEQ ID NO: 53402 - DNA, 890 bp, Zea mays
  unsure (1)..(890): unsure at all n locations
  Clone ID: MRT4577_148703C.1
aaaaaaaaaacaaaaaaaaaaaataggcacgggcgggaaaagcaagacgcgtgagcacttccttcctttcaccccctcgaccccgatcgaatcgctcgaacaattccctgtgcatcgatctaggcttgcgcgaggatccaattccatccgctctcctttgagctcgtgatcctcggagttggaggagttcttcgcgagcctctttttgccccgatttctttttggcttatttgtgcgagctttctcaggagcagaagaggcagtttgcaattccgatgcacccaggcctcaagatccaactctgaggccttctccgaggcatccgcatcgatctgcgcaagaagatgggtaacgcgggaagcaacggtggaggccccgccactggtcaccgccgtcggagctccggccacggccatcaccagcaggcgccgccgcctccccagccgcaggagactgcgcccaaccgctacgtgttcgcggccgccacgccgtacccgccccagtaccctaaccccaatccgccgcagtactacccgcagtacgggaactactacccgccgccgccaccatccgtgccggtgccccttccggcgccgtacaccaccaccacagggccaccaccgccgcccccccctagcgcccggccccacccaccgaccaaccccacaacccccacaaactacccccggctggggccgggcggtatcccctcctacgngacccgcatctgtctatgccngacgccctacgnttgagcaccangaagggccgtcactatccgcaacgacatcaaccttaagaaggagacgcttcggatcgagcctgatgaagatgccctggccgcttcctcgtcgccttcactttgacgccacggtcgctggcagcatgac

SEQ ID NO: 53403 - DNA, 666 bp, Zea mays
  Clone ID: MRT4577_148704C.1
ggcaatgtatcttgtaacaactggtgctgttcttgctctctgctcaaccttgatggggtctatattgccacagccaagaatattgatggccatggcacgagatggcctgctaccatcattcttctctgatgtccataagacgacacaagttccagtcaaaagcacagtagtgactggcatctgtgcagctgctcttgctttcttcatggatgtctctcaactggctggaatggtaaggattcaccaaacattttctgtgagaacatatgtggacttcatcttgacctcaattatattagtgaaccttattcccagagatcatcatagtgtatgcatgtgactatacgggcattattgaaaaatgttttgagctaaaaaggtgctgtttttcattgcaggttagtgtaggcacgctactcgcgttcactatagttgctgtgtccatcttgattcttagatacgttcctccagatgaggtacccctcccatcttccctgcaagcatcattccgcttgagccaagaaaatgacgaggaaaagctgaggggtacccttggagatgatgatcatgagcaaggctcagctgaaataagtgatgttgtagtagaaccaattactgaccccctgatcgagaagcagctatacgcaagcaatttgagcgaggcaa

SEQ ID NO: 53404 - DNA, 421 bp, Zea mays
  Clone ID: MRT4577_148705C.1
ggccaaggtgccaacagggacaaaaaatatttttttttttacaatttgggggtcccacgtaacagggtggcaatacaaagaaaagaattgaactgggcctggccaattttttttttgggccataaaaccattatttttccagggactaacattttatgaaaaacttatagaggcaatttttgaaccataggggggcataatacaaaatcgacaaaatagcaaagttctggccgaaagcaaaccaagctggagggtttttttttaaaaccaatgcaacccccgcctttggaagcttttttggtggaggggacctggggccctggaaaatgccagtcctggcttggaacccttccttgtattttttggaaaacttccactcgggcatttgaacatactgggggggaaaaaaattcccaaaatt

SEQ ID NO: 53405 - DNA, 468 bp, Zea mays
  Clone ID: MRT4577_148706C.1
aacgggaaaaacccactttattatggatagctgcactcgaacaaaatcgaagttaacaccggccccgcaggggcgcaccggagggacacacccaccgaccgaaaactttattttactattctatacacagatggacgggttttaaaaggggggggggggggaacccatacaggggattgaacccaaaaacttccccgccacccacccaaagaagcacttcattacgcgagctgggtcttttcctccggggacttccctttttcaccttcgagggggaaaagctccttctcgccggccaaaatccccttggggggtttggggggcccaaccaccggggggcccaccggctcaaagacgtcgcccactaccggggggttttggggggccgcaccttttgcttttgtgggagaagcccccccggcggttttgacgggccctgacgccttttttttaaactccccttggctc

SEQ ID NO: 53406 - DNA, 597 bp, Zea mays
  Clone ID: MRT4577_148707C.1
atcgcgagactgttgaaaacatactcagaaatatggtggatgttcgtgatgttgctgacgctcttcttctggcttacgaaaagccagaagcgtctggacgatacatctgcagttcacatgcaataaaagttgctgatatgataaacatactgaagaccttgtatccatcttacccttatcccaaaaattttgtggaagatgatgtcaactctgtatacagctctgagaaactgcagaagctggggtggagcttcaagcctatagaggaatccctccgcgacactgttgaatcctacaaagcatttggcatcctgaattgaacatccagctacgactgttccatctgctgtttttgcctccgaactctttctgaataataatgtatgtaggcagtgaaacagcattgccagcaggttaatcctggcatcatgctggagcagcactgtagttctctctttttttttcatccccaatactatctagtggttcaggaccaaataagtaggccccgtgctgactggtttatggcttgtggcctattgtcgctgctaaaactagaagcgttcgtactatcttgcactgctgcacttgatttct

SEQ ID NO: 53407 - DNA, 236 bp, Zea mays
  unsure (1)..(236): unsure at all n locations
  Clone ID: MRT4577_148708C.1
tgnnaaatnaattttaaatgaacctccttgtgttttattaacattgcacaggctttggggatttcacgtccctgggagaaagatcattttaccagttttttttggtgtttacatgcattttatcatggtttttattttatcaaatcactcaaggctgttttgattacctgtataaaagccacatttaacttggtgttgaatccaaggtgtttattaaccaagagtgtagggcctaa

SEQ ID NO: 53408 - DNA, 278 bp, Zea mays
  Clone ID: MRT4577_148709C.1
ccaccccccaggcttaatttttaggaaaaaacctttttccatggggcccttatgaaaacaaattttggggggcctttccaaaaaaccaaaaaaaaaaaggatttttttttggttttttttcgaaaataaattgaccactcccggggttaaatttttgttaaaggggcccttcccaactcccggaaaaagaaaaccctacctaagggggtgagtcgatgcataaacctctgtctttaaattcgcccctactttaaattcccctggggggcataaatttt

SEQ ID NO: 53409 - DNA, 1710 bp, Zea mays
  Clone ID: MRT4577_148710C.1
aaaaaaaaaaaaaaaaaaaaaaaaaaaaaaaaaaaaaaaaaaaaaaacgccatccgccatcctcactgatggttccgtcccgccgccatcggagagtgtagaagtggaagcaagcagataaaccccaggttctgtactcctgttctctttccactttgtcccttctttccccattgacacgctttccttccgcccattgacgagttgacgaccaacagacccaggcctccgaccagatcgaggtgagcgaacgtgccccgcctgcgctggtgacggtgagggtgaggccgcacgccatccgccatcctcactgatggttccgtcccgccgccatcggagagtgtagaagtggaagcaagcagataaaccccagcacaagtagttcgtaacgccatccatgggatcctccttatcgaacctcaccgacgccgcttgcatcgtgcaccagtttaagatcaacggctactcggctaccaaatccatggcgaggacggactcgctcccgtccaagcggctggccgtgggagggtacgagtgggaggtccactacaccccaagcctcctcgtcgacggcagctacatgatagcgttcaggctcgtcctcctcggcgcgccgcgtcggaacgacgtgaaggcggcgttcagatgtcggctgctgtatccttccaccaactacggtcatcaacgcggtgcgtgcgtcagcgattcaatggggaacgtggaaggtcagatgtctcatgcgttcaagcgggcgaaggagagctcgggatggattccgctccgcaaaaggaatgttgtgggaggcggcccgggtcatcgagaacgactctctcactgccgaatgtaccatcacggtggtcaccgagctacctgaacctgatacagcaaagactaacgccgtcttgccccgaattcggcgattgacgggcgtgcattccttgcaccatgatctcggtgagctcttgggcaagggaaccggatccgatgtcgtgctggtggtttgcggtgagtccttcgcagcgcacaaggccatacttgcatcgaggtccccggttttcatggcccagttctttggccccatgaaggagacgcactcgcagtcgcagagggtggagatcatggacatggaggcggccgtattcggggccatgcttcgcttcatgtacaccgacgtggtgcccgagcttgagcggcaggagaacggcgacgtcatcgcgcagcatctgcttgcagctgcggacagatatggactcgacaagctcaaatcgatgtgcgaggacaagctctgcggtggcaccacagtggagacagcagcgacgactctggcgctggcagagcagcacggttgcccaaagctcaaggcttggtgtgttgagttcatcgctgcaaaccttgatgccgtcatggtgaccgagggttacaagcatctgatgacaagctccccgttggttctgaatgaccttctgagagctgtgcgtggaacgaagaactgaagaacattggtagttgtattgtatctgctctctatgaattcggtgtttaagtttatattccttcccattgaggaagggtggattgctggaaggctgtcatttgagaacttggcttcatttctagtcgttgtcccagctcatgggtttatgggtattttctaggagaaaagaggtaagacttagctatcctaggtgctacagaaaagatagttaatga

SEQ ID NO: 53410 - DNA, 1707 bp, Zea mays
  Clone ID: MRT4577_148711C.1
gatcaagtgttcagtagagggctcaaatttcccaatttttattgcaaatgtacatgaacaaaatcaaaatttttttttttgacgacaagcaaatcaagtgcagcaatgcaacattagtacgcacatttctagtttttagcaacgacaataggccacaaaccatacaacagtcagcacctggcctacttatttggcctgaaccactacataataatgttgaaaaataaagagatcggcagtgctgctgctgtttcactgcgcctacattattcaggaggagttcggaggcaacagcagatggaaacagtcctagttggatgttcaattcaggatgccaaatgccttgtaggattcaacagtgtcacggagggattcctctataggcttgaagctccaccccagcttctgcagtttctcagagctgtatacagagttgacatcatcttccacaaaatttttgggataagggtaagacggatacatggtcttcagtatgtttatcatatcagaaatttttattgcatgtgaactgcagatgtatcgtccagacgcttctggcttttcgtaagtcagaagaagagcatcagcaacatcacgaatatccaccatattactgagtacattttcaacagtctcgagatctttgaaatatttaaggatcatttcgctgctcaaatttactgtaggctgcatcaagggtccaaatactaatgacggacaaacagttacaacgtccagccctgtttttgctgcaaaagcaagagcttctcgttccgacagtgttttggaaactaaataccaatcctccttcttcctgcagtaatcctcatctgaccagcagtcttcatcaaacaccttacccttcggataaataggattagcatacacagctccacatgaagacaccaccacaactcgcctaacttttgcctcatagcaagcctttaacacattggttgtacctattacagcgggagctatgacctccacctcagggttggagggtcgatgggaaaggacaggactagctacatggaagacaccctcacagccggcaactgctgatgcaatgctgttgtagtccatcagatcagccttgagaagctgcaacctttcctcagctccttccagcaccttgagatgggcattcttgctagcaccagggtcgcgcacggtgccgcggaccgcgtattggccccgggagaggaggagcttcaccagctccgacgcgacgaagccgccagcgccggtcacgcacacgctcttccgcaccggctccattgttttcggtttgaatacttcgttgctctcgttgccacgctgccgctgaagaagtgaacggcaagaagtccagagaccacaccggacgagcgatctagacgtttcttcgtgggcggactacagcgggagcataacccacgtgatggcaccagttcttgtcgagttctacagaattatgagcattcttgctagcaccagggtcgcgcacggtgccacggaccttgtattggccccggcagaggaggagcttcaccagacatgacgcgatgaagccgcccgcgccggtcacgcacacgctcttccccaccgcctccattgctctcgggttttgatactttcttgctcttgttgtcaagacgccgctcaaaaagtgagcggaagtacaccgaccacagtttagacggacgagcgctaaagacgttttgc

SEQ ID NO: 53411 - DNA, 641 bp, Zea mays
  unsure (1)..(641): unsure at all n locations
  Clone ID: MRT4577_148712C.1
ccggccgggcacgtaccgcacaaactggggttgttgtacatacgcacgccggcaattcaaggctcaagccatttttgctccttgctcaccgtccctcaccatgggcagcgctgccgcctctacgaacacgattgggaatcggacgcaggacccagatcaagccgcgtgtgggggatgcacgcgtcgcgagatagcgacgttgcgtggngagtctcggacatgactgctggcactctgagtcacaggctgacagggcaggatgcacgcgctagcaaccgcatgggcgaacgtgtacgatgcgtgtcacactgctccgtgagcgacactggtgctacctaagctcagagacggagggctgcgcctgccgaccttgagacccacgtgtgcttccggtggagaggactgggaccgtacacgatagctctttcatatctgaggagctcatcagtggcgaccgaggacctcaacctacaactagggctcgtggtgactacatcattgggaaggagattgtcgacctcggccttgaccggatcaggaagcttgcagataattgcactggtctgcagaggcttcctctgctctaacgctgttggcggaggaacgggctctgggcttggctctatactcctggagcgcct

SEQ ID NO: 53412 - DNA, 111 bp, Zea mays
  Clone ID: MRT4577_148713C.1
tctgagtctgtgcaaggatgacctctcgctgactgttgtggatgaccaggagagtaatacgaatgtcactgagactgtgtgaacttcacactgtcctgaacaattatgatg

SEQ ID NO: 53413 - DNA, 209 bp, Zea mays
  Clone ID: MRT4577_148714C.1
acgaatgatacacgctagtatgacgtgctaatgtacggacgcgtatattacgatatgaggttacattatatgcgtctacgcaagaatcatgccagtgagctgctgcgccactagacgcgagcggtcagatagtgatatagagacacaccggcatggactgtcagacggatttggcacagtgtacatggagactgcagatcacaatgtac

SEQ ID NO: 53414 - DNA, 176 bp, Zea mays
  Clone ID: MRT4577_148715C.1
gaactccccaacaatcctgaactaactgggtctgcctcaacgttgacatcaacaattataatacaacaattgttggcaacaactgaaaaatatggaatggtcccttcgcctaacctgtgttaaacaaaactctgttaagaactgaatcctgaaactggtgcaacaactttaaccct

SEQ ID NO: 53415 - DNA, 405 bp, Zea mays
  unsure (1)..(405): unsure at all n locations
  Clone ID: MRT4577_148716C.1
aactagacggcgatgcactctacgtaagctcggaattcggctcgtttctttttaaagcacaacnataagnctgggtttgttatagagatatatctcatggccanaattcaacctcccaacacccataatcatatcaatataagcatcacaaccatgctgcctgtgtttacatttataaaatgcaagagcatcttcttaaaaagtcttcttcgcacattaaccacccataccagacatctatcaatgactagcttctcctcctagtctctctttattcaatcaccaatattgtttaaattattcatctccgtataatcatctctagctttcttcttaccattactgtaaacacccaccttctcttttctaaaattaactattaagtttacactccctctttttctt

SEQ ID NO: 53416 - DNA, 274 bp, Zea mays
  Clone ID: MRT4577_148717C.1
ccggccgggatggtgcactgctaaaagatggagcacatagatcagtctgatcacaaatttcagtgttcccaagaacgccaacagaggaattaacaccagttcagaagatggagctgagcctggaggttgatccgatgcccaatcctccttcagcagagcgttctcaataatccttcaatttcgcctgatccataacatatctatagttctatgccttgaatgatgctacaatcattgtaatataataaggaaaaaaaaaaaaaaaaaagcggcc

SEQ ID NO: 53417 - DNA, 648 bp, Zea mays
  Clone ID: MRT4577_148718C.1
cctcgaggccggccgggccgagataggtatcgctctgcccactatgaataaagctaattactctgtgactgatacgatagatttcttctttcccgtatcgagctcagatagaccttcacggcagtctcggactcttcctaaagcaacaagcgagatatgatcttaggtcgacgaccaacacgaagcagtgtgtctccgaccacatcagtgaagacggcatccgagtcgtgaacgcatgctgaaagtttactgctcgattaatacatgcaaccagatcgtgcaagagccgtaggatataacaccgcggaacctcactgatgatagccttcactacctgcttcaaacaatgtggtggtgagaacaacgttccccgtgcaaactgccatgatctaaaaccatgtgggaccattgaagtgcggactgctccctacctacagatcttacatcctgagcaactcatcaacgcctggtacgatgacgcataatgtttcggccgtggacactacacaattggctaagaaatcgatgatcagagccttgaccggatccaaattgttgatgacaactgcacacgtctccttgactcactgatcgacgatgactttggcggtggaaccgtgtctgcacgtgtttctctcctccttgaac

SEQ ID NO: 53418 - DNA, 192 bp, Zea mays
  Clone ID: MRT4577_148719C.1
tttctcttttcttcagggaattgcccttgtactcgggtttcttttaaaagaatgcggggttcattaaaccgcaccacggaagaaccaacaccgaggggcccccccggaaatccgcggcggacccgtggggcgtcccggacggtcccaagatgaggccagtaacaggaacccgaaagaaccgacaatggcgcc

SEQ ID NO: 53419 - DNA, 814 bp, Zea mays
  unsure (1)..(814): unsure at all n locations
  Clone ID: MRT4577_14871C.1
gccggccgggctgcggacagccatcacacgcatactgcatacacaacacagagcatcagaaggagctgcgatctgatcgacatggctgccgccaccatggctatcacctcccgcgcgctcatcggcaagccggcggctggcacgagggacgtcttcggcgagggccgcatcaccatgcgcaagaccgccgccaagcccaagccggcggcgtccggcagcccctggtacggtgccgaccgcgtcctgtacctgggcccgctgtccggctcgcccccgagctacctgaccggcgagttccccggcgactacgggtgggacaccgcggggctgtcggcggacccggagaccttcgccaagaaccgcgagctggaggtgatccactgccgctgggccatgctcgggctcgccgacgacccggaggcgttcgccgagctcaaggtgaagggatcaagaacggccgcctcgccatgttctccatgttcggcttcttcgtgcaggctatcgtcaccggcaagggccccctcgagaacctcgccgaccacatcgccgaccccgtcaacaacaacgcctgggcttacgccaccaacttcgtccccggcaagtgagcgagggcatgatgcttgcatgcgtgtaccgtagacgtacgtattcctacgtactgcaggttgcaccagtatttgtgaagggagctttgggagccagagattgtaccgctagtgtatttgtatgcatgctgtggagctgacaataaaatatgctgtaaatatattatgtctcaaaaaaaaaaaaaaaggcccctanggccgcggcgctc

SEQ ID NO: 53420 - DNA, 663 bp, Zea mays
  Clone ID: MRT4577_148720C.1
ggaatttggctcgactcgacttcgggtccatttaaatctttcatcttcacttcttctttcttcttgagttgttgttggtttttgaaccaaaggacccttcctaaacctttctcttttattacttttcaataatacataatggctgatgatgaatttgaatccgttggatcaggagcatccacctgcttcccaatgcaatgctctgccatcaagaagaatggatatgctgtgttgaagaacagaccctgcaaggtcgtcgaaacctctacctccaagaccggaaagcacggacacgctaaggtccatatggttggtattgatatcttcaccggaaagaaatacgaagaaatttgcccatccacccacaacatgatggttcctaacgtcgacagacgtgacttccaagtcatcaacatcgaagagggctttgttagcttgttgaaggatgacggaagcaccaaggacgacttgaaggtcccagaaggcgagctcggagataagttaaaggaagcttttgatgatggaaaggatgttgttgccaccgtcttggctgctatggacgaagagtgcatcatctcctggaaggaagcctctaacaagtcctaaacatatatataaaaaaatactgttgtttaataaaaaaaaaaaaagcgcggctgagac

SEQ ID NO: 53421 - DNA, 2511 bp, Zea mays
  Clone ID: MRT4577_148721C.1
atgaagaaggtggtcaactacgagaccgactctttatcaccttccaccttcggcgttgagtccaccacttcgaagcgccaagagcgcaagaagtatagtaagatgcctctccgctatcctcgcattgccaaacacgctcctctactttttgtacccctaggcaaaccaccatattttgatggtgaagattattgtatgtggagtgataaaatgaggcaccatctaacctcactccacgaaagcatatgggatatcattgagtttggagcacaggcaccgcaggtgggcgacgaggattatgactccgatgaggccgcccaaataagacattttaattcccaagcaacttctatactactcgcctccttgtgtcgagaggagttgaataaggtgcaaggactgaaaaatgccaaagaaatttgggatgtccttaaaatggtgcatgaaggggacaaagtgaccaaaatcaccaagcgcaagatgatcgagggagagcttggtcaattcgtcctcaacaaaggagaggagccacaagcgatgtacaaccggctcaaaacaatggtcaaccaagtgcgcaacctcgggagcaccaaatgggatgaccatgaaatggtcaaggttattctaggatctcttgttttttgtaatcctactcaagttcaattaattcgtggagatcctagatacaaacagatgtcccccgaggaagtaattggcaagtttgtgagctttgaacttatgatcaaagactccaaacatattatcaacttggagcaaggcaccacctccacacctgaggtgcaacccattgcattcaaagcaacagaagagaagaaggaagagtctacaccaagtagacttccaatcgacgcctccaagcttgaaaatgaggagatggctcttatcatcaagagcttccgccaaatctttaagcaaaggaaggggaaggaatacaaaccccgctccaagagggattgctataggtgtggtaagtccggtcactttattgctaaatgtccatatacaagtgacagtgacacggacgacgacaagaaagggaagaagaataagaagagatactacaagaagaagggtggcgaggcgcatgtgggacaggaatgggactccgacgagagctccaccgactcctcctccgacgaggacgccgccaatgtcaccatcaataagggccttctcttccccaacgtcggccacaaatgcctaatggctaaggagagcaaaaagaagaaggatcaaaagaaaaggataaatgaattaatagaaaccattaacgagaaggatggactcttggaatgccaagaggacttgctcgttaaggaaaataaaaagtttgttaaactaaaaaatatctatgctctagaggtagaaaaatgtgaaaatttatctaaagagcttgatatttgcaatgattcaatttcccgttttagagatgtaaatgctagtttgaatgctaagatagaagaattgaattcttgcaatatttctacatctactattgagcatgtcaccatttgcactagatgtagagatgttaatgttgatgctatgaatgatcacattgctatgattaaagaacaaaatgatcacatagctaaattaaatgctaaaattgccgagcatgagttagaaaatgaaaattttaaatttgcttgtagcatgctttataatgagagacgccctagcattaaggatggcattggcttccaacaagggagccaaagcaacatcaaacttaatgcccccaagcacaaactatctaattttgttaagggtaaggctcccatggttcaggatagagagggatacattttatatcctatgaactatcctgagcacaaaattaggaaaattcatgctagaaaatctcatattgtttctcatcatgcttacatgtatagtaatgaggcttctagctctaggcattcaactcatatcaaaatgcctaaaaagaaaattgttaatgcatcaaatgaacatagcatttcatttaagacttttgatgcattttttgtgctaactaacaaatcaggcaaaatagttgccaaatatgttgggggcaaacacaagagtaccaagacttgtgtttggatacctaaggtttatgcatctggcgggtcaagttggataatcgatagcgggtgcacaaaccacatgacaggggagaaaatgatgttctcctcatatgagaaaaatgatgatccccaaagagcgattacattcggggatggaaatcaaggtttggaaaaatctcaaacccaagagaccttgaagagattcttgagatgggctcaaaatgagttcggattaagaataaaaaagattagaagcgacaatggaacgaagttcaagaattctcaaattgaaggatttcttgaggaggagggcatcaagcatgagttcccttctccatacacaccccaacaaaatggtgttgtggagaggaagaaaagaactcttttggatatggcaaggaccatgcttgatgagtag

SEQ ID NO: 53422 - DNA, 1656 bp, Zea mays
  Clone ID: MRT4577_148722C.1
atgatcaccggcgacaagcccgaagcttcgggaaggaagaacaatgaacggactatgtcaaaggaggtcggcgacaagcacaagggtgataagaagaaaaagaaaaggaagaaatcggcttcctccatcaagtcacaaaggaagggtgataagaagaaaaagaaaatgaagaaagtggtctactacgagaccgactcttcatcgccttccacatccagcgtcgagtctacaactttgaaacgccaagagcgtaagaagtataaagaggagccacaagcgatgtacaaccggctcaaagcaatggtcaaccaagtgcgcaacctcgggagtacaaaatgggatgaccatgaaatgatcaagatgtcccccgaggagattattagcaagtttgtgagctttgaacttatgatcaaaaactccaaacacattgtcaacttggatcaatgtgccacctctacacccgaggtgcaacccgttgcattcaaagtaatggaagagaagaaagaagagtctacaccaagtagacttccaattgacgtctccaagcttgacaacgaggagatggctcttatcattaagggctttcgacaaatcctcaaacaaaggaaggggaaggactacaagccatgttccaagagggtgtgttataggtgtggtaagtctggtcactatattgcaaaatgtccatatacaagtgacagtgacagggacgacgacaagaaagggaagaagaagatggagaataagagatattataagagaaagggtggagaggcgcatatggggcgggaatgggactctgatgagagctccaccaactcctcctccgacaaggacgctgccaacatcgccatcaacaagggtcttcttttccccaacgtcggccacaaatgcctaatggctaaggatggcaaaagaagaagcgggtgcacaaaccacatgaaagaggagaaaagaatgttctcctcatatgagaaaaatgaagatccccaaagagctatcacattcggggatggaaatcaaggtttggtcaaagattccttagattacaacttgctttcagtttctcaattatgcaaaatgggttacagctgtctctttactgatgttggtgttactgtctttagaaaaaataatgactcaatagcttttaagggagtgttagatggtcagctatacttagttgattttgatgataacaatgttgaactagacacttgcttaattgctaagactaacatgggttggctctggcatcgccgacttgcccatgttgggatgaagaatcttcacaaacttctaaagggagaacacattttaggactaacgaatgaaaaatctcaaacccaagataccttaaagagattcttgagatgggctcaaaatgagttcggattgaggatcaagaagattagaagcaacaatggaacggagttcaagaactctcaaattgaaggatttcttgaggatgaaggcatcaagcatgagttctcttctccctacacacctcaacaaaatggtgtagtgaagaggaagaatagaactctattggacatggcaaggaccatgcttgatgagtacaagacactggatcggttttgggcggaggcgattaacacagcttgctactccatcaaccgactctatcttcactga

SEQ ID NO: 53423 - DNA, 2508 bp, Zea mays
  Clone ID: MRT4577_148723C.1
atgccgggagaacatgccaagagggaaatggtcaccggtgataagcccgaagcaaggaagaatgacgaacgaactccatcaaaggaggccggcgacaagcacaacgacgaatccgccagctccatcaagtcacataggaagggtgacaagaagaaaaacaaaatgaagaaggtggtctactacgatactgactcttcatcacctttcacatccttcaccgagtctaccactttgaagcgccaagagcgtaagaagtatagagaagagccacaagcaatgtacaaccggctcaaaacaatggtcaaccaagtgcgcaacctcaggagcaccaaatgggaggaccatgaaatggtcaagatcctagatacaaacagatgtccccccgaggaagtaattggcaagtttgtgagctttgatcttatgatcaaagactccaaacatattgtcaacttggagcaaggcaccacctccacacccgaggtgcaacccgttgcattcaaagcaacggaagagaagaaggaagagtctacaccaagtagactcccaattgatgcctccaagctcgacgatgaggagatggctcatcaagagctttcggcaaatcctcaagcaaaggaaggggaaggactacaaaccgtgttccaagagggtttgctacaggtgtgtgacagtgatagggacgaagacaagaaggggaagaagaagatggggaagaaaagatactacaagaagaagggtggcgaggcgcacatggggtgggaatgggacttcgacgagacctccaccgactcctcctccgacgaggacaccaccaacattgccatcaacaagggacttctcttccccaacatcggccacaaatgcctcatggctaaggatgacaaaaagaagaaggtttatgcatccagtgggtcaagttcgataatcgatagcgggtgcacaaaccacatgacatgggagaaaaggatgttctcctcatatgagaaaaatgatgatccccaaagagcgattacattcggtgatggaaatcaaggtttgggtaaaattgctatatctcctgaccatttcatttccaatgtttttcttgaagattcttcagattacaacttcctttcagtttttaattatgaaaaatctcaaacccaagagaccttgaagagattcttaagaagggctcaaaatgagttcggattgagaatcaaaaagattagaagcgacaatggaacgaagttcaagaactctcaaattgaaggatttcttgacgaggaaggcatcaagcatgagttctcttctccctacacagctcaacaaaatggtgtagtaaccatgcttgatgagtacaagacaccggatcggttttgggcggaggcgattaacgccgctttctactccaccaaccgactctaccttcaccgaatcctcaataaaacatcatatgaactcctcatcggtaaaaagcccaatgtttcttatttcagagtttttgggagcaaatgctttattcttattaacagaggtagaaattctaaatgtgctcctaaagcagtagaaggctttttacttggttatgactcaaacacaagggcatatagagtcttcaacaagtccactggattagttgaagtttcttgtgacattgtgtttgatgagactaatggctcccaagtggagcaagttgatctcgatgaactagatgatgaagaggcttcatgcgtcgcactaaggaacatgtccattggggttgtgtgtccaaaagaatctgaggagcctacacaagcacaagatcaaccatcatcttccacacaagcatctccacctactcaatatgaggataagactcaagaagaagaaggtgaagatcaagatgatgagccacctcaagaggaggatattgatcaagggggagatgaagatgatcataacaaggaagatgatcaagaaattcaagatcaaagaccgccacacccaagagtccaccaagcaattcaaagagatcaccccgtcaactccatacttggtgacattcacaagggggtaaccactagatctcgagttgctcatttttgtgaacattactcttttgtgtcctctattgagccatacaggatagaggatgcactaagagatccggattgggtgatggcaatgcaaggggagctcaacaacttcacgaggaatgaggtacgaagtgggtattccgcaaaaaacaagatgagcatggtgtggcgacaaggaacaaagcctgacttgtcgccaaaggtatatgttgagcaacctctcgactttgaagatagtgagtatgctaactatgtttataagctctcaaaggcgctttatgggcccaagcaagccccaagagcatggtaccttcgggctcgggctaaaagcatgtacgatgtaaaaagcatgatcgtgacgaaggttggagttgctccgaagctacgtgcaggggagcttcggctaaatggcggaaaaaggaaccgacttaaaggggaaaaggctatctag

SEQ ID NO: 53424 - DNA, 635 bp, Zea mays
  Clone ID: MRT4577_148724C.1
attgcgatatccacgaagctgcaaagcaactgcgcacatcagaagcagcagcagcagcagccatgaagcgctgcttcagcctcgccgcggcgctggctgtcgtgaccctggccgcgcttctctcgtccgacgccgtggtcgcctgcatcgacgtgggcttctacgacaggacctgcccgtccgccgagaccctggtgcagcagaccgtggccgccgcctttggtaacgactccggcgtcgctccggccatcatccgcctccacttccacgactgcttcgtcaagggctgcgacggctccgtgctgatcgactcgacgcctggcaacaaggcggagaaggactcggcacccaacttccccagcctccgcttcttcgacgtggtggaccgcgccaaggcggccgtcgaggcgcggtgtcccggcgtcgtctcctgcgccgacgtccttgccttcgcggcgcgggacagcgtcgttctgtcgggcggcctcgggtaccaggtgcccgccgggcgccgggacggccgtgtgtccaccgaagcgaacgcgctcaacaacctgccccgggccgacgtccaccgcctctgacctggtcgccggcttcgctgccaagaacctcaccgtcgaggacatcgtcgt

SEQ ID NO: 53425 - DNA, 798 bp, Zea mays
  unsure (1)..(798): unsure at all n locations
  Clone ID: MRT4577_148725C.1
cgggacattctagataagtgaagcctgattcagcctccaactaatttaaaatgactcccaaaaccaaacaacaccttacccataataaaaaaacaatataaaataaaacccaaggcattggcaggtgcgatcaacactaggattttccactaccaaatggggatgcaactccccaaagccgttaagcaacactttacctaataggttagaacactaagcacaacaatcaacgaattaaacaacctcgtttgttaatgccactaaggtcaaacatccatgtatcgacaatgtatgaaacacctgacatacccgtctctagcactataagacatggttgttattacactagaatccaactattagagctctccacactattctgttgacgtgaagcaaatggtgctcatgtcatgtaacgtcttttcctcctctcaaaagagataaaatttgcaatactcataaagcaatggagggataacaaaaagaaaaactaatgtacttcttgacacagactcatgcaaaagcttcataaatattactttcaatactaaaatagccacacgatactatgctcatcagngagtaattggatgtcaataagacaatccacataaccaaactaccttgattaacctcacatacaacaaaacctactattactgcacttgaacaatttgtacctcgtgatatcacaggatgcattcaaagtagtagcataccttgatctatcaaccctcattcatataagaaaatctcaatccgatgcaacaacccctcattaaagagatagatgactaa

SEQ ID NO: 53426 - DNA, 1608 bp, Zea mays
  Clone ID: MRT4577_148726C.1
atgtccattagggatgtgtgtccaaaagaatccgaagagtctccacaagcacaagatcaaccatcaacttccatacaagcatctccaccaacccaagatgaggaactggctcaagaagaagaggatgaagatcaagacaatgagtcacctcaagaggaggacattgatcaaggaggagatgaagaggatcaagacaaggaagatgatcaagagatccagaatcaaagaccgccacacccaagagtccaccaagcaattcaaagagatcatccatacttggtgacattcacaagggggatagaggatgcactaagagatccggattgggtgatggcaatgcaagaggagctcagcaacttcacgaggaatgaggtatggcatttagttcctcgtcctgaccaaaatgttgtagtggcattggggtttggagtttcaggaggcattcctcaggaaacagtagatcttttggcatttgtttccgctggggtcgggagctcaaatgggagagagaaggacatggttttatactctcacaggcataagttggttcattcgtggttaatcgtctttgatgagaattatatcatattattgtatcaaatggatgtgaagagtgctttcctcaatggtcctatcaaggaagaggtatacgttgagcaacctcctatctttgaagatattggaaaagttgaccctactctcttcactaaaacaattgctaaagacttgtttatatgccaaatttatgttgatgatattatatttgggtctactaacaattcatcttgtgaagaatttagtagaattatgatacagaaatttgagatgtctatgatgggggagttgaagtatttccttggatttcaaatcaagcaactccaagagggcaccttcatcagccaaactaagtacattcaagacatactcaagaagtttggaatgaagaatgccaaacccatcaagacacccatgggaacaaatgggcatctcgacctcgacacaggaggtaaatttatagatcaaaaggtatatcggtcgatgataggttttttactctatttatgtgcttcacaaccggacataatgctttctgtatgcatgtgtgaaaggttcgagacaaatcctaaggaagtccaccatagggcagtgaaaagaatcatgagatatttagtttacactcctaagtttgggctatggtaccccaagggatctacctttgatttaattgggtattctgatgccgattatgctggatgtaaaattgacagaaagagcacatcagagacttgtcagtttctagtgagatccttggtgtcttgggctttaaagaaacaaatctcagtagctctatccaccgccgaagccgagtatattgttgcaggacattgttgtgcacaattactcgggatgaggcaaacccttagggactatggctacaagttgagcaaagttcctctcctatgtgttaatgggagtgcaatctgcatggcggataatcccgttgaacacagccgcactaagcacatagacatccggtatcattttttgagagatcaccaacaaaaggggatatcaaaattgcttatgttagcacccacaaccaattag

SEQ ID NO: 53427 - DNA, 762 bp, Zea mays
  Clone ID: MRT4577_148727C.1
atgtccggtgcacaccggacagtgtccggtgctccagaggagagcgactctgaactcgccagcttcggatttccgcttcgctataattcaccggacatgtccggtgcacaccggactgtccggtctactaacaagtcatcttgtgaagagttttgtaggattatgatatataaattcaagatgtttatgatgggggagttgaagtacttccttggatttcaaatgaagcaactccaagagggcaccttcatcagccaaactaagtatattcaagatattctcaagaagtttagaatgaataatgccaaactcatcaagacacccatgggaacaaatgggcctctcgacctcgacacgggaggtaaatccatagatcaaaaggcaaatcctaaggaagttcaccttagggccgtgaaaagaatcatgagatatttagtttacactcctaagtttgggctttgttaccccaagatgaggcaaaccctcagggacaatggctacaagttgagcaaagtctctctcctatgtgataatgagagtgcaatccgcatggcggataatcccattgaacacaaccgcactaagcacatagacatccagtatcactttttgagaaatcaccaacaaaatggggatatcaaaattgcttatgttagcacccacaaccaattagccgatatctttaccaagccactagatgaaaagacttttaacaaacttaggaatgagctaaatattctagattcttggaactttgattga

SEQ ID NO: 53428 - DNA, 1686 bp, Zea mays
  Clone ID: MRT4577_148728C.1
tcaatcaaacttccgagaatcaagtatatttagctcattcctaagtttgctaaaagtcttttcatcaagtggcttggtaaagatatcggctaattggttgtgggtgctaacataagcaattttgatatcccccttttgttggtgatctctcaaaaagtgataccggatgtctgtgtgtttagtgcggttgtgttcaacgagattatccgccatgcggattgcactctcattatcacataggagagggactttgctcaacttgtagccatagtccctaagggtttgccccatccaaagtaattgtgcacaacaatgtcctcccgtgtcaaggtcgagatgcccatttgttcccatgggagtcttgatgggtttggcattcttcattccaaacttcttgtgtatgtcttgaatgtacttagtttggctgatgaaggtgccctcttggagttgcttgatttgaaatccaaggaaatacttcaactcccccatcatagacatctcaaatttttgtaccataatcctactaaattcttcacaagttggcttgttagtagacccaaatataatatcatcaacatatatttgacatataaacaagtcttttgcgattgttttggtgaagagagtagggtcatctttaccaactttgaagccattagtgataagaaagtctctcaggcatttataccatgctcttagggcttgcttgagcccataaagcgcctttgagagcttataaacatggttaggatattcactattttcaaagccgagaggttgctcaatatatacctcttccttgatagggccattgaggaaggcactcttcaagtccatttgatatagcttaaagccatggagagtagcataggaaagtaatatatgaattgactcaagcctagctatgagtgcataggtttcatcgaaatccaaaccttcgacttgggaataacctttggcaacaagtcgggctttgttcctagtcaccacaccatgctcatcttgtttgttgcggaacacccacttgatacctacaacattttggttaggacatggaactaaatgccatacctcattcctcgtgaagttgttgagctcctctttcattgccaccacccaatccggatctcttagtgcatcctctatcctgtatggcaagtatggagttgacggggtgatctctttgaattgcttggtggactcttgggtgtggcggtctttgatcccgaatctcttgaccatcttccttttctttattatcttcatctccccttgatcaatgtcctcctcttgaggtggctcatggtcttgatcttcatcctcttcttcttgagccaattcctcaccttgagttggtggagatgcttgcatggaagatgatggttgatcttgtgtttgtggagactctttggattcctttggacacacatccccaatggacatattccttagcgcgatgcacagagcctcttcatcatctaattcatcaagatcaacttgctctacttgagagccattagtctcatcaaacataatgtcacaagaaacttcaaccaacccagtggacttgttgaagactctatatacccttgtgtttgagtcataaccaagtaaaaagccttctactgctttaggagcaaatttagaatttctacctctttgtaaggaaaatggaccccgagccat

SEQ ID NO: 53429 - DNA, 807 bp, Zea mays
  unsure (1)..(807): unsure at all n locations
  Clone ID: MRT4577_148729C.1
cttgttttctggttagcgcgcttttaccatcccagccaggggagaaaattgtacagtatcctattcgtccagtagatactacaacagattttgaaggaacaacaagccttcaaccaactcaaccgccatcagggaacgctcctcctggaggtcaatctgtagcaagacccatgccacgacaaatgccgcagcaacctatggttggggggattccaagagtggcaggtggagtaaccatggctgccttcaacgctgcctcacaggctggcatggctgggctaaatcctggtaacatgcctatgcagagaggcgcaggtggtcagtctcatccgcaccagttgagaaggaaggcggatcaagggatggggatgcagaaccctgggtatcctcagcagaagagacgattctgacgctatcaagatggagccatctgctgtatatcaggtgtttgaaacacgttgcctgtgtaagctgctgtagttttgttatcagcatccgaatgccaatgctggcacctgtaaaacacattaatcagtcgagagtccagataccagttgtccttatgggttatgatctaagctgctcgaatttggctgatttggtttgcaacagaaaggtcttgcttttgctcatggcccagtggaattatccacatgcgtaggaaatttagcatctatttggcttgagaaaagattttcattaaattctagtggcagtaaatatttttatggccacaaactacacagaattgagcagttgagcttgtgttaaaaaaaaaaaaaanaaaaaaaaaaaaagggcggccgc

SEQ ID NO: 53430 - DNA, 172 bp, Zea mays
  Clone ID: MRT4577_14872C.1
ctgaaaacacgaacgctggaaccatgtgctgccctccgcgcggggagggattggagcacccacgcggacaccgacgatactgaacgtggggctcacgtggagacccccaattggttctgcctctagctgggcgcctggctacgatgaccactgctctctatcttcctccagg

SEQ ID NO: 53431 - DNA, 1092 bp, Zea mays
  Clone ID: MRT4577_148730C.1
atgaattatagaacagtagatggaactaatttatttaaagacaaggaagatgatcaagagattcaagatcaaagaccgccacacccaagagtccaccaagcaattcaaagagatcaccccgtcaactccattcttggtgacattcacaagggggtaaccactagatctcaagttgctcatttttgtgaacattacccttttgtgtcttctattgagccatacagagtagaggacgcactaagagctcgggattgggtggtggcaatgcaagaggagctcaacaacttcacgaggaatgaggtaccaagtggatgttccgcaacaaacaagatgggcatggtgtggtgtcaaggaacaaagcccgacttatttgcaaaaggttattcacaagtcaaaggtttggatttcgatgaaacctatgcacagttgtatcaaatggatgtgaagagtgccttcctcaatggtcctatcaaggaagaggtatatgttgagcaacctcccggctttgaagatagtgagtatccttctcatgtttataagctctcaaaggcgctttatgggctcaagcaagccccaagagcatggatatggtaccccaagggatctaccattgatttaattgggtattccgatgccgattatgccggatgtaaaattgacaggaagagcacatcaaggacttgtcagtttctggggagatccctggtaccttgggcttcaaagaaacaaaactcagtagctctttccaccgccgaagccgagtatattgctgcaggatattgttgtgcacaattactctggatgaggcaaaccctcagggactatggctacaagttgagcaaagtcactctcctatgtgataatgagagtgtaatccgcatggcggataatcccgttgaacatagccgcactaagcatatagacatccggtatcactttttgagagatcaccaacaaaaaggggttatcgaaattgcttatgttagcacccacaaccaattagacgatatctttaccaagccactagatgaaaagacttttagcaaacttaggaatgagctaaacatcttagattctcggaactttgattga

SEQ ID NO: 53432 - DNA, 1752 bp, Zea mays
  Clone ID: MRT4577_148731C.1
ggcgtaataccatatacagtatataggggccgctttttttttttttttttacgtgacaccgaacagcttgctggaatttataagacaaaatttgggccagccaaggcccagatcagaaacagcgaccctctacacaaccagtcaatcatatattcatgtatatgaacctctcctgtagtacgacaacaattccatgacgtcacatcccattccctcgacagtttacgcccaaacgcgagaatgcttccatcgatctcctgctgtttgacagtgactggacccaccaacaattccatgacatcagaccaccaaggagactttgcagtgctttcgtcttctttcaagatgttgccttccgtctcactaccagatcatcagctgagtaatactcagcaataagccgatacatataagacggactgtgccccccggtgtcagtgatgaataggctcacaagcttcggtggcacatagtcaaatgttgggttggcaacatttagcaaggggctgccatcctgagtactgaaattcatgcaatctgagaactcgccaaaatcgagcaaatcagatggcgatttgagttcattcagcaacacttgtgggttgtgtggatacagaggacacagcttgtgactaccagcaaccacaacaaaaggcacagcatgcctttgagcagcaagtgcaaccatgttcatccctactggtgcaatgactccaccatttgccatgatagcatgcgctccaattatgaccatgttaactcgagagatcattgcaaaaactgctgaatctgttataactgtagtttgtacacctttctcaaccaactcttttgcaagaacatggccctgatatcttggagcaccttcagcaacaaatacacgaaaagatcgcttcttctctttcgcagcatacagaaactccttgacagttctcgaacgacctagagttaggattacctcattttggtgaataagttccacagcttgctcagagatcggctcatagcatgagtcaatctcatcaataaggtcaccaatggctgcgatgacatcatgcttcagtttcctagttgagcttttatctccagctgatttactttttccgtctgagtcaccggttgatgatgcagtgccggaaattgcaggactcacaggaatgtcttctagcagagtctgcaatgaaggtgcacgaagggcatttctagcatgtgcagcaagaacagcagcagataatgcagggcgatcatcatgttcactgtcatattcatcatcactgtcaacagtaacagaaagaccttcaattccaactgctgtggaagatatatcctcctcctttattatatgtaaaacacgtctcacaatgtttccaacagcaagctcaatgggattggcggagatgagctgctcccccacagcgcgtacagcatcggcaagcgcggctgcctggttggcgctgctacccatccgatgctgcgacacaaccgaccgtagcagttccgccgtctgccgggccaccgcgtgcgacccctccaccttccggcgcttaagcttgaggacgaagtcgctgacgagcggctgcacgtccggcatggcggagggcgttggggacgccgggagatgggggagggattcggaattgaggtcggatcggcagcgagaggattgagtgggattagggctttccgacgaggaggcagaggactcccgacggcgcgtgcccgcctacccgagcggccacgaggtacccaatg

SEQ ID NO: 53433 - DNA, 1071 bp, Zea mays
  Clone ID: MRT4577_148732C.1
atggggaagggccacgcgcaggggagagggaaggggagggagggagagaggagaggggaggggaagctcaccttcggatctgacgatcggcgactaccgtccaccggatcacacctagggcaaaggaggtggaagagagggcgttacaagatatatgttgagcaacctctcggctttgaagatagtgagtatcctaaccatgtttataagctctcaaaggcgctttatgggctcaagcaagccccaagagcatggtatgaaagcctgagagactttcttatcaccaatggcttcaaagttggaaaaactgatcctactctcttcactaaaataattgctaaagacttgtttatatgccaaatttatgttgatgatattatattcgtatctactaacaagtcaacttgtgaagaatttagtaggattatgatacagaaattcgagatgtctatgatgggggagttgaagtatttccttggatttcaatttggaatgaagaatgccaaacccatcaagacacccatgggaacagatgggcatctcgacctcgaaacaggaggtaaatccgtagaccaaaaggcaaatcctaacgaagttcaccttagggccgtgaaaagaatcatgagatatttattttatactcctaagtttgggctatggtaccccaaagtatctacctttgatttaattgggtattccgatgccgtttatgctggatgtaaaattgacagaaagagcacatcgaggacttgtcagtttctagggagatccctggtgtcttgggcttcaaagaaacaaaactcagtagctctttccaccgctgaagccgagtatattgctgtaggacactgttgtgcacaattactctggatgaggcaaacccttagagactatggctacaaattgagcaaggtccctctcctatgtgataatgagagtgcaatccgcatggcggataatcccgttgaacacagccgcactaagcacatagacatccggtaccactttttgagagatcaccaacaaaaggggatatcgaaattgcttatgttagcacccacaaccaattag

SEQ ID NO: 53434 - DNA, 1220 bp, Zea mays
  Clone ID: MRT4577_148733C.1
ctcgaggccggccgggcacgactctcggcaacggatatctcggctctcgcatcgatgaagaacgtagcaaaatgcgatacctggtgtgaattgcagaatcccgcgaaccatcgagtttttgaacgcaagttgcgcccgaagccttctggcggagggcacgtctgcctgggcgtccgccaacagtgaccgcggcgacgatcgccggctcgccgccatgaagcacctccacctctcatcttctcttcctctcctcctccaccgcccctccaagccccatctcctccaccatagccgccgccgcgcctccatccgcaacgccgcatccggcggcggctccggcgaacccacccccgccgcggaaacggcctcaggtacctctccgccagccgctgccaagcccgccggcgtcaaggaccgcctcaaggcgaggaaccaggcccgccgggtccggctggactccccgccgccggaggtggtggtggtgccgaagaagaagcccgcccccgccgcgtcgtcgtctcctgcgccgaagaagaaggtcgggcggaaggggtgggaggagatgagcctgggcgagaaggccgtggacctctacgtcggcgagaagggcctgctcttctggctcaacaagttcgcctacgcctccatcttcatcatggtcggcgcctgggtcctgttccgcttcgtcggcccctcgctcggcctctaccagctcgacgccccgccgctgccgcccaccgccgtgttcagcggcggctcgccgtgatggcgtcgagtcgttcccgagtgggcgtacactaggtcgaggcgtagagctagcgtagccgcggattaataatggtgacatgatatggaaagattgaggaagatgatgctgattctggagccaaagtttggaccttttgctgccaatatgtgaattgtagacgcgcggttcttggagcttgaattcctggtttgtctgtgcaaaacctgtttggttttgtacaggcaagcaattcatttcggtatggtctggttttgagaagaagctgatatcaagaagacatccattctgctgtcgttcttctaatggagaagaaattctcagaacagaccttatattcagaagcccattatgaggagcagatggaactagatgtaattccaagtcatttccattatgttctaatgccaatctcttaatttttcgatgctaaaaaaaaaaaaaaaaagcggcc

SEQ ID NO: 53435 - DNA, 292 bp, Zea mays
  Clone ID: MRT4577_148734C.1
ctgtatctaaagttggtgtataaagggcattttttagtttatcacacatttcaatatctttcaaaggttcatcatgaactgaccctatatacataccccttatggtgattccaaagtatattgggatcctggcacaagagcattagggttgggaactgctcagggtcttctttagctccccgttttatgaatgctcattcagctgagagccttatgtgccccaatactaactatcaggacacaccaatattttgcattaatactattgttactgctgacaccctgcaagacc

SEQ ID NO: 53436 - DNA, 1254 bp, Zea mays
  Clone ID: MRT4577_148735C.1
atgggctacaactatttattcactgatgtaggtgttactgtctttagaagaagtgatggtttagtagcttttaagggagtgttggatggtcagctatacctagttgattttaataataacaatgctgaactagacacttgcctaattgctaagactaatatgggttggctctggcatcgtcgacttgcccatgttgggatgaagaatcttcacaagcttctaaaaggagaacacattttaggactaaatgttcattttgagaaagacaggatttgtaacgcttgtcaagctgggaagcaagttggagttcatcatccacacaagaacatcatgacgaccgacatgccgcttgagctactccacatggacctattcggttcgatcgcttatataagcatcagtgggagtaagtattgtcttgtaattgtggatgattattcttgcttcacttgggtattctttttacaggaaaaatctcaaacccaagagaccttaaagagattcttaagatgggctcaaaatgagttcggattgagaatcaagaagattagaagtgacaatggaacggagttcaagaactctcaaattgaaggatttcttgaggagggcatcaagcatgagttctcttctccctacacacctcaacaaagtagtgtagtggagaggaagaatagaactctattggacatggcaaggaccatgcttgatgagtacaagactccggatcggttttgggcggaggcaattaacaccgcctgctactcaatcaacagtctctaccttcatcgaatcctcaagaaaacatcgtatgaacttctcaccggtaaaaagcccaatgtttcatattttagagtttttaggagcaaatgctttatccttattaagagaggtataaattctaaatttgctcctaaagcactagaaggctttttacttggttatgactcaaacacaagggcatatattgtcttcaacaagtccactggattagttgaagtttcttatgacattgtgtttgatgagactaatggctctcaagtagagcaagttgatcttgatgaactagatgatgaagaggctccatgcgtcgcactaaggaacatgtccattggggatgtgtgtctaaaagaatctgaagatcctccacaaacacaagatcaaccaccatcttccaaccaagcatctccaccaactcaagatgaggataaggctcaagaagaagaagatgaagatcaagacgatgagccaccttaa

SEQ ID NO: 53437 - DNA, 1671 bp, Zea mays
  Clone ID: MRT4577_148736C.1
gccggccgggttgcgatctctcccctgagcctgactggaaccttcccgatagaggatacaaaggcacccggatccatggaacctcgagtccggccgggcgggccgtgggttcgagggcacgagcgcctccactctccctccatccatttaccaccccaccccgccaccgccctcctcttctctcccgctgagcctgactggaaccttcccgagagaggatacaaaggcacccggatcgaggaaaccaatccattccattccattccacacaaggctaggcacaagcgaaccaaacccatggcgtccgacggcagcggcgtggtgacggtgtacggcagcaacggcgcggagctgctggagccgtccaagcagcccaagtcggcgactttctccgtcaaggtggggctggcgcagatgctccggggcggggtcatcatggacgtggtgaccccggagcaggcgcgcctcgcggaggaggccggcgcgtgcgccgtgatggcgctggagcgggtccccgccgacatccgcgcgcagggcggcgtggcgcgcatgtcggacccgggcctcatccgcgacatcaagcgcgccgtcaccatcccggtcatggccaaggcccgcatcgggcacttcgtggaggcccagatcctggaggccctgggcgtcgactacgtggacgagagcgaggtgctgacccccgccgacgacgcgcaccacatcaacaagcacaacttccgcgtccccttcgtctgcggctgccgcgacctcggcgaggcgctccgcagggtgcgcgagggcgccgccatgatccgcaccaagggggaggccggcacgggcaacgtcgtcgaggccgtgcgccacgtgcgctccgtcatgggcgacgtccgcgcgctccgcagcatggacgacgacgaggtcttcgcctacgccaagcgcatcgccgcgccctacgacctcgtcatgcagaccaagcagctgggccgcctccccgtcgtgcagttcgccgcggggggtgtcgccacgcccgccgacgccgcgctcatgatgcagctcggatgcgacggcgtcttcgtcggctcgggcatcttcaagagcggcgaccccgcgcgccgcgcccgcgccatcgtccaggcagtcacccactacagcgaccccaccatcctggccgacgtcagcacggggctcggggaggccatggtcggcatcaacctcaacgacccaaaggtggaacgatacgccgccagatccgagtgaaccctttctttccgtagtcatctccatccatccatctgccttggattgcatttccgtcgtttcatgtctctcaatcagtaataatggaatgaatgaaatggtaagaaacaaagctatggtactatgcagaacctctttaattttgtgctactgtactaagttagcctagtcccccccaccctggattatcatgtacccaaatgttggatggattgtatgtctgtcactgagccagaccttcttattgctatgaacgatgaatcaatcctctttctcgaggctaagacggctaatcgccttgatcagttgccatatcggaaaggttaagtgaatcacatcatcaggcaaatcttgtttgcaacttgatcggatctccgaagtgaatgagcaaaaaaacacagtggcaccgacaccgggaat

SEQ ID NO: 53438 - DNA, 1900 bp, Zea mays
  unsure (1)..(1900): unsure at all n locations
  Clone ID: MRT4577_148737C.1
accgactctcggcaacggatatctcggctctcgcatcgatgaagaacgtagcaaaatgcgatacctggtgtgaattgcagaatcccgcgaaccatcgagtttttgaacgcaagttgcgcccgaagccttctggcggagggcacgtctgcctgcccgtcacgcagtatcaggcctttgcgaattgcgacagcgagagcgggaagaggaaactcgaaactcggcgagcgggatggcaaccggcccggagcacgtggcggcggcggtcgaggagacgccggagaagaaggcggccagcacaaccgagctccccgcaccctcaggctggacgaagaaggttgctccaactcgaggtggacgatttgaggttatttttgtttccccaactggtgaggaagttaagagcaagagacagctaacccagtacctgaaagctcatcctggaggccctgcatcctcagagttcgattggggaaccagtgatactcccagacgctcagcacgcttgagcgagaaggtcaaggcaactgagagcccagagggtgagaagacccctaaacggggaagatcaagttctaagagaggcaaaaaggaggaaaaagaagacacagaggctgcaaatgaggctggagaagatggtgcttcggaggaaggtaaaggtacagatgtggagatgaaagatgctgaaaacgctgaagacgagaagaaagaggtcccaaatgcagatgctgcagagaagactgaggaaggtgaagataagaaagaggaggcccctgctgtagatgcagcagagaagactgaggaaggtgaagataagagagaggaggaggcccctgctgtagatgcagcagagaagactggtgagaaagaggtggcccctgctgtagatgcaacagaggagacagaaaaaagcaccgaaggccaagcacagcctaattatgttgctgccccagaatctgagtataaaggagactggaaagccaggtgaatccgaagcagctccccttgcatttgttgatgaaacagctccccatgtaattattggtgaagagaagaaagaggaaaatactgagaatgagaacagtcaggcagccgaatctgccgtgccttccctggcatctttagagggagagaagaaagagaatggtggtgcccctgaacaaccagccctgcctgtagctgagacgaaggcagatgctcctccggcagaggcagaaaagggggctgaaaattcaggccagccgaataccggctctcaagaaccgaaggcagcaaactgcgacgaggggcagattcaacctggtgcctctgctgtgaggtgcacataagggagcttgatctcagatgggactctgttgcgttatgtctttaggacgatacctcgcatttgctttgagaattgtaatcgtggttaacctgacagcgctgtgtagcactaggctgcccagcacgtagttatcctttcgtttcttttataacggtggtgttgcagcatgggtaatgggccggcctgtgctgcctcagccaccactgcatacccagtgtaagtgtaactcgttattagcgtggtcgacattgatctgtggagaggactgcaggacagtactgtcctcgacagctgtaacgttacgttttgtgtgttcccttgtgttattgaacttatattatgatccataaataaagccataagcgtggcagggtcattccctgaccaccttcaggcatcgaaaaaaaaaaaaaaaaaaaaaaaaaaacccccacccnnnaaaaannnaaaaaaannnnnnncctctgcgttgttcccgctgcttaagggcgatatccagcgcactgccggccgttgctggtggctccggcctcggtcccgtgcttggcgtagtcctggcccttgctgctccctgcg

SEQ ID NO: 53439 - DNA, 1118 bp, Zea mays
  Clone ID: MRT4577_148738C.1
gtcagccgtttcatctcctgatcagcctgctagcttagtgaggaatgcttctatgcgtgggatgcccataaacggttctttcaggaaagacaactctacagaaagcttcgatttggaatgtcaagagaaacatctggacattgttccgactagctcatcccctgaaaggaagttttcttttagttcttgctcatcaaatgggctccttttgtccaaagagagctctaaacagcaaactagcatccacaaccttgacaagtgtaatggagggcatttgcatgtatcagatgaaacattttctgaagctgctcctaagacacataaatcagcagaggaccatgatgatagatccaaacctccacttataagaggtcgatttagagttatacctgggcatgttgactcaaaggctcaaccacctggcctacagaagtgtcacagcatgcagacaatttctcgccttccatcattaagtataccctcttccgcagaagttgcatcaaccattattggtggctccttctacatgcagctatatagtattctacagacaaatatgcttcagagggaccaaatacttaacgcgatgaagcaggtgagtggttgtgctatggcttcaccaggcgtaccttctatggcttcaccgtgtatcccttccacaagtcgctcgacatctccatcaggtgtaccatcagttgacagatccatgctggaagctgcacaagaaagggagaaagagctgctgaatgaggtcttggagctgcaatggcggttattgtgcacacaagatgaggttcagaagcttaaagcaaatgcagcgcagatctgatgctgaagctgttaagggagcattaagggcgcgtcatgataagatgatctgttcatgcggttttcaaatggctatttagcataggagagagatacaaaattaaggattggtgtatatttaaaaaggtgctagtgatgctcgagtgtccaatcctgtctaagcaggacattaatttcgtacaatctgtgtgtttgtgtttatgggtggcatggcgctgtgtttttgttggagcgcaattcccaggttgggacttgggaaagatagcttaacatgcctatgggttttaatc

SEQ ID NO: 53440 - DNA, 2508 bp, Zea mays
  Clone ID: MRT4577_148739C.1
atcggttttctccttggaaatctgctggcgagtcccaggacccgaatgccccactcttattacctgctaattttgaatttcctaatcgggttgcagctgcttatataagctcactaaccccgcattcgcttttccgactcccacctccagccaaatcgggctatagatcaaacgctgcactgtagggagcgtgaagccagcggcgaatggaatccctagccgccacctccgtgttcgcgccctcccgcgtcgccgtcccggcggcgcgggccctggttagggcggggacggtggtaccaaccaggcggacgagcagccggagcggaaccagcggggtgaaatgctctgctgccgtgacgccgcaggcgagcccagtgattagcaggagcgctgcggcggcgaaggcggcggaggaggacaagaggcggttcttcgaggcggcggcgcgggggagcgggaaggggaacctggtgcccatgtgggagtgcatcgtgtcggaccatctcacccccgtgctcgcctaccgctgcctcgtccccgaggacaacgtcgacgcccccagcttcctcttcgagtccgtcgagcaggggccccagggcaccaccaacgtcggccgctacagcatggtgggagcccacccagtgatggagattgtggccaaagaccacaaggttacgatcatggaccacgagaagagccaagtgacagagcaggtagtggacgacccgatgcagatcccgaggaccatgatggagggatggcacccacagcagatcgacgagctccctgaatccttctccggtggatgggttgggttcttttcctatgatacggttaggtatgttgagaagaagaagctaccgttctccagtgctcctcaggacgataggaaccttcctgatgtgcacttgggactctatgatgatgttctagtcttcgataatgttgagaaggtactattcaagaatttctgttctcgttcgtaactaactcatgatgttctctgtgtttcagagtattgtcctacagttgcagttatgattaagtattaatcactttgccttggagcaccaattttttggaggctgaataagatagctagtagtttgatataggaagttaactatactaattctaaagattatgcatgtagtttgtcagtgtttcatcctatttttttttcacatctacaacagacagaaactacaccggttggtgcatttagaaagtatatgttatccattgggtcaatgtggaccggcatgcatctgttgaggaagcataccaagatggcaggtcccgactaaacatgttgctatctaaagtgcacaattccaatgtccccacactctctcctggatttgtgaagctgcacacacgcaagtttggtacacctttgaacaagtcgaccatgacaagtgatgagtataagaatgctgttctgcaggctaaggaacatattatggctggggatatcttccagattgttttaagccagaggttcgagagacgaacatatgccaacccatttgaggtttatcgagcattacggattgtgaatcctagcccatacatggcgtatgtacaggcaagaggctgtgtattggttgcgtctagtcctgaaattcttacacgagtcagtaaggggaagattattaatcgaccacttgctggaactgttcgaaggggcaagacagagaaggaagatcaaatgcaagagcaacaactgttaagtgatgaaaaacagtgtgccgagcacataatgcttgtggacttgggaaggaatgatgttggcaaggtatccaaaccaggatcagtgaaggtggagaagttgatgaacattgagagatactcccatgttatgcacatcagctcaacggttagtggacagttggatgatcatctccagagttgggatgccttgagagctgccttgcccgttggaacagtcagtggtgcaccaaaggtgaaggccatggagttgattgataagttggaagttacgaggcgaggaccatatagtggtggtctaggaggaatatcgtttgatggtgacatgcaaattgcactttctctccgcaccatcgtattctcaacagcgccgagccacaacacgatgtactcatacaaagacgcagataggcgtcgggagtgggtcgctcatcttcaggctggtgcaggcattgttgccgacagtagcccagatgacgaacaacgtgaatgcgagaataaggctgctgcactagctcgggccatcgatcttgcagagtcagcttttgtagacaaagaatagtgtgctatggttatcgtttagttcttgttcatgtttcttttacccactttccgttaaaaaaagatgtcattagtgggtggagaaaagcaataagactgttctctagagaaccgaagaaatatggaaattgaggttatggcttatgactgtcgtttgttcagtatgaaactagatttccaactgtgccttagaagtttgcaaatgtcttgttatat

SEQ ID NO: 53441 - DNA, 2217 bp, Zea mays
  Clone ID: MRT4577_14873C.1
ccccgcgtccgctcatcagcaatataatacccaagatacaatctaggcagcctacaatctaacgtactccaggctccagctgatttgtccacgcggcatggcgacggccagcgccgcttcaagcttcctcgtcccggcgactgctatcgccccgacaccctctgcatgcccatccacggttcccaagaacaagaagaatgctgccggccggcggcggcgcacattgcagtgcagggccagcggccggcggggcgacgacgaagacagccgcctcctctggctgccccggcgggaagtgctgaccggtctgggcggcgtggccgccagcttcgtcgggtacccggatctggcttccatcgccctggaagcgaaccccgtggagagctgccggcggggcgagaaggtgacggagaagctggtggagtgctcggacccgaacagagacttcccgtgcccgccggcgtcacgggtccccatcgtggacttcacgccggaggcgagggtgacgcgcgtccgcaggccggcgcacctcctggacccggagtaccaggagaagtacagggaggcggtggggaagatgcgggcgctggacgggtcgaacccgctgagcttcgcggcgcaggcggccgtccaccagtcctactgcgacgggcactaccggctggacccgacggagaagaaccggcccttcgacgtgcacttctcgtggatcttcgcgccgtggcaccgcatgtacatctacttctacgagcgcgccctcggccagctcatcggcgacgacaccttcgcgctgccctattggaactgggacgcgcccgccggcatggggatcccggccatcttcaagcagggcgtctccacggccgacaacccgctgtacgacccctaccgcaacatggagaacatggacgccctgctcgatctggactacctcaagaaacccagacgcgacaccatccctttcgagccgccgacggacccagccgcgcgcgccaagtacgacgacgccgttcaaaccaacctgtgcaccatatacctgcagcaagtccgtgacggcaagggcccccgtgctttcctcggcgagaagctgtgcagcgagtcgagcttccgggtgaaggagatcaacgagcggtccaagcggaggcaggcggacgggcagagcagcaaggtgagcccaagcaagtcgcagagccagggcacgctggagcggatggcgcacacgacggtgcacgtgtggacggggcgggcgaacccggcgacgtgcagcgcggagcagggcggcgtggtggggcacgacggcaagccgcactgccaggtggacatggggttcctgggcacggcggggcgtgacccgctcttctactcgcaccacgcgaacgtggaccggatgtggcacatctggtccactaggctgggcggtaagggcttcgacgacccggagtggctggacaccagcttcgtgttctacgacgactaccggagcccgcggctggtgcggatgaagttccgcgacgtcctggacgcgaccaggctcgggtacacgtacgacaaggagtcggaggcggcgctgccgtggctgaacagcaagccgacccggttctccggcggcggcaaggcgaaggcgaaggcggcgcccaaggtggcgtcggagttcccgctgaccctgacggacgaggccgtggacgtgccggcggtggcggtcccggcgcggcaggccgggaaggacctggtgctgctgatcgagggcatcgagtacgacccccagatcaacaacaagttcgacgtggtcatcaacgtggcccgggaggacgccgcgagggtggggcctaaggacagcgagtacgccggcagcttcagcgccgtgcccagctccaacgccgccggtggcacgctggtgggcaagttcacgctcgccctcgacggcgtgctcgccgacctcgggctcgccggcgcgagcgccgtcgacatcgtgctcgtccctcacacggagggcgagatcaagctgtacttgcccccgaccatcgagaacgcgtgagaactgagatgagatgagacccgccacgcactgctggctggctgtttcgtctgttcaccgtccccatgagccagcagtggcgatttttaagttctaattgaagtagtatatgccgtcctgataatcctaccgctttgtatatatgttgcctggaattataatctcctcatattatataatcc

SEQ ID NO: 53442 - DNA, 2213 bp, Zea mays
  Clone ID: MRT4577_148740C.1
ctcgagccgctcgctgccgatccgacctcaattccgaatccctcccccatcaaccgggtgcgttcttcagtgttagttctccaccctctccttggcggaaaaccctaaccccctttctcggcgacgatccgacccctaccccatctcccggccgaccccacggcgctctccgccatgccggacgtgcaacctctcgtcagcgacttcgtcctcaagctcaagcgccggaaggtggaggggtcgcacgcggtggcccggcagacggcggagctgctacggtcggttgtgtcgcagcatcggatgggtagcagcgccaaccaggcggccacacttgccgatgccgtacgggctgtgggggagcagctcattgccgccaatcccattgagcttgctgttggaaacattgtgagacgtgttttgcatataataaaggaggaagatatatcttccacagcagttggtatcgaaggtctttctgttactgttgacagtgatgatgaatatgacagcgaacatgatgatcgccctgcattatctgctgctgttcttgctgcacatgctagaaatgcccttcgtgcaccttcattgcagactctgctagaagacattcctgtgagtcctgcaatttcccgcactgcatcatcaactggtgactcagacggaaaaagtaaatcagctggagataagagctcaactagaaaactgaagcatgatgtcatcgcagccattggtgatcttattgatgagattgactcatgctatgagccgatttctgagcaagctgtggaacttattcaccaaaatgaggtaatcctaactctaggtcgttctagaaccgtcaaggagttcctgtatgccgcgaaagaaaagaaacgatcttttcgtgtatttgttgctgaaggtgctccaagatatcagggccatgttctcgcaaaagagctggttgagaaaggtgtacaaactacagttataacagattcagcagtttttgctatgatatctcgagttaacatggtcataattggagcgcatgctatcatggcaaatggtggagtcattgcaccagtagggatgaacatggttgcacttgctgctcaaaggcatgctgtgccttttgttgtggttgctggtagtcacaagctgtgtccgttgtatccacacaatccagaagtgttgttgaatgaactcaaatcgccgtctgatttgctcgattttggcgagttctcagattgcatgaatttcagtactcaggatggcagccccttgttaaatgttgtcaacccaacatttgactatgtgccaccgaagcttgtgagcctattcatcactgacactgggggacacagtccatcttatatgtatcggcttattgctgagtattactcagctgatgacctggtagtgagacggaaggcaacatcttgaaggaagacaaaagcgctgcgaagtctccttggtgttctgatcataggatttgcgatcttattggaatcctagtgttcttgtactcgtcatgatctgttgcctgtagagcggtgctgctgtgataagtggaatcacctgtttgtggatccagttactgtcaaactgcaggaaatcgatgcaagcattctcgcgcatcgttgtaaccatggcggcattttaagtataaactgttgaggaatggagcgttacgtcatggaagaattgtttcactataggagaggttcaaatatatgattgactggttgtgtagagggtgtctgtttcttttctggtcataggttaatctgggccttggctggtccaaattttgaatgttataaactccagcaagctgttcgatatgtctatgaagtgttaccatgcacactgatgggtatttgctgagccattttgttttctagcacacgcgccgcagcagatcggactccggcggggccatcggtggcagcgagaagtgaccgtacgtggaactcccgctgcggagctcgcccatggtcaccagcgcggccacggtgttccggaagatgccctgcctggctgaggccacgggggccgtccccgccgacgagcgggcgtggcctgtgctggcctcgaacacggcctccatggtggcctcgcagtcgcggacgagcctggagatgagctccgtggcgaagaagggctgccggagcacctttccgcggacgcgtgggcggacgcgtgggcggacgcgtgggcggacgcgtggg

SEQ ID NO: 53443 - DNA, 754 bp, Zea mays
  Clone ID: MRT4577_148741C.1
ccggccggggattgctggcggccccgcaagcgaagagaactttcaaaccaaacgagcagtcgtgtccaattcaatcccccgggtaatccggtgagcgcgcgcgtgtatatatattatatacacagggctgccgccgccagcaggcgtcgcgcctaccgccacctgactccctctgccttctcgtcgctctgctcctccgttgccgtgaccctaagggaggaggaggaggaggaggaggaggaggggaaggaacggagggatggcggaggagacggtgcaggagctgcgcgcgagcttcgcgtcggggcggacgcgccgggccgagtggcgggcggagcagctcaaggggctcatccggatgatcgacgagaaggaggccgagatcagcgccgcgctccatgaggacctggccaagccgcacatggagtcctacctccacgagatatcgattacaaggtcctcgtgcaagtttgccctcgacgggctcaagagctggatgaagcccgagaagatacctgcggccttaaccacgttcccgtcctctgctcaaatcgtgccggagcccctcggtgtggtgctcatcatctcagcctggaactaccctttcatactctcgatcgacccagtcattggagcaatcgcagctggaaatgctgttgttctgaagccgtcagaaatagcgccagctacctcgtcattgctagcgaagctgctgcccgagtacgttgataactcctgtattaaagtcgtggag

SEQ ID NO: 53444 - DNA, 116 bp, Zea mays
  Clone ID: MRT4577_148742C.1
ggcttgcgcacccttccgacggcggcttcctcaccgagaacggttggaactccaccggcgaggccaccccggagggcgagcccaaggactgacgaccatgaaaaggaaaccagaaa

SEQ ID NO: 53445 - DNA, 361 bp, Zea mays
  Clone ID: MRT4577_148743C.1
gatcctagatgaacaaatttatttattaaaacacacccgccaaaaccagtttattttttcttgggcccaatggcgtcgttgtggacatgcatttttgcagatgcaagggcattatcagagatcatcacagcagtaacgtaaaaatgatgaaagcttttttttgaccgcacgcaaaatgcgcagttttttattccaacttttgcaccacctgttgggcgtgggcggggccccgggacaccccccccggggggtacttaaacaacgggctgagcgggggggcaggcatcccgtcgggaggggggcaacccgcgggaatctttttttctctcgccctggggcccgtgggcccgggcctggactt

SEQ ID NO: 53446 - DNA, 1552 bp, Zea mays
  Clone ID: MRT4577_148744C.1
cacgactctcggcaacggatatctcggctctcgcatcgatgaagaacgtagcaaaatgcgatacctggtgtgaattgcagaatcccgcgaaccatcgagtttttgaacgcaagttgcgcccgaagccttctggcggagggcacgtctgcctgggcgtcacgccattggtcgccaatcgcagtatcggcaccgttcttccccgcttctccagtccagctcaccagccgccccccctccgctgctgacactgcgaagtgcgaatcaaagccaccaccgcgcacaaaccatggcaccggtggaggcggagcagcaccggcggagggcgctggcgctcgcggcgcacgacgcctccggcgccgtctcccccatccgcatctcgcgaagggacactggagatgacgatgttgccatacagatactgtactgcgggatatgccactctgacctgcacaccatcaagaacgagtggaagaacgccaactaccctgttgtccctgggcacgagatcgtcgggctgatcaccgaggttggcaagaacgtgaagaggttcaacgtcggagacaaggttggcgtcgggtgcatggtcaacacatgccagtcctgcgagagctgcgagggagggcacgagaactactgctccaagatcatcttcacctacaactcccacgacagggacggcaccgtcacctacggtggctactctgacatggttgtcgtcaacgagcgcttcgtcatccggttccctgatggcatgcccctcgacagaggcgcgccgctgctctgcgctgggataaccgtgtacaaccccatgaagcaccacgggctaaacgaggcaggcaagcacatcggcgtggttggactcggggggcttgggcacgtcgccgtgaagttcgcgaaggcgttcgggatgagggtgaccgtgatcagcacgtccccggggaagagggaggaagctatggagacgcttggtgcagacgcctttgttgtcagcggtgatgctaaccagatgaaggctgcgaagggcacaatggatggcattatgaacacggcctctgcaagcatgtccatgtacgcttaccttgctctcctcaagccccagggcaagatgatcctgcttggcctgcctgagaagcctctgcagatctctgccttctctttggttactgggggcaagactctggccgggagctgcatggggagcatcagggacacgcaggagatgatggacttcgcagccaagcacgggttggcagcggacatcgaactgatcggcaccgaagaagttaatgaggccatggaacgcctcgccaagggcgaggtcaggtaccgcttcgtcatcgacatcggcaacaccctcaacgcggcatcactagggagctcgccggtcccagctctgtagctgcggcacttgttgatcaacaaatgctcacataaacatattgttgtttgtcgatatatcgtgcgataagcaagtatatttggaataaaaaggaactcaatttaaacgcaagtaatacaaataaacttaggtcctatttgggctttggtttac

SEQ ID NO: 53447 - DNA, 2129 bp, Zea mays
  Clone ID: MRT4577_148745C.1
gtgcggcagctaataacggcccttgttgacacgactctcggcaacggatatctcggctctcgcatcgatgaagaacgtagcaaaatgcgatacctggtgtgaattgcagaatcccgcgaaccatcgagtttttgaacgcaagttgcgcccgaagccttctggcggagggcacgtctgcctgggcgtcacgccaaaaaaaaaaagaaccgcgcacgcttcttcttccctcccccacaaagggaagaaaaaaaatttccgtgtacggtttcgcccggcgccgcctttggcagttgctttgcttgctcttgccatgttgagctccaaaggatctccatttcaccactcccatcgatcccactaccggtccgcatcaagcagattcgatgaggtccgcgtccgcccgcatcgccaccgccgccgtgcacctcgtcaccgcggccgccatcctcctcatgctcgcgcgaggcggcgaggccgtcagtctctggctcccgccgccgaccgccggaggagggggcttcctcggcggcgcggaccgttacctgactcgggaggagcactggatgaaccaaaccctggatcacttcaacccgacggaccatcggcaattcaaacagcggtactacgaatttctcgactactaccgagctccaaatggcccgatcttcctatacatctgtggagaatctacgtgcaatgggattggcaataactacttagctgtggtggcaaagaaatttggtgctgcattggtttctcctgagcatcgatactatggaaagagttctccttttaacagtttgacaacagaaaatctacagttcttgtcatcaaagcaggctttatttgatcttgctgttttccgccaatattatcaggaaaccttaaatgccaagtataatcgctctggggcagacagttcttggtttgtttttggagggtcatatgctggagcactcagtgcttggttcaggttgaagtttcctcacttgacatgtggaagccttgcaagttcaggggttgttcttgctgtatacaactttaccgattttgacaaacagattgggatctctgctggtcctgaatgcaaggcagcacttcaagaaataacaggacttgttgatggacagcttcagtctggccgtaactcagttaaggagctgtttggagcgacaaagttagaaaatgatggtgacttcctgtacttactggcagatgctgctgctattgcgttccaatatggtaatcctgatgtcttgtgctccccactagctgaagcaaagaagaatgggacagatttggtggaaacatttgctagttacgtgaaagattattacattggaaaatttggggcgtcagtagcatcatatgatcagcaatatttgaagaacacaactcctgctgaatcctcatatagactatggtggtaccaagtttgcagtgaggttgcatatttccaggtggcaccaaaaaacgatagtgttcgttccccaaagatcgacacgaggtaccatttggacttgtgcagaaatgttttcggcgaaggagtctaccctgatgtctttatgacaaacttatactatggaggcacaggaattgcaggttctaaaattgtttttgcaaatggatctcaagacccatggcgccacgcttctaagcagaaatcatcagacgaattgccatcatacttaattgagtgcaagaactgcggacactgcagtgatctctctggatgccctcaagctccttcaaacattgaaggtgattcatccaagtgctcacctcccgaagctctgaacaaagtaaggaaggagattgtcgatcacattgacctgtggctatcagaatgccaagagcaaggacatgacaaggagccatggctgggaagcagatggagcatagctgctatttgatcaatctgtgaagctataagcatgtgctgctagagtaaccaaggcaaatatgctttctttttcttgcagcactgtggtttatcgtttcggcaaactatgtgggctgctgagtaatccacctgtggcgaataaataaagcagtcagttctcagtctaaaaaaaaaaaaaaaaaaaaaaaaaagaaaaaaaaaaaaaaaaaaaaaaaaaacacccccc

SEQ ID NO: 53448 - DNA, 533 bp, Zea mays
  Clone ID: MRT4577_148746C.1
gattccagataccttcgcaatcacaacgaacaaaagctctcgatctcacccacacccaggaagaatagatccatggcgtccgacgagggagatgtgatcccggggcacagaaagggtgagtttgacccccacatgaccaagggccaggaagccggtaagctggtgggcattgacttcactgccggctggagcggaccatggcgcgccatcctcccactgttcctcagacacggcaagaagttcactcagggcgaggtcctgaagggggacgtggaccaagtgaaggaagtcaccggggcctacgaggacgaggcgatggcgaccttccacttcatcaagaacggcaagacggtcgcgaccatcgtgggtgccactaaggacgagctactagtccagatcgagaaggatggtgcgcctgcagctgcgtctgcgtctggctaaaggagatcagatcaaggcggcggcgaaaataagggccagcacgtatgggtgggaatggtgtccctatccttccaggcctagtcctgggcggg

SEQ ID NO: 53449 - DNA, 294 bp, Zea mays
  Clone ID: MRT4577_148747C.1
tatgaaggccatccttgccatcgctctttgcctcatcttcgttgccgccgcttcggctcacgtcaccgttgtcggtgctcgtggacccggaatcaacagccctgggtacatcaagtccaactccatggatccatgcggaaatggaacttacgatatgaccaaggccatcaacgtcactgctaatgacatcttccccgttacctgggctctcttcgtcaaccacaacatccctccagccgtcgccggatccatcaacttctactggggactcgaaggaaacgcccgcatcgaccc

SEQ ID NO: 53450 - DNA, 356 bp, Zea mays
  Clone ID: MRT4577_148748C.1
cgttcgtggaggaagagctgccgcgcgcccgcgcgggggccgccacctggctcacgccgccgtacctgtacctcgtcatcaacgccatcatcatctccatcgccgcgtcgtcccgcttccagtcgagcggcggcgccggcggacgtccgtcagccccgtcgtatgcgcccgccgcggaccccgacgccgacgccatcggaggagaaggagcgggcgaggagatggagcagcagcaggatgggatccagccggcggttgcgtcgttgcaggtgcctgcagcggtgcccgttgtggcagccaatgccgcgggggttgctgctgtcgtcgaggagccagtggtggtggagacccacact

SEQ ID NO: 53451 - DNA, 403 bp, Zea mays
  unsure (1)..(403): unsure at all n locations
  Clone ID: MRT4577_148749C.1
aaggcggtgccgcctacccgtcggcgagctcaccggcatgaggggcgattcctgccctcagagctccatcaccccaaattgaaaggtactacacactgctcgactcaaggcaaattagatgggaggttccttaccacatacggcaacggggagccctgaccacgtgaacggcggctcggcgggaagtctttgctctgacgagcaattctgcttttttgagttgcatcccgtgcgccctgtcgttgctccttccttcagcgatctcccgcaaacactcgcaagcagtcttaaggtcttggcgacgccggtggtctggattggcctcgatggcgccccatctctctatttgccctctctctctcttgacggcttggctcgggatattccggnggcgccatatata

SEQ ID NO: 53452 - DNA, 770 bp, Zea mays
  Clone ID: MRT4577_14874C.1
ccggccgggaccagcggcatctatagcaaccggtccagcactttcacgctcagctccatgcaatggctgcctccaccatggagatctcctccacggcgatggccggcacccccatcagcgtgggctccttcggcgacggccgcatcaccatgcgcaagaccgtgggcaagcccaatgtggcggtgtctggcagccgctggtacggccccgaccgcgtcaagtacctcgggcccttctccggcgagcccccgagctacctcaccggcgatttccccggcgactacggatgggacaccgcccggctgtccgccgacctcgagaccttcggcaagaaccgcgagctggatgtgatccactcccgctgtgccatgcacggcgcgctcggctgcgtcttacgcgagctgctctcccgcaacggcttcttcgtccaggccatcgtcaccggcaagggcccgctcgagaacctcgctgaccacatcgctgacccagtcaacaacaacgcatgggcctacgccaccaacttcgtccccggcaactaagctcaacggctatgctatgcgacttcattgtctttcggatcggagagggtgtacgtacgtggattgattgatgctgcgggatgcatgtgtgtcttttgtttcacgttgcattgcataggcaagtcgagatgatgagttggcgttgtacactaagatgaaccatgtttgtgcaatagtggtggtttttgtttcctgctggctaaaaagaaaaaaaaaaaaaaaaaagcggcc

SEQ ID NO: 53453 - DNA, 1007 bp, Zea mays
  Clone ID: MRT4577_148750C.1
ttagggggaagcgaaccgaaagagagcagagcttggcaatggagctcccgtggggaatgctgctgccgctgctgctggtcctctccatctcgtccccgtcctcgtcgtcggctgctgccacgctcgccgtcaccgctccgcccccactgcctgttcctcctcctcgtcatgctcaagacgccgaaggcatgctcatcaacggcaacttcgagacggcgccgcggaggctgaacaagaccctcatcgtggggcgccactcgctgccggggtggacggtgcaggggcacgtggagtgggcatgttcttcgcggtgccgcacggcgtgcacgcgctgcgcctcggcagccgcgcgtcggcgtcgcagaacgtgacggtgcggccgggggcgctgtacgcgctcacgttcgcggcgacgcggacgtgcgctcaggacgaggccctgcgcgtggcggtggcgccgtcgatctcggcccccgccgacgtcgccgtgcgcacgctctacagcggcgcgtccgccgacacctgggcctggggcttccgcgcctcctcccccgtcgcgcaggtcacgttcgccaaccccggcgtgcaggaagaacccgcgtgccgcccgctgctggacgctgtcgccatcaaggagctgcccgcgccgtacccgaccaaagacaacctgataccaaggtcaccgacggcgtctcgctctgcggccccgtgctggaccaggtcaaggttgtgcctgtcaaggcgtagtgaaatgtagtgaaatgaatcgtgagagcgccgagtgacggtcgagtgacggtctgctctgctctgctctgctcgtcgtctgtagctgtgctcgtcgtgatttggcgtggtgggttgtgaaagtgtggacgaattatggacccttcggaatctgatcgtggtgtgctgtgcggtgcgatgtgctgtagcgaaataaagttgctcaaaaaaaaaaaaaaaaaaaaaaaaaaaaaaaaaaaaaaaaaaaaaaaaaagggcgg

SEQ ID NO: 53454 - DNA, 171 bp, Zea mays
  Clone ID: MRT4577_148751C.1
cccgacccacgcgtgcggattaacacacatttcacggcgcacatttgtcttcaccgacacaccaatgatcatgggaggttattttagaagcaatctcattcacaaaggtcgccgcacgatcggctttcaccgctgactatcatgaaaaagacaccagttatatcattatca

SEQ ID NO: 53455 - DNA, 695 bp, Zea mays
  Clone ID: MRT4577_148752C.1
cattgggtacctcgaggccggccggggcctttttggctaagatcaagtgtcatcgagtcgctcaaggcggtgcggtttatcgacgcggcccacttctctgtccccgcggggcagtacgcggtggagctggtggccgggcgggagagcgccatcgcgccaggtcatccgcaccgtgcccaaccgcgcctacaacctgtcgttcgccgtcggcgacgcccggaacggctgccacggctctatgctggtggaggcgttcgcgggcaacgtcacgcagaaggtgccgttcgattccgccgggaaaggcgggttcaagacggcggcgttcaggttcgtggccggcggcgtccgcacccgcctcaccttctacagctcctactaccacaccaaggtcaccgacggcgtctcgctctgcggccccgtgctggaccaggtcaaggttgtgccggtcaaggcgtagtgaaatgaatcgtgagagcgccgctcctcgtcgtctctcgtctgtagctgtgctcgtcgtgatttgccgtgggttgtgaaagtgtggacgaattctggatccttcggaatctgatcgtggtgtgctgtgcggtgcaaaaaaaaaaaaaaaaaaaaataatttgtgaaatattaaagtcgattataatatatgtattgctcgtttttatataaacaaaaaaaaaaaaaaaaaagcggcc

SEQ ID NO: 53456 - DNA, 1518 bp, Zea mays
  Clone ID: MRT4577_148753C.1
cgggaaaaaaaattcattgggtacctcgaggccggccgggaagggggaagcgaaaccgaaagagaggcagagcttggcaatggagctcccgtggggaatgctgctgccgctgctgctggtcctctccgtctcgtcctcgtcatcgtcgtcggctgctgccacgctcgccgtcagcgctccgcccccactgcctgttcctcctcctcgtcatgctcaagacgccgaaggcatgctcatcaacggcaacttcgagacggcgccgcggaggctgaacaagaccctcatcgtggggcgccactcgctgccggggtggacggtgcagggccacgtggagtacgtctcgggcggtccccagcccgggggcatgttcttcgcggtgccgcacggcgtgcacgcgctgcgcctcggcagccgcgcgtcggcgtcgcagaacgtgacggtgcggccgggggcgctgtacgcgctcacgttcgcggcgacgcggacgtgcgcgcaggacgaggccctgcgcgtggcggtggcgccgtcgctctcggcgcccgccgacgtcgccgtgcgcacgctctacagcggcgcgtccgccgacacctgggcctggggcttccgcgcctcctcccccgtcgcgcaggtcacgttcgccaaccccggcgtgcaggaggaccccgcgtgcggcccgctgctggacgccgtcgccatcaaggagctgcccgcgccgtacccgaccaaagacaacctgatcaagaacgacggcttcgagatcggtccccaggtgctcaggaactcgacggtcggcgtgctgctgccccccaagcagaaggacgcgacgtcgccgctgcccggctggatcatcgagtcgctcaaggcggtgcggtttatcgacgcggcccacttctctgtccccgcggggcagtacgcggtggagctggtggccgggcgggagagcgccatcgcgcaggtcatccgcaccgtgcccaaccgcgcctacaacctgtcgttcgccgtcggcgacgcccggaacggctgccacggctctatgctggtggaggcgttcgcgggcaacgtcacgcagaaggtgccgttcgattccgccgggaaaggcgggttcaagacggcggcgttcaggttcgtggccggcggcgtccgcacccgcctcaccttctacagctcctactaccacaccaaggtcaccgacggcgtctcgctctgcggccccgtgctggaccaggtcaaggttgtgcctgtcaaggcgtagtgaaatgaatcgtgagagcgccgagtgacggtctgctctgctcgtcgtctgtagctgtgctcgtcgtgatttggcgtggtgggttgtgaaagtgtggtcgaattctggacccttcggaatctgatcgtggtgtgctgtgcggtgcgatgtgctgtagcgaaatttggttgctatctcttgttcactccacgtttggaatttgcgttttcaatccggtattgaaggtataataattaactgctagtagtagaaaaaaaaaaaaaaaa

SEQ ID NO: 53457 - DNA, 479 bp, Zea mays
  Clone ID: MRT4577_148754C.1
cttccccttctcttacccttcacctcccgtttgcccgcagtcgccaccgcgtccctccgtactccagcgccctcgtccccgatcgacgccatggtgccgcgacgccagcaagacgaacgacgcccagaagaaggccgctgccgccgccaatacacgagaccaggcctcgccggcgtcctcgccgccctcatctgcggccgcggccgcacgatacagtgccgaacggcgtcatgccgtttaagctatcacaccgcacctgtaccggcgtcctcgcctctcaccccctttcccgggatatccacatagagcctctttctttaacatttcttgttttcgacctcaccgcggattctgatttggagctgacctacggaaggtatactcctcaatacataatgctacccttcacttacgagctggcatgctcctgcactatgccccttgtaacttttatctgatatatatttatttgatatatc

SEQ ID NO: 53458 - DNA, 307 bp, Zea mays
  Clone ID: MRT4577_148755C.1
ttctcgggtccggccacgacgggccctacaggttcgaccttgagcggtcatgcggcatcttctacgtgcccacgggggtgaactggatgccgatagccagtcccgtcagcaaggactttccgctctccatctaccccgtggacaaggtgccactgccctacgagctgttaggtcccaagccgaccacccggtgacccgtgacgagcacggcacacgtggaatgcaagaccaataagaagaagaaggccgtcggcatagacaagccgcccacgggcgacgactacacctgcgacttcgacgtccagat

SEQ ID NO: 53459 - DNA, 750 bp, Zea mays
  Clone ID: MRT4577_148756C.1
tcttgaaaaaggggtgctactggtactactattaactgttggttgtcagcttgctgctcatcagctcgtggcagcatctgtagcctagatcctaggtcttggtctttgcatccaccggccggcaatgcaagttccagtgtcttggcctcgttgttccagacagaagcaaaacgtactgcactgccaacgacatttaagacatgctatggtcgtcgccgtgaacgtgagccgcgcatcgttgaaggctaggtccacgaggaggtagacaagggcacatgcgctcccaagagcttgttcgtgttcgtgacccgacgaccgcgcgcgtttgtccgtgggctcgtgggacgccagcagcccacgcgaaacggttcccctgccgcgcgcgcgcgcgcgcccggtgcatggctctcctcagcctccgaatggagtcatcaccgtcgacgcctcgacggcgcggaggtgaccaaataagctccggctgctcgcagccgtggcacgaaacgaggacacacggactggtaggaggctagggggggcacggacaagaccgctccgttccgttgcctctcccgcgctctgcgagggagagggatgatgcatgggcagcgcgcggacacacggacaggcagcggcctgcggccctgtacccacgtcgcagtgccgggatccgcgcctaccacggcacgatcagcgtcatcatggcacaatcattcacaaacctcccagtcccagcggatcgcacgccgaaaa

SEQ ID NO: 53460 - DNA, 379 bp, Zea mays
  unsure (1)..(379): unsure at all n locations
  Clone ID: MRT4577_148757C.1
ccacgcgtccnnagtctcttccncatattcttaatttttctttttttcctgaaatccttcaccctcaacaagattattttctaaaaagacatatgtctcttctctttccctttcatcttataaatcacatctcccaatctctttatttcattcatcatttcttttattctacttcttcttttttctttatctctttattaatcctttattttttaatattttttcttctctcctctctctctttcattatcttccatatactacacttcttcactctcctaattatctttttttttatcattttttctcccttttccttacttattcttccttccataaataattttacatttacctttcttcctctcctatattccct

SEQ ID NO: 53461 - DNA, 347 bp, Zea mays
  Clone ID: MRT4577_148758C.1
gggaaaagtaggctttgcctaggttcatgcttaaaggaaacaaaatcctgcttacattaatatgtcaatgaatcatttgaataaaacaatagttctacgtatgtgattcaaactagagattcttcggacttgccaaggctgatccgatgcttgaagaaagcgtttagtatccttcttcttcaccttcaccttcggcagtctcaataccaacttcttcgtagtccttctccaaagcagccaaatcttctttggcttcagagaactcacctttttccataccctcaccgacgtaccagtggacgaaagctcttttagcgtacatcaaatcgaatttgggatcgattctt

SEQ ID NO: 53462 - DNA, 838 bp, Zea mays
  Clone ID: MRT4577_148759C.1
actcatcccgtcatccccacagcttagcagcaacaactaccagtgccatagacgctctccatcaacaaactctagctgatcagtcctagctaagcttgtcgcatagcaagcatggggtactccaaaactccagcagtttgcctgttcgccatgctattcctagctccgtccgtcttggccaccgaccctgaccctctccaggacttctgcgtcgccgacctcgacggcaaggcggtctcggtgaacgggcacacgtgcaagcccatgtcggaggccggcgacgacttcctcttctcgtccaagctggccaaggccggcaacacatcgaccccaaacggttcggctgtgacggagctcgacgtggccgagtggcccggtacgaacacgctgggcgtgtcgatgaaccgcgtggacttcgcgccggggggcaccaacccgccgcacatccacccccgcgccaccgagatcggcatcgtgatgaaaggtgagctccttgttggaatcctcggcagccttgactctgggaacaagctctactccagggtggtgcgcgccggagagacgttcctcatcccgcggggcctcatgcacttccagttcaatgtcgggaagaccgaggcctccatggtcgtctccttcaacagccagaaccccggcatcgtcttcgtgccactcacgctcttcggctccaatccacccatcccaacgccggtgctcaccaaggcgcttcgggtggaggcccgggtcgtggaacttctcaagtccaggttccccgatgggttttaattcctgggagccttcccctgaaatgacatatgtaattcaatatatgcatgct

SEQ ID NO: 53463 - DNA, 862 bp, Zea mays
  unsure (1)..(862): unsure at all n locations
  Clone ID: MRT4577_14875C.1
gttactgcctgactgcctacacgttcttggcgcatcgtttctcttcctgccatcccatgccgttcagctgttaatttccttggcctgacaactttgtttcttcgagatttcatctctgccagaagttccagcggccaagaacgcttgtggcgtggcgtggagctggcaaccgtcgtggatttgatcttccctgggcgcctcgagcatagcggcgccggggaaggcggtgacgccaggtggtggcgctgcgccggcggtcaggagatgacgacggcgcggcagtggtggcggcgcgcagcggcggccgtcaaggacaggaggagcctgtacctgacgcgtgtggtggcgttgcggccatggccagtctccggggtggccacgccggcgctgaggagcccgaagctggaggcggccgtgatccgcgcgaccagccacgacgagcgatccgtggaccacgggagcgcggcacgggtgttcgcactggcgcgcgcgtcgccgccatcgcttcagccgctcatgtgggcgctagcgcgccgcgcacggcggacccggtgctgggccgtggcgcttaaagcgctcatgctcgcgcacggcctgctcctgcggtccgacgttgcgccacgcgcggcgcgccctcgggcgcgtccccttcgacctcgccgacttccgcgaccgctcgtcgccgccgtccaaatcgtcgggcttctccgccttcgtgcgcgcctactttcgnttcctcgacactcgttcccttttnaccgcccatgagctagacgcctttaacagtcgttaggttctactgctaggactcgttgttttgaccgggtgaccaacctgtaccacctgctggacctgttcatgc

SEQ ID NO: 53464 - DNA, 257 bp, Zea mays
  Clone ID: MRT4577_148760C.1
tctacgcgtacgtggacacctaaatctctgctatggacgtcctgtacatcatcagcgcaaggactacttaaaggcacttacgggataaaacgatcagtgatcgtatcaccatgcatgaagtacagtcaccgagtcaccgcttgcctgactagattgatatgtacattactagggacagacagacccataagcggtgtcaccttccagatgtatgaagcagacactgtgctcaacgaagactgactttaaaaagcgct

SEQ ID NO: 53465 - DNA, 633 bp, Zea mays
  Clone ID: MRT4577_148761C.1
ccacgcgtccgctttagttcccggacgtccgtgtctgcatgtctccggcatgccgcgtgccgcagatcgcagagcacgcgctccctcgctagctagattctagagttgtaaggaattggactatacttgggtgtagggctcggatttgaatttgaatttgtggggatgaaactcatgaataaggcagagaaatttgagatggtcgctgccctcgcttgagggaatgaagtttgtgcgtacccaactacaagatggtctgggagggtggctttgatatattcgccctctggttcttcctcttgagattgtgctcatttcagcttttgtggcttgcaggcagaacaagattcggatggctcggcacaaagcacagctgatatgacggcttttgtaagtaccaactattactgcgctgttttacatctggctgtcttgattgtagaatgtagattggaccatatttgctgtgttgaacctactgtccacttatggctaatggtttatccatgctcactgttttcaggtgcaaaaccttcttatgcagatggtaagttcctagctttatttggcgacagtcttgtctcttgtgcatgccctcacttcgattatattttttgaatctgagtaccttgc

SEQ ID NO: 53466 - DNA, 408 bp, Zea mays
  Clone ID: MRT4577_148762C.1
acattcttctgatgttgccaggacccaacgagggggtggcggcaaatctacaaaggggggaaggtagggcctaaccggcgcagcccctgcacgaagacgggtgggctcacaggattcaactgccagtgtgggaacttgtactgcgcgctccaccgctactgcgacaagcacgactgcaagttctactaccggactgctgacacggacgccattgccaaagctaatccggtggtgaatgcagacactctctacaagatctaaggggggtttcctacggctgttgtcaggaagattacaaaccgtgataactggatatgcgaaactgctaacttgcccgcagagcctttttgttccatgtttgctactacaatcttgttgttcggcattgcaacgcacaatacacacttg

SEQ ID NO: 53467 - DNA, 262 bp, Zea mays
  Clone ID: MRT4577_148763C.1
tctgttctagatcgcgagcgggcgccctttttttttttttttttttttttatggcatcaaaaaaacatagtgcaagattaaattaaaaaccattctaattgaacagttgttgacaggacccttaacaacatgataaaagcaaacccaaaataccccttggcaaaagaaataaaggtgctctattataacgaaattattccagttcaacaaaatatatcaaatggtaaaggtttattatcttgccagacattcattttttttt

SEQ ID NO: 53468 - DNA, 169 bp, Zea mays
  Clone ID: MRT4577_148764C.1
gcttatgtatcgcgttcattagagcaaaaacagcgtctaacggcgcggacttttaatactgaatacaggggccaaaaccggtcatggaaaggcagcttcagccggcgccatgaaaaaacagtcacacatttttttccgatgacacgcaaaaaaagctggcacaaatggc

SEQ ID NO: 53469 - DNA, 549 bp, Zea mays
  Clone ID: MRT4577_148765C.1
cctcgaggccggccgggatcgtcttgtcgtcaaccacatcatctgcttcgtttggtcgcttttgctctctcactcacggatctcgacttcttctacacactatcgtatcagagccgcaaacgaccatcccggatcccgttagttcgccaccgccgcacgcccccccgccgctcgcctcatcatggacgcctccgccaccgccacctacgaacacgacttaattcgtgaggatgttcatggccaagaccgagacctccgcacctacgaagctaagggacttctcacttgtcacctactcatcaccacagcgacttaatcaactcccactacactgatctggcccaggtctatgagaactaccagaccaaggctttgatatacctgcttttcccatgcgacccattagcacgggcatgacaactgagaccaacgacgagattgtccacgttgtctgcacactactacacggttgactaccccatcttctaccacgttcgatgttcatgctcagccatgctcaccgccatcctacaagcttcttgaaactct

SEQ ID NO: 53470 - DNA, 308 bp, Zea mays
  Clone ID: MRT4577_148766C.1
gttggcttcttctgcccctgcgaatcggtttcgtaggggaggggtacttcggagttagggttggtgggataacggatcaagatgacagggctaggatgtctgagtaccactgcttcaaaggctgactcgcctggtccactgacaagcactccctacacaacgccttcaagacctacagtgagggtctcgagttcaagatcatcctagatcggtagactcataggtactcaggtttaggcttaacaccttatacacggaggaggctatgcagaacgccatcgagggcatgaacggcaaggagctggacg

SEQ ID NO: 53471 - DNA, 240 bp, Zea mays
  Clone ID: MRT4577_148767C.1
cggcggtgacgacgcgctgctctctgacttctgtgccacactgctcggcgtttccggagccctgggtgcccagcaagtcttcgcctctgcggaagatcccctgcaggcggcagcccacgtgctggaagcaggcgagcacccgccggggcccctgggcacacgaggggctatgcacgaggtcgcccgcatcctgctgggcgagggcccgaccaaccagaaaggctacacgctggcagcact

SEQ ID NO: 53472 - DNA, 452 bp, Zea mays
  Clone ID: MRT4577_148768C.1
gcaaccacaactcctttttctgtgaactttctcaaagccatgactaaaagaaaatcaaggctttgcataaataatagggctacctttcgggggcactagtatgcagcccaggggcacgcacagcacgttcccggccgaaccgagttgaatcctgacaggtccacccagctgctgcccgggcgcagcgccaccgccgccccaccaccaccgttgccgcgcctcctccattgttgccacttgcaccgccgttgctgttgccgccaccgccccagaattgggggttcccaggggggctaaggaaccccctcggggagctgctcgccttcgccgcaggcgctggggtggcctccttcttacccggtgccagctgcgtgtttcgcccgcctgggccgggccccccgggggccccccgcttgtgtccgtctgggctgctgggggcctcccccgcgggc

SEQ ID NO: 53473 - DNA, 517 bp, Zea mays
  Clone ID: MRT4577_148769C.1
gtacaagctttttttttttttttttttttttttttgtttttttttatttttttttttttttttttttttttttttttttttttttttttttttttttttttttttttttttttttttttggacccattcttttttttttttggggggggggttctttccgggtattggtcccacctaccctgcccccccgggggggcccccccccattttttcccaaaactccgccccaaaaggccccacttgtttgcttgcccgggggttttcccccggccattgttttttttaggggggccccccccggggggggggtagggggtttaacctgcccggggggcctttcaaagggggaatttccccgccccggggggggatcctggggggcccccccccgggacccaacttgggggaaacatgggaaaaagtggttccccggggaaaatggtttcccctcaaaaattccaccaacaatcacgcccggaattaaaaggggaaaacccggggggccctatgggggggc

SEQ ID NO: 53474 - DNA, 718 bp, Zea mays
  Clone ID: MRT4577_14876C.1
attcccgggcacgcatactgttatacacaacacagagcatcagaaggagctacgatctgatcgacatggctgccgccaccatggctatcacctcccgcgcgctcgtcggcaagccggcggctggcacgagggacgtcttcggcgagggccgcatcaccatgcgcaagaccgccgccaagcccaagccggcggcgtccggcagcccctggtacggtgccgaccgcgtcctgtacctgggcccgctgtccggctcgcctccgagctacctgaccggcgagttccccggcgactacgggtgggacaccgcggggctgtcggcggacccggagaccttcgccaagaaccgcgagctggaggtgatccactgccgctgggccatgctcggcgcgctcgggtgcgtgttcccggagctgctcgccatgttctccatgttcggcttcttcgtgcaggctatcgtcaccggcaagggccccctcgagaacctcgccgaccacatcgccgaccccgtcaacaacaacgcctgggcttacgccaccaacttcgtccccggcaagtgagcgagggcatgatgcttgcatgcgtgtaccgtagacgtacgtattcctacgtactgcaggttgcaccagtatttgtgaagggagctttgggagccagagattgtaccgctagtgtatttgtatgcatgctgtggagctgaacaataaaatatgctgtaaat

SEQ ID NO: 53475 - DNA, 1188 bp, Zea mays
  Clone ID: MRT4577_148770C.1
ccggccgggaaaatggttggtttgtcttgagaggccattgggtatatgctatagcgggcgtagtactagggatggtcattgtcaacgagtccattacggttggtgctgagacgggcgagcgcctacggagtttgatcctgaaatacatcagggagaagagtttgataggtcacaagtatgactgggagcactggagggtgaataccagggctaagcaatcagtgcttttgtcagtgatgataattttgatgtctttcttttggattttgagcattgtgctgactgtagtaaagatgcatagtcttgctgatggtgctgtcctatggatgggctgctcggtagcacctccaggtgtttggttacgctggtacctggcaaggctcaatggccagggaattggcaaacagagatccttgaaatggctgcccactgggactctggtagccaatgttcttgctgcaggcataatggcagttcttgctgtaacatccaaagcggtagatacaaagcgatcaacaactattcttagtggaatacagctcggcttccttggttgcctaagcacagtgtctacttttgctgctgaagtgtatacaatgagaagaagcgggcagattgccagggcctttgtttatgccgcatccaccttcctgctttcttttctgctaggaactctagtgtattctgtgccagtttgggaaaagcattataaatgacctattgcaacttccagattcaacattttaccagatggcttaaatgtgcaatgggaaagagagcatcaacttcctgaacaaagtacaagatacagagccaagacctcaaaggttcacagatgcaaaagagagcatcaacacaaacgtttgcagaatggacccacagaaccatctatatacctggctgggaaaaacagagtaaactttgcttagtagaatatgtagtggcgtggaataatttttgtcttggagaatggagtacatgtatgtatctgtgaactagatgtatcattaatgcatgagatatgcatagatgaatttaattagtgtgggattagctccactttattctcatgctgtctcatgtaaatgcaggacatctagaaatgtttttcttgttactaagacatattggcttaattagtttttgaataaaacatttccttttgacaaaaaaaaaaaaaaagcggcc

SEQ ID NO: 53476 - DNA, 1219 bp, Zea mays
  Clone ID: MRT4577_148771C.1
cggccagcagcgccgcccccgccgaacacaagcaccaccagcagtcgttggtgtcctggcagccgccgaccgtctccgccaccaccgactacatcgggttcgcgcagccccggaagggcgggggacacgcggtggcgcacgcttttgcctcccccgctccccacctcggcaacattgcgtccatcgccatggccccggcgcagcactaccaccacttggccagcggtgccgtcactgtcgcctctggcggcggcgagccgcacgccgatatgacgcacttctcgttcttgcaggaccacttcatgcccgtccacgcgatgccggcgtcggctcccgccggagaatacaacctcaacttctccatgtcctcgggtcttttgggtgttaacagtagggggacccttcagtccaattcgcaaccgcacatctctggccaccaccaccaccaccaacagctccagaggctgtctactccactggacgctcccaacataccattcatgttcagctcggccgcggctgccgctgcggcggccaccacgcccaccacggccgagggccagttcgccgcgttccagctctggaacggtttccagcacgcagacatgaaggagaagggcaagaactgaccgacacctgcccatcgcggtgcagtgctatctggatggatgtgaaggcatcaaataattgcaacctgtccctgcaagcaccattcattgctcgaagctgccataagtgcgttggggacgatgtttccccgaattcttttggaagcagattcatccttcagacacttgtgctctggtcatcactgaagaacctcatcgtccttactctgacgaccttctggacttcttttttccgcctgctgttgtactcgtttcctggaggtgagattctcggagcgtgatttgccagtgtgccctgtcagaaagccattgtaatcattcccattatgaactttaccaacgggtggagattcgattcggccccttgatcggcccgctctttcgagtttcggggatcagttatatccctggcatttttatggttctcggttgtgtgttgtacgagaaagtgagaggactcctatgaatggattgaactcatatgtgggcaactttgtgcccccctgttgtgtgctgaaatactggcataatgggagtctcagatgtaaatttgctttcttgttttgcagcaattatttcgtattgctctc

SEQ ID NO: 53477 - DNA, 1508 bp, Zea mays
  Clone ID: MRT4577_148773C.1
cgaccgactctcggcaacggatatctcggctctcgcatcgatgaagaacgtagcaaaatgcgatacctggtgtgaattgcagaatcccgcgaaccatcgagtttttgaacgcaagttgcgcccgaagccttctggcggagggcacgtctgcctgggcgtcacgcctagggtttcgcacccaacacccggagtgagcggcggcgagggatcggatcgtcggcggcgatggaggtcgaggtgcagagggcagcggtgagcagttggaacgagcttgactatgaggcggaagcgcgtttggtggcggaggcgagggcgtcgtgggataggaaggcaaggggggaggaggaggatgaagaagaccatgatcctgagatgaccttggactactacgcctaccaggctaaaaagtttcgcaacacctggaacatcctctatttcggctacttcggtcgcttcgaggacaccacaaggacccctcctatgcgctttacagagaagccgcctgactccccggcgtacccgcgcactacactgcaggtcttttcgatcaaagttgcagggatagaggggggtttacagtggccactccatgtgtttgggaaggttgccctacgcgacgcagttgatcacaatcgcaatatggtcttcgatcgcactagagacaactgccaaatccttacaaaagaggttccaaatttgaaactgacaggtcctagccgtgctgttctgctggtggatcctgtgactattgaggctgacctgaaagttaaaggccgtactgaatctgaggataaacacttgagctttctagcagtgccattcttgatctcgatcccgctcgagtcatgcctgcgtacaagagatttcaccagcaagcttagcacgctgaggtttggtctcgcaattgttgttctctcagtggaggctacaattagtgtgcgagttcgtggtgggtcatggcctgatggtctccgtgcccagtttgctgcccacacggtgagtataggtcgtgaggaagttgtcttgcttgattctggggacgataaactgcctgtttctgatgatggcactatcacacttggtcgtcgagttgcatctgttgaagtgagtggggagctgaacgtttctgtcaaggcatggcaaggtggtgaagtctttacgcacagagagaggggtttcaaacctaaagaggcaggttggagttatggcactcttgacgttggcttctgccaaatggatgtatctgtggcctggtcgcttctttcgtcgtacggtgtgtagtgtgcgggcgtgaaaaggaagctttgtaagagtcggtgttagccgtggttgttgcttcgattctctagcatgtaatgataagttcacattgggatatgcttgctgttttgctgtaatgataagttcacattgggataaaaaaaaaaaaaagaattttatttatttttcttgatcctctagcatgtaatagagtatcctccaagtagagtttttttttccttgaaaaa

SEQ ID NO: 53478 - DNA, 2008 bp, Zea mays
  Clone ID: MRT4577_148774C.1
cgggcgacacgactctcggcaacggatatctcggctctcgcatcgatgaagaacgtagcaaaatgcgatacctggtgtgaattgcagaatcccgcgaaccatcgagtttttgaacgcaagttgcgcccgaagccttctggcggagggcacgtctgcctgggcgtcacgccttggatcctcgacaagcaatggccatggaggaggagcagacaccacccgagctgcgctacctctcgggcctgggcaacaccttcacgtcggaggcggtgccggggtcgctccccgtggggcagaacaacccgctagtgtgcccgctgggactctacgccgagcagctctccggcacctccttcaccaccccgcgcgcccggaacctgcgcacgtggctgtaccggatcaagccgtcggtgacccacgaacccttctatccgcggaaccccaccaacgagcgcctcgtcggcgagttcgaccgcaccaccaccgtcgccacgcccacgcagctgcgctggaggcccgccgacgtgcccctccacccgggcctcgacttcatcgacggactctacaccgtctgcggcgccggcagctcatgcctccgacacggatacgccatccacatgtatgctgctaacaagcccatggatggatgctccttgtgcaatgcggacggtgacttcctcattgttccccagcaaggaaggttatttatcacaaccgagtgcggaaggctgctggtttcacccggcgagatcgtcgtgatccctcaaggtctccgatttgctgtcgacttgccggatggcccctcgcgtggctatgtctctgagatcttcggcgcccattttcagctccctgatcttggcccaattggtgccaatggcttggcttcgccgagggatttcctttccccgacagcatggtttgagcaggagcaccaccctggatacacaatagtgcacaagtatggtggcgagctgttcagcgccacgcaggatttctctccattcaacgtggtcgcgtggcatgggaattatgtcccttacaagtatgatctgagtaagttctgtccattcaacaccgtcctcttggatcatggcgacccgtcagtgaacacagttctaactgcgccaactgataagcctggcgtcgcgttgcttgattttgtaatattcccacccagatggctggttgctgagaatacattccgcccaccctactaccaccgcaactgcatgagcgaattcatgggcctcatctatgggatgtacgaggctaaggccgatggttttcttcctggtggcgccagccttcacagctgcatgacaccgcatgggccagacaccaagacgtacgaggcaacgatcagccgtgctgctgccaacgagccatccaggctcagtggtacgttggcgttcatgtttgagtcttggcttatccctcgcgtgtgcccatgggctctggattccccgtgtcgggacctcgactactaccagtgctggatcggattgaagtcacacttttcacctcctgctgctgctgttgatgatgagaacgagtagctgcttacagcagcagtcttggaacggacaggcagcgaactgaaactggggtggatatgctgtacgtcgtgtcctgcttgctgtcggtttctgaagcttttagctggcagggacaggcggctgttggctttgctgattgcccaaccctctcctgtaatattaatcctaccagagaaacttaaacttgactcaaccgatatgctattaaataaataaagcaagcaagttaggatacgagttaaaaaaaaaaaaaaaaaagcagccacccgtagccagtgctgtcacgtatcagtgagtacgtgattgcgacaaaaacacacacacatgttaatatgtatttttgttagtcacaataatcgtgtgttgttattaatcaccagaactgtagaggacctagatggtttcatacgcatcacactcaacttgttagtcacaatatttgacacaatgacgac

SEQ ID NO: 53479 - DNA, 495 bp, Zea mays
  Clone ID: MRT4577_148775C.1
cccacgcgtccggctgcagtgcgtgcgctggtgggagtacaggctggagccgctcatcaggcgcctcaccagggccacgcgccccgacatgggctgcagtgtcgggtacagggacaagcagggatatgttggctaccggggccgtgtgaagagtaggggtgggaacagggctgtggcctatggtatggcctatggcaagcccatgcaccagggtatgacccagatgaagttccagaggaacaatagggatggagctgaagagagagctggacgtaagctgggtggactgagggactgtaactactactgtgggaatgaggatagctcctacaagatctttgagatcattcttgaggacgtcgtccacaaagccatgaaaaccaaccggatgatcaactgtgtgtgcaaccctgggcagaagcaccgcgagctctgaggcctcacctaagaccgcgggaatgaccgtggggtgcatggcaagggccacacccagca

SEQ ID NO: 53480 - DNA, 282 bp, Zea mays
  unsure (1)..(282): unsure at all n locations
  Clone ID: MRT4577_148776C.1
gcgggtggcanatgcaccggacctgctagtactaatgcttcgtgaaccgtcgtagcaacatccgccatcggaccatctgctacagaaacatcatgtactggcgcccgttgatgtggcgccgtgcaccatgccactactgtactcaaccgccctggtctcagacttatccccaaccaaacccatgcccgatccaacagactcatacaacaacgtaacagctatcattcatccataccctaatgttattaaccgaaattcagcatcattacgctcagactctac

SEQ ID NO: 53481 - DNA, 1414 bp, Zea mays
  unsure (1)..(1414): unsure at all n locations
  Clone ID: MRT4577_148777C.1
tcgaggccggccgggccgggcacgactctcggcaacggatatctcggctctcgcatcgatgaagaacgtagcaaaatgcgatacctggtgtgaattgcagaatcccgcgaaccatcgagtttttgaacgcaagttgcgcccgaagccttctggcggagggcacgtctgcctgggcgtcacgcaacgaagtattcaaaccgaaaacaatggagccggtgcggaagagcgtgtgcgtgaccggcgctggcggcttcgtcgcgtcggagctggtgaagctcctcctctcccggggccaatacgcggtccgcggcaccgtgcgcgaccctggtgctagcaagaatgcccatctcaaggtgctggaaggagctgaggaaaggttgcagcttctcaaggctgatctgatggactacaacagcattgcatcagcagttgccggctgtgagggtgtcttccatgtagccagtcctgtcctttcccatcgaccctccaaccctgaggtggaggtcatagctcccgctgtaataggtacaaccaatgtgttaaaggcttgctatgaggcaaaagttaggcgagttgtggtggtgtcttcatgtggagctgtgtatgctaatcctatttatccgaagggtaaggtgtttgatgaagactgctggtcagatgaggattactgcaggaagaaggaggattggtatttagtttccaaaacactgtcggaacgagaagctcttgcttttgcagcaaaaacagggctggacgttgtaactgtttgtccgtcattagtatttggacccttgatgcagcctacagtaaatttgagcagcgaaatgatccttaaatatttcacaggagatcgcgagactgttgaaaacatactcagaaatatggtggatgttcgtgatgttgctgatgctcttcttctggcttacgaaaagccagaagcgtctggacgatacatctgcagttcacatgcaataaaagttgctgatatgataaacatactgaagaccttgtatccatcttacccttatcccaaaaatttcgtggaagatgatgacaactctgtatacagctctgagaaactgcagaagctggggtggagcttcaagcctatagaggaatccctccgtgacactgttgaatcctacaaagcatttggcatcctgaattgaacatccagctaggactgttccatctgctgtttttgcctccgaactctttctgaataatgtatgtaggcagtgaaacagcattgccagcaggttaatcctggcatcatgctggagcagcactgtagttctatctttttcttttttttttccatccccaatactatctagtggttcaggaccaaataagtaggcccagtgctgactggtttatggaaaaaaaaaaaaaaaaaaaataanaanagtag

SEQ ID NO: 53482 - DNA, 610 bp, Zea mays
  unsure (1)..(610): unsure at all n locations
  Clone ID: MRT4577_148778C.1
gagctcctgcagagatctggggggggggggggggggggggagtcccacccataaaaccccagtactcgggttctttaaagggcgctaggccactctgaccttccccagtcctacattaggcatgcacacgtcgaaccgccgcaccgtagtccccccctcaaccagcagcgtgcgtagcgtaccgtacccaattaaattcacaatttagtacgtatagctccgagctttagctatagctttttgctgcatgatccttcctatattatgagatgagacacgacttgttaagaataacgtcctaccgaattattgggtgttataatagtaataattcccctctcctgagttaacacggtccaaatactattataagttacgaggaacatgtgaacatagtgatggtgaacaactactaaaatattatttaactcttccttcatcatcaaattagtattcttacaagaagaaaaaacgtctaaaacttaaggtacgggtgaattaatntaaacttgtgctttaaaaatgatttctgaatctaaatcttgatcctgatccatcatcaaagtataatnttaaggatctactattattaaaatttataatctatatc

SEQ ID NO: 53483 - DNA, 1646 bp, Zea mays
  Clone ID: MRT4577_148779C.1
ccggccgggccggggaccgactctcggcaacggatatctcggctctcgcatcgatgaagaacgtagcaaaatgcgatacctggtgtgaattgcagaatcccgcgaaccatcgagtttttgaacgcaagttgcgcccgaagccttctggcggagggcacgtctgcctgggcgtcacgcgtcctctcttcttccaccaccacctcctactccgctgcaaccccaaatctctccttcctcgcatacgcgcgcagcagaggagctgagaccaacgaagaagaagaacaaccgagcaagcacaagcttagctagcgtggaggtgcccaaggcgacgacggccgccgcgccaggctagccaaccagctgctcatcgctcctagctgcggagccgatggctggagccgacgtcgacgtcgggacggagctccgcctcggcctgccaggaggaggcgccgatgcggccaaggctgccaagaggggcttcgaggacaccatcgacctcaagctgaagctgcccaccgccggcatggaggaagctgccgctgccgccgccgccaagccggagccggccgccgagaaggccaagaggcccgccgaggcgccggccgctgatgccgagaagccacccgcacccaaaaacgctgagccggtcgcaaacaagaatataaacatgcatgatctggctaccatagtaaagaaatatcagtttgaagctctgacgaggataattgttaccagggcacaagctgtgggttggccaccagtccggtcataccgcaggaacgtcatgaccgtccagtctgtgaagagcaagaaggaagaggagcctgagaagcagcagtccgctgccaacgccggcggcaacggctccgccttcgtgaaggtcagcatggacggcgcgccctacctgcgcaaggtggacctgaagatgtacaacagctacacggagctctccgttgctctgaagaagatgttcagcaccttcaccacatccgggaacaacatgaatgagggaaaactagttgatccggtcagcggtgctgatgtggtcactacttacgaagacaaggatggcgactggatgctcgttggcgacgtcccgtgggagatgtttgtcgagtcatgcaggcgtctgaggatcatgaagagctctgaagccataggtcttggttagtgtctccagataaaattatcttccatagttccattataagatttacatgtcaactctaaccgcctatgttttcttcatttaaaaaaaaatacagcaccaagaacgaaggacaagtgcaagaacaggagctgaagaagatacagcgttaaagacgctgcccgttgtgtcaaaagaatggtgcccttgcagtgtgctgcggtttttctagaaatataatgcgttttaattactagttggagggagacctgtcttgttcaatttgttcatggaccagaagcaataatctatctgtgtgtagctggattggtgttatgcgatgtcccctaccgtgtgtcccagaatctacttggtgattttatcccagtgttgttaatcaagcttgtgtgattgttaagtaaagggcatcaatgagactattattattatggtaccttgtaagttaacctgtttgttaattgtcattataatatttggc

SEQ ID NO: 53484 - DNA, 1879 bp, Zea mays
  Clone ID: MRT4577_14877C.1
ccgtccgggaaaaaccaaacacccgtagcctccgccgagagtcgcagccgccgacacccagtcgcccaccgaggcaccgacccgaccccaaccttggagctgctgtgccccggcggtccgtctctggccagagctccgccaccgcccgccgatcagagctccgcctccgagacgacgcgcctccccccagtggctcaggccgcctgcccgcctggcaggacgccgcgccgagctctttcccggcagctgctcgcccgcgccgatcttttcttcggcaaccgcgcgcccgcgtcgagctcctccccgtccccggcagccgcgcgccagcgccgagctcctccccgcggatccgcctctgctcagtctgagctccggccagccgcgagctccgtcgaggcgtcgacgccgaggcccagctccgcccgtgagtgcctgtgccggattcagcaaacagaaatttgctctgctggttagatagatggaggtgccaatgaacaccacgcaatctggtcctcacttccctgtgcagcatcggtccctctcgttagacatcaagggaaataaaacagatattgttatcaataaatacgaagatacctttctggtgattgtgacccaaatcggctgcatgggaaccatactagctgccaagaaagatgaaagtgttttctccgacccaacctacaacgtgtctgttctttttgggaagagagatgagccactcctactagcttgcgcacgtcaacttattgagcacataagtggcagtggctcagcccggtcattggtgatttctctgggtctgaaagatcattctcagggaacgctgaaggatattactgtagctgtgatcgagaatcgcctttggtgatgattgaatagctgagctgggcatgggaacgctgaaagatactgtttagcattgcgcaataggagccatcgtttataccatgcactaaattctggtacttttgtagttagaccttctatctactgggattaacaaaaggtgggtttaagctgctgtcaaaattggagtgtcaactttaacgctaaacaaaaggcaatgtacactggtaaagcacttctgagtcgaatcatgattttcgaggctaaaaaaaaaaaaaaaaaaagggcggccctcgcgatctagaactagtacacgcacgcatacacagcacagagtgaggtaagcatccgaaaaaagctgtgatctgatcgacatggccgccgccaccatggctctcacctcgcgacgcgctcgtcggcaagccggcgaccagcaccaggggcgtcttcggcgaggggcgcatcaccatgcgcgagactgctggcaagcccaagccagcggcgtccggcagcccctggtacggggccgaccgcgtcctgtacctgggcccgctgtccggccagcccccaagctacctgaccggcgggtcccgctgcgactactgctgggacaccgcggggctgtccgccgacccggagactttcgccaaggtcaaggagatcaagaacggccgcctcgccatgttctccatgttcggcttcttcgtgcaggccatcgtcaccggcaagggtcccgttgagaacctcgccgaccacctcgctgaccctgtcaacaacaacgcctgggcctacgctaccaacttcgtccccggcaagtgagcgagggcatatacatacttgtatgcgtgtaccgtagacatacgtattcgtatatgtactgcaggagatgtaccagtatttgtgaagcagggagcatgggctcagagattgtaccagtagtgtacgtatttgcatgcatgctttggtccttgtggacattatcaatgaaatatgctgtaaaatacacaaaaaaaaaaaaaaaggcccctat

SEQ ID NO: 53485 - DNA, 1812 bp, Zea mays
  Clone ID: MRT4577_148780C.1
ctccgaggtctggccgggaaaaaaaaagaccacgactctcggcaacggatatctcggctctcgcatcgatgaagaacgtagcaaaatgcgatacctggtgtgaattgcagaatcccgcgaaccatcgagtttttgaacgcaagttgcgcccgaagccttctggcggagggcacgtctgcctgggcgtcacgcgagaacggctggaagaaccgagagcgctccggaaatgtcggcgggtgagctgcggttggagctggacgagctgcggcggctggagagcctcgccaagcacccccgcgtccagatcctcctcgccaacgaaatccgcaacgttgaagcgaagttggcgaaggcaaccgaaccatcgcctgagccactggcggcggcttctgcgccagcgcccgcgcccgctgcgcgtcctgttttaagctacgtcactcttgggtcgttcagctgggagcaggacaacgagaagattaggatatatgtttcccttgagggagttgagcaagagaaggtggagactactttcaagccaacatcagtggatataaagtttcatgatgtcaaaggcaagaattaccggtgtgctataccaaagctgaacaaggaaattgttcctgagaaatgtaaggttgtggtgaaaccaaccagggttgttgttactcttttcaagggttctaaaggcaactggttagacttgcacttcaaggaagacaagttcaagccaaacatggacaaggaaaaagatccgatgtcaggaattatggacttaatgaagaacatgtacgaggagggcgacgaggatatgaagcgcacaatagccaaagcttggtctgatgccaggtctgggaagacgactgattcgatgagcggattacgttgagctggtataatcagttgatgggcttaagttttctgcgctagcccctgcagccgaagtgtttctgatggttcaaatagcgttgcagtgccttgttggtgttagtccttgtttatcttacatttgtgagtgaagttggacgtgccaaacatatttaaatatatcctcttgaacgggggaaagatcatatcaagtccaagaggttttgtgcttttgtggaattaccacggcgtttctgtttgctacgaaacgatggtagtaacagcttgagccttgccagaaaaaaaaaaaaaaaaaaaaaaacgaacatgttccaggagggcgaccaggatatgaagcgcacaatagccaaagcttggtctgatgccaggtctgggaagacgactgattcgatgagcggattacgttgagctggtataatcagttgatgggcttcagttttctgcgctagcccctgcagccgaagtgtttctgatggttcaaatagcgttgcagtgccttgttggtgttagtccttgtttatcttacatttgtgagtgaagttggacgcgccaaacatatttaaatatatcctcttgaacgggggaaatatcatatcaaaaaaaaaaaaaaaaaaaaaaaaaaaaaaaaaaaaaaaaaaaaaaaaaaaaaaaaaaaaaaaaaaaaaaaaaaaaaaaaaaaaaaaaaaaaaaaaaaaaaaaaaaaaaaaaaaaaaaaaaaaaaaaaaagggggggcccgtttttaaaaaaaccaaattttacttcccgggtgtttgcaaaaaaaaaagttttttttttgggggcccccaaaaataaaattaattgggccgggtttttaaaaacttctgaaatgggaaaaaacctgtgggttacccaaattaaatccctttgaaaaaaatccccttttcccaaggggggaaaaaacaaaa

SEQ ID NO: 53486 - DNA, 399 bp, Zea mays
  Clone ID: MRT4577_148781C.1
acgtgtaaccgtgctttagtctagcaagtttttgctattttactgtatatatactcgctggatcctgatgcatgggggtaggtgtcctgagtcaaaaaccattgtgaaaatagtaccaacacacctgccacatcaagaggtaaactatacaaaaaatcacatttcataatctcttgctgacctgctattttcatccacacttgttaccgtctggtttcgctctaaaagcgaagcttatgtccatctgcatgtattgatgtgggttttttatttaatatattatgagtgctaccagcatgatctgttccattctgatgattggatggatatcgcataaccttagagtgctgaatttactaggtggtcgattcagatagaaatcatcgtacgacgcatact

SEQ ID NO: 53487 - DNA, 3107 bp, Zea mays
  Clone ID: MRT4577_148782C.1
ccctccagacgccgtccccgccgcggtgccctagagctccgtcccgccgtgtcgccgcttagcgcacgcaccaccggagcaacagcaggcgagggccggccggcacctacttcaacggagcgcggacggaaggtttctgcatcttccatggcgctcgtggtgatgtgcgggcagccgtgcagcggcaagtcagaggctgcagcttgtctagctgccgctcttcgctcctccgtgcctgacgtcactgtccgcgtcattgacgagtcatcgctccatcttggacggaatgaaagctacaaagatatggttgtggagaaaaacttaagaggagttttgagatcagaagttgataggtctgtgtcacgggatggcataatcatcgtggattctttgaacaatattaaggggtaccgatatgagctgtggtgtcttgcgcgtgcttcgggaataagatattgtgtgttcttttgtgatacagaagtggaccattgtagggattggaacgtcaagcgtcaggagaaaggagaaccctcatatgataacaatatatttgaagatctggcaaggagatttgagaggccggatagtcgtagccgctgggattcccctctttttgaattgtttccatctagagaggaaattgtggaatcttcccctgttattgctgaggctgtatcatatttgactaagaaagtggattcgaaaacaagctatgtgaaagttctccagcttacactagctactcaatctgtacggactactgagggcaattcgctctacgagtccagcctacaacacacactcagacggtgcgaacaacagaggctaattccctctatgagatggacaaggcaacacaggaggtggtcaatgcaattgttgaagcacagtcatgcggtcttgggcttgctgtgaataagatctccattggacccaacttgccaactatcaagcttgagagatctgctggcctacctgagctcagaagcctgcggagaactttcatcaagctggcagggcagtacagtctgagtgggccaccaccaccgacagatgctgacagcgcaaagaggatgtttgtcgactacttagaccgtgaacttggtgcatgataattttcattcgcctgcgttgcattaacactatgcagcatgtggttaacttgggggatagataattgaagacaacttgattgtacttgttaaaaaaaaaaaaaaaaaacacgactctcggcaacggatatctcggctctcgcatcgatgaagaacgtagcaaaatgcgatacctggtgtgaattgcagaatcccgcgaaccatcgagtttttgaacgcaagttgcgcccgaagccttctggcggagggcacgtctgcctgggcgtcacgccattgcccccgtgctgcctgcgcttttgccagcgcgcgccccaccaccaccggaaaagaaattccccaattctactccacccggcgcgctctccccacgcgcatccggatccgtccgctctgatcgagggcgaggagggcatggacgagttcgagctggaggacaacctcgagttcatcctccagagcatccaggagctgatggaggacccgggggacaacaacgccttcggagacgccaaccagaacgagctcttcgccagcatcgttaactacgaccaggagaacatgctgcccgacgtgtctgcagcggacgttgctgcagggaaggacattcaggggatcccgtgcgagaagatgctcttcgggagggataagtaccgggagatgaagatgaagaactacgcacgagcaggtatataaccttttatattttctggcgttaaatatttctgtgcaggttcatattcttttgggtttggtctcaaagtattcatttttgttgttgcagaggggccatggttcacagtcagtggcaatggttcaggtcacaacaatggccgtggatagtaatttattggtagttggtggctttcaaggggagattatatgcaagcgtttggatgatgagggggttgtttacagcacaagggttacagatgatgaaaatgcaatcactaactctttagagatgtatcaggatccgagcggatctagaaggttggtggctgctaacaatgactgctccatcaggatttttgacaccgagtactttgacctcctcaagcactatgtcttcccttggtccgtgaatagtgtttctgtgagcccgaatgggaaactctttgctgtcctgggagatcatgaggatggttgtgtggtggatcccaagtgtggcaaggcaattggctctctcaggggtcacttggattactcatttgcatctgcatggcatcctgatggcaatatcgtggcaactgggagtcaagacactacatgcaggctatgggacatcaggaacctatcccaatcagtagctgtgcttggtggaaggatgggctcaattcggtgtgtgaagttctcttcagacgggcgcttccttgcaacagcagagcccgtagattttgtccacatgtacgatgcttatgcggactacagcagatctcacgagattgacttgtttggcgagattggaggtttagcattcagccctgacaccgaggccttctatgtgggccttgcggaccagacgtacggaggcatgatcgagttcagcaagaggcaccaacatcattacttgaactccttgtggtgataaccacttgagcggaaatttggtcgcacagctgttggaccccattgttgcattgtgtgctccagaggagtgcatggtcctacagaggaggatctcatgagtgcatgcagaagtgtataaaattctggggggtttctttccctgttgctagtaatctgggttttgtcgctcgactcgtggaactgaaggcggtagcatatgtatagcctttctgtttctcgacacctaacaatgtacatagtttgtgtcaggatattatctccccattcaaaaaaaaaaaaaaaaaaccgtctgcctgacatgtagtggtcggccccttgtacgtcgctgtatcagcaccagtaccagcagttgtatcagcacattgttggtccttacgctgcagctgcagcaccagcaccagcagtggt

SEQ ID NO: 53488 - DNA, 379 bp, Zea mays
  Clone ID: MRT4577_148783C.1
aaccatttcaacaacccaatgtggcaatgtgaatatgagtgaaattctctgaaaatggcaggctcccaggttaaattacctccccaccaatcaaaattcgagcatatgaggatcaacatgactactttctagctcaatttcagaaggctccaatgcacaaatccaagctagataacttgacatagtcaatcattcctaacgaagccaaaggcaatgatttcacagggataaaaagccttgggaccatagctagtggaagcttcatgatgagccagtttcgaagtggtgcaatggtatctcagtacgaatttaatacactataaccccgagtacatttttgaaactgatcactactcttccatttgtgattaagtataga

SEQ ID NO: 53489 - DNA, 804 bp, Zea mays
  unsure (1)..(804): unsure at all n locations
  Clone ID: MRT4577_148784C.1
ccggccgggagtcgtcggaggcgactcccaggcgatttccgcgcctccaaaccagcgcagcgccaatccaccgccgctccaatccagcgcccttccattccaccttacatccttcaatctcccagcattggagcccgattcaagaagttccagatctattcagtatttaatcatgaagtctgttgatcgccggcccagtaatccaaaaagactaaccattgaatccagtcaggaggttttttaaattgacatttccagacgtacaagatccagcaactcagctcaccaagatgatattccccaaaatcaggagcagaatgagccacagccagccccaatccatcgttttcgcagaaaggcgttagcttgtcatttaaaaataaaacctcctgctccatccacagtgtccgacgacgatttcatggatgctccatcgttgaagcgccaattcagatctgcctcaccttctccttcagaacaaatcagtgcaaagaagttaaaagtaccttctcctcaagttccttgcgtgaaaagaagtccaaagtctaatatcattacaaaaaaaactctcctaaacagaagactcctagaaaatcacaggtggttgatggataaattggatccacatgacatgaccatacgcccagnggctggcaagaaactgaagataacaaaagatacggttcatctgattntgggtttgccatgtgctggaggaggcagggagtttactgattggtatggtgaagtggatgctgctgcaaactgagacgtgatctcaatgttggtaaagaagatttgatg

SEQ ID NO: 53490 - DNA, 527 bp, Zea mays
  Clone ID: MRT4577_148785C.1
gtgtttttttttttttttttttttttttttttttttttttttttttttttttttttttttttttttttttttttttttttttttttttttttttttttttggaacccctggaaaaccaaaacagggtcactcccttttgcttttggggggggggggggggggggcttaccccggggggaacccccatttccaattttcctccctaaaccatagccccggggccaaaaaaaaattccaaaaaataatagtcgccttaaatcaggcttggtcaaaaaaaaccaaacaaattccttttttgtgtggccccaaaaaaaaaggtgggccccgcccacattgggggggggggggggggtttataaaaaaagggcctttttggctttctgaaaaaactttgttttttggggggggtcctttttttttaattgcgtaaaaagacccttcgagaatgtttgccaattttaactggggtccgccggatcttggggggaatgaaacactttttgggccccaagcttttgggtatgccc

SEQ ID NO: 53491 - DNA, 239 bp, Zea mays
  unsure (1)..(239): unsure at all n locations
  Clone ID: MRT4577_148786C.1
gggggggggtactttggggaaaggttggttttttttatttttacctttaaactgttttttttttacacttgttatcaatgttaatcaaaggtatctaggtctagaaggaggggggcggcaagagactnnaccggggtgaaaccaaaaagcatgcggaaaaaccgacactgatgggggacacaggccagactgcctaagggggtgctcgagggggcacaagggccgtctaatgaagcccc

SEQ ID NO: 53492 - DNA, 1343 bp, Zea mays
  Clone ID: MRT4577_148787C.1
ccggaattcccgggtcgacccacccgtccgcttcccctttccgttccccgaagcgagagcgaagccagcgcccatcttcttcttcctcctccttgttggatcgcagctccttcgtcgtagcgtccgacacaccaggtttcctttcgcgagcaacaatctttggcaatggcgtccacgtcgagctcgacgccagcgccggttgaggtggacgagaggggccggaagcggaagcgtgcggccggggcggaccccgcggcgccggcgcagccgtccaagtggcggacgcggcgcgagcacgagatctactcgtccaagctcctggaggcgatccgcctcgtgcgcgcggggcccccctccgccgccgccgccggcacggcggcggccccgccgcgcagcagggccgtgcgcgaggcggccgaccgcgcgctcgccgtcgcggcgcgcgggcgcacgcactggagccgcgccatcctcgcgtcccgccgccgccgcctccaggccgcgcaccgcgcgcgcctccgcgcccccgcgtccccgcccgcgcgacacggtgccccctcggcctcggcggcgaagggcgccgccacgccgcctctggagaggaaggccaaggtgctgggccggctggtgcccggctgccggaagctgtcgttcccgacactgctcgccgagaccacggactacatcgcggcgctccagatgcaggtccgcgccatgacggccctcgccgaggcgctgtccgccgtctccgccacctcctcctccggcgccggctcctcctcgccgccgtgatcgaagccgaagcctcaacattcgtgcattcgttgtaaatttttccctctcttttctccccccacgaatttttcctcgggattagttaacctctagctttctctctctctcccctctagttttccttgtcgtcttgtttctcccagttcggtgagtggttagtgtgacgatgaagaagaagatgatgatggcgtcccagtgattaacccgtgcggtaatgtgatagaagaagtcgtaggctgtctccgctcctcccttcctccctagctcaggattcttttgtagcttgggtttattctcatctgcttcgatcgctcttcgatgaatgcatcttgaaatgttcattcagatcacaccatcatgtatgatgtatctttcatgtgcttcttgctgaacgtcctgtagtgtacctctggctgctgctgctgctgctgcaagcagattaaccgttgttcatggcttgcttgtatcatctcataaccataattactgatctgtacttcagagaaacctgaaatgatgttcgttttttaaaaaaaaaaaaaaaaaaa

SEQ ID NO: 53493 - DNA, 817 bp, Zea mays
  Clone ID: MRT4577_148788C.1
aattcggcacgaggcgccgacgcagccgtccgagtggcggacgcggcgcgagcacgagatctactcgtccaggctcctggaggcgatccgcctcgtgcgcgcggggccctccgccgccgccgccgccgaggcggccccgacgcgcagcagggccgtgcgcgaggcggccgaccgcgcgctcgcggtcgcggcgcgcgggcgcacgcactggagccgcgccatcctcgcgtcccgccgctgccgccgcctccaggccgcgcaccgcgcgcgccttcgcgcccccgcgtccccgcctccgcgccacggcgcctccgcggcgaagggcaccgccgcgctgccgccggtggcgaggaaggccatggtgctgggccggctggtgcccggctgccggaagctgtcgttcccgacgctcctcgccgagaccacggactacatcgcggcgctccagatgcaggtccgtgccatgacggccctcgccgaggcgctgtccgccgtctcctcctcatcctccggcgccggctcttccccttcctcctcgccggcgtgaccgaagcctcaacattcgtggattcgttgtaaatttttttttcccgtctcttttctccctcgccccgaatttttcctcgggattagttaacctctagctttctctctttctagtttcctttgtcgtcttgtttctcccagttcggtgagcggttagtgttatgatgaagacgacgacggcgtcccagcgattaacccgtgctgtaatatgtatagaagaagccgtagcccacagtggttttctgtcaaaaaaaaaaaaaaaaaaactcga

SEQ ID NO: 53494 - DNA, 2336 bp, Zea mays
  Clone ID: MRT4577_148789C.1
gtagaatccactgattcatcgcgacgggagaaatatgtcgcttcctaaaccttgaatcgtgcataccctttcatcttcctccaccgcaaaccctacgatatttagattcccgtgacggttagattatcaggaatccaaattcatagaaaagctctttagaaaaaaaaactattacaaacatgaccatagaggatagggagccctttatgagcacttcaacctatagaaacacccgatatcgaatacttgtaatcccttactcacggccaacctaagcataccacacacaagcaatacaatactccgtatacattaaacgtaggtaccccataccacttgattattaatttgttgcagacagtgatgatgataaggctagacagccggtggacacagatacatagcatgcatgcattgaaacaaaagtaggaagcttatatatgcgtcgtcgtctatccctcgatggcaacgccaggcggtgccaccctaatcgtccttggcttcttgccgcttcctgctgcaatggccgccgggacatgctcgggatcatgttggtgttcgtaggcggcgagatggacgcccagtgccgcccttcccgaggggtccagatttcctgaccattgtgcgtcccactcgatggccttggctgtgctgcacgccacacttggcccaccaggtaccgtcaggatagcagatttctgtgggaagaacctctcgaagaccatcctgtagtagtaggcctccttggtggtcggagtgttgtgtgggaagatgaactttgcatttgacagcatcttgtcagtcacatttgatgttgcatgagccttcaggccatcgatccagctgtacccaacgccgtcactgaactgctccttctgtctgtagaggatatgcttgggcaggaatggctgctcctcgtcgtcgaatgccttcctcagcacccacttctcaatccttccaagatcaggctggaccatcttccactcaggatcgatgctcatggccgcattgatgaactccttgtccaggaacgggacgcgagcctccaggccccaagctgatgtcgccttgttggctctcaggcagtcgtactgatgcagagccttaaccttcctacacgtctctcggtgcaactcctccttgttgggcgccttgtggaagtagaggtagcctccgaagagctcgtcggagccctcgccggagatgaccatcttgaccccgagcgacttgatcttgcgcgacatgaggaacatgggcgtgctcgccctgatcgtggtgacgtcgtacgtctccgtgtggtagatcacgtcctcgatggcgtcgatgccgtcctgaacagtgaagtggaactcatggtgcagggtgcccaggtactccgccacctccctggccgccttgaggtcaggggacccctccaggcccacgcagaaggagtggagcttggtgccccagcgcctggcggcctctgtccgggcgaggtggcgcacggcgacggtcgccaccagcgacgagtccagcccgccggagagcaggacgccgaacgggacgtctgtcatcagccgcttcaccacggccttctcgaacgccttccttagcgccagcgggtcgtaggggacggagggggtgacgacggcctcctcgtcgtcgtcgtcgtcgtaccaaggagggttgtaccacctgctgaatccgccggtgttgctggagtagagatgccccggagggaagatctcgaagtgctcacactcgtcgtgcagggccttcatctccgacgaaatccacaccgacccatcgactccccatccgatgtagaggggcgtcacaccgatggcgtcgcgagcagccatgaagaagctgctgcccgcgcggtcgccatggcgagtgtccagcagcacgaaggagaagacgccgtccagcatgtccacgaactcttctccatgctcctcgtacaggtgcgcgatgacctcgcagtcgctgccggtcctgaagctgtggcctgcgccggcgaggcggctcctgaggtccaggtggttgtagatctcgccgttgacggcgacgaccaccgactggtcctcgttgtagaggggctggtcgccagaggccgggtcgatgatggcgaggcgctggtgagagaggtagcagtcgcccacctgccggaggccgctccagtcggggccccggtgcttcagccgccgcgacagctccagcacccgggacctcttgctgctgcccttggcctcgtcggcgcacccgagcacagcaagtatgccgcacatactcactcgttcactgtaaagcttctggctcctccctcccctcctctggcggctccgtgcgta

SEQ ID NO: 53495 - DNA, 291 bp, Zea mays
  Clone ID: MRT4577_148790C.1
aattcggcacgaggactacggatccgcctgctccttcagaacagagatctgtactcgagaaggttgcttcgcagcagactgctgaaggccggtggtcaggcggtcggacacagggtggggcgtgggggacagggagggtctacggccaggcaaattcggctcagggtggcagccaaacaagcccctgatgccggagcagtctagatccggcgccccgatggagtggacgacggagcagtacctggatctgcgacactacggaggacgacacggtgactaaaaccgagctat

SEQ ID NO: 53496 - DNA, 354 bp, Zea mays
  Clone ID: MRT4577_148791C.1
tttttttttttttttttttttttttttttttttttttttttttttttttttttttttttaaaaaaacaaaccggagggcccaggaccccttattggttttaaggcccggaaaaaaagcccaaatggcatggccatggaccgatttcaggcggcttaataaaagggggctcccaaaaggcaaactctggcggtttaacatgattggaagatccaaatccacgggcattaaagctttttttaatgggatgggaaaatcctaaagcttgttataacgggttaacagaagggggttgttggccaaactacccatgtaaacatgtggcagggtcccactaaacccagcccagccagggg

SEQ ID NO: 53497 - DNA, 336 bp, Zea mays
  Clone ID: MRT4577_148792C.1
cggggatcaggctctccctctacccggatgtccgccttatacttgcagtccccgcgcgcgagatcgccgccccgtgtgggccctagatcccgatggcctcgagccgccgcaccctgctcaaggtcatgatcctcggccattgtggggttgggacgacttacttgatgaaccaatatgtgaacaagaagttcagcaatcagaacaaggttacgactggagcggatttcctcatcatggaggtgcaggacgcggacatgctcttcactttgcaaatatgggacactgctggccaggaagggttacagagtctccctgttgcattttaccgcagagcag

SEQ ID NO: 53498 - DNA, 326 bp, Zea mays
  Clone ID: MRT4577_148793C.1
agctgcactggcccgaggcgcggccatgaaaggcggcggcgacaagaataagaaggtggcggcaggtggcatgttgctgtccgtcgtcgccgtcggctgcttcctcctcttcgtcgtcgtcgtcttcacgctctcctcccgacgctacaccaacctcgtcctcgacgctcgtgatcgtgagccgatgtgacttccacacgtcgcagctgcatgggggcagccacggcggggatgcggtaaaggttacttcaagcatcggcatgttgctcaacgaagcaacgatgacgacgagaacgcgtgtcacggaagcgtgttcttgacgaatc

SEQ ID NO: 53499 - DNA, 205 bp, Zea mays
  Clone ID: MRT4577_148794C.1
aagcaacatagaaagggaatacagttgcttttttagagcaacaatggcggccaagagattggccatccttatgcgcggggctgttacggcaggggtggctaacccacccatttttcttaatacccacaagcttctattgctggccttttttctccatacacttcccattaattgcccggtttagttatggaaaaaacctatcctt

SEQ ID NO: 53500 - DNA, 179 bp, Zea mays
  unsure (1)..(179): unsure at all n locations
  Clone ID: MRT4577_148795C.1
gcgggagacaccggacgcagccggctgccgcagactggnagtagccggcgcgccgnncccgtatcctcagatcatcggacggcacggtcctcnccactcttctgacgcccgacgatctttgttttattttccttcgtccttttgttgtgtgattgactccatcttcattgtggtctttg

SEQ ID NO: 53501 - DNA, 386 bp, Zea mays
  Clone ID: MRT4577_148796C.1
aagccgtgccccctgccggaaccgcgccataattaacgagggaaggctcaagctccctattcggcgggcgcggaagagaggttttttataatgcaactaaacaaaagacttcatttagggaggaagcagaacggcaagccttaaatataagtatagaaacaacggataggcgtacagggaaatatgggagatgctacaaggcaggggatactgatattagcaagaacgggatacataacttaagctcacggaacataactaaatgagaaacatttgatgcatcaatactactttgttggtaaaacatacagtgatacaaacggctcttcatcaaaattcactgcatcactgtattgtgcgaggcacactaaccaagcattaaattg

SEQ ID NO: 53502 - DNA, 500 bp, Zea mays
  Clone ID: MRT4577_148797C.1
ggttgataggaggacaggacccaggaagacaataggaaaaacccgcggagccccaagtaataacgggggggggaaagcaaggcaaggagcaagctaacctaaataaaagagcacctagacaggacacagaaagattaaatttaggaggggggaaaaactagaaaaccctgcagcatacccggccgacccccccacccggggcagcttgagacacccacgcggccaagcatggccatggcgggggctaaggcgtcgaaaaaggaggaacggcaggccccaaatcgggtgaagggggcaccacaacggcggagaccaaaaagcacctaatcggaggccagcagggccaccatctggtgcaaaacacgccagtagccggtgtggaaagcaccgggaaccacgacggccaaaatcgcaaacgccaaggagcccaaatttaacgggcaaatacgccgcatatgaccaaagaagtagaggttcattggaagggcggcagcggcccc

SEQ ID NO: 53503 - DNA, 204 bp, Zea mays
  unsure (1)..(204): unsure at all n locations
  Clone ID: MRT4577_148798C.1
caagttgccgggaaccaaaccaagggaaacgggggatttcgacaataaaaaaagcaataaaacgtgtgggtaaactaaattaagcccaaaagcgcagatcacagtcaaatcaatggtgttgttatcctagacaaaaaaaaacccccgcaggaaagcaccccgtangagaaatngcagcatcccggcgttgccactaccaagtag

SEQ ID NO: 53504 - DNA, 404 bp, Zea mays
  Clone ID: MRT4577_148799C.1
gggccgggaagagatcgaggttcctatctggtattggatgtagctgatcttctagaaacgcaaagtgaagccttgatgagtcgtttcgtcccggtgatctatccacaaagcctcaggtcatgtcgcagcaccatcttacatgagatcactcaggcggactgtcgacggtaggctatgaggctgatccacgcggaacacaagaacctctaggtctgaggactcaggagtggcgaggtgaagaagaagttcggtaacgggcgtgagcaccatggtgctcgtatacgacgcctccgggaccaggctgggcctggtggacgacgtctaagactggatgggctccatgtacgatgtctgtcgataccggataccttgcatgacggagagagttattgcttcctcctggt

SEQ ID NO: 53505 - DNA, 462 bp, Zea mays
  Clone ID: MRT4577_14879C.1
cgactacttaaggaaagctgcccgctgaagcccgtccttaacggccatcagctcgggtcttaaataacgtattactgaaccaaaaccctgcaccctgagggcgtgaatgtttcttctgtctaatgaacacactactctcagctgtctagcagtatagccacgagggggtaatctaccgcacaggcatgtgcactcggtactgcaactcaatcttcaacgtggctactgccccgcagaccactgacctggccggtcatgtgctgctgctcgatgatgtactggaggacacaatgccaataccgtattgaaccggcgctgcctctgcatcagcctgagctacatgcatgcctgtgccaacagccacttgcaatcacgtgcacaatgcagggaacctgcggggctggactgacccctaacgaactccactcagtggaccagcagaggcatgctggcaacccgaca

SEQ ID NO: 53506 - DNA, 522 bp, Zea mays
  Clone ID: MRT4577_1487C.1
caaaaaacaaaaggggccctccttttttttaaacaaacccatgcagttaaaatggtactttggcatttcagtacacataaaacggttaaaaaaaaattcaggattggcatcatttatttttttaaacaaaaaacatcacatgtttagctttggggagaacatgggccataaaaaatgaccctgggggagcgcctttggcgtctaactctacttgatgcagtggctgcaaaacattatcatcaaactagttaatttttctgttctgccaccaaaaattgtttgggctccagttgtaccatttaaatctgggcgttttccacacaaacaaaatttttgtagcaggcctccttctgcaagggaggattccacaaaactgcttctgaccaatttgaatttgcaagggcatttttgtcacccaatccattgcccagaatgagttcacttggggccccaaggtaaacccagtcaacaaatcctggaaaagtcaccttttcccttttttttttgccctccaaaggattt

SEQ ID NO: 53507 - DNA, 381 bp, Zea mays
  Clone ID: MRT4577_148800C.1
atggacatccgagatccaacggccaagacggtcagggtagctggtcctaagtgcggcggcgccgctcgacctcacagtgagatctcgatggagatgagggaaacagccacggcagggctctggggacttggggaaggactcgggcgtgttcagggcgacatggcgaacatgatcatgggcacaacaccggcgcgggggcaccagagggcgcagaacgcggtggggtggcccaacggcggcgcggatctactccgggttttcaattcaaattcaaaccaagtttcaaattcaaaccaaatcaaacatgtgcacaaattcaaagaatatcttggactcagcatgatgcaacagttcatgacttacattgttttgacaaaataa

SEQ ID NO: 53508 - DNA, 499 bp, Zea mays
  Clone ID: MRT4577_148801C.1
gacgtaagctcggaattcggctcgagaaatgccgtcatatggggatccatcttgagtgcctgcagagtccacaaaaacattgacctagcccgacatgccgcggagcatcttctcaagttagcccctgaggaggatgccgtctatgtccagttgtacaacatatacatagactctagacagtgggcagatgcaaaaagagtaaggatgttgatggaagaacggggagttaagaagacggcaggttacagctcgatcactgtggctgggcaggttcacaagttcgtcgccaatgaccaatcgcatccttggacgttagagatcatggcgatgatggaggagatcgcacgcaggctgaagtctgtgggttattctccagtcacgtcaaggatagcagttgacgttgacgaggaagagaaagaacaggcacttttagcacacagtgagaagatagccattgcttttggtctcatcagtcatccaccgagcttaccgatccata

SEQ ID NO: 53509 - DNA, 311 bp, Zea mays
  Clone ID: MRT4577_148802C.1
tgaccggggccgggagttcccggggcgacgcagggggcggagtctgatgctctcgcaccgcgccgggcgcgtcctttcgtgaactccactcctcttgggcgcggcatcacctcctcttcgccgcggccgcgaccgcgccaccgggcagccagccagcgctgggtgaggagtacgacgggggggggggggggacggggctcaaggggtgcatcctcagtgggctcctttccgtggacgggctcaagggtttgcgtatggacagagacgactactatggaggggattccacctcgctcaaccttaatcagctc

SEQ ID NO: 53510 - DNA, 230 bp, Zea mays
  Clone ID: MRT4577_148803C.1
gggaaaaaaaaaaaacaaaaaattctgatatgtgaccttactgttgtcgaattgttaacaaagattactccatctgtcccaaaaaaaaaaaaaaaaaaaaaaaaaaaaaaaaaaaaaaaaaaattcaacaaattcatatgatattttggctatgatgggtaatattctatgacgatatcaattcaaaaaaaaaaaaaaaaaaacgaacctaaaagcaccaaattttagca

SEQ ID NO: 53511 - DNA, 224 bp, Zea mays
  unsure (1)..(224): unsure at all n locations
  Clone ID: MRT4577_148804C.1
tacgtaagctcggaattcggctcgagagcagttaaacaccgcngtttgacgaggaacagagggcgaccagggccgggaaagaattcatgtccagaacagtgtcgcggggaatcacgctgtaggtgggcggtcggtaccggttgggctagctgtcggactagacgagggcggtccgagagcacggtctgaccacaagccgagacaacatgacaaccgggggcata

SEQ ID NO: 53512 - DNA, 568 bp, Zea mays
  unsure (1)..(568): unsure at all n locations
  Clone ID: MRT4577_148805C.1
cccgnactactatccccgctaccgctagccgccgcgctgctcatctggtggcggctcgcctccctccccccatccgccgccgccggctcctcctctagctccctccttaccccgagctttaagctcgtgctacctgcctacctatccgtagggagagagagagagaggggagaaggttcggtcggtcggtcgggggctctcggatctcgccgctgcctccccgtttcttcgttgggatctcgctcgcttcgcgccatggccgcggaccaaaccacggatctgctgcagaagttgtcgctggattcgcagcccaaggccgcgggtgcgacagagcctgctgctgctgccgctgccgccaaggagggtgctgtgacaaaccagccgctgagtgtggccatcccgccagagcggtctatcacgccggtgcttcaggactttatggatcccaacctgttctatctaccagcgtattactatggaggctacgacagttccatgagcgagtgggatgattatccaagatatctaaattcagatggagtggagattgccccagcagtgtatggag

SEQ ID NO: 53513 - DNA, 358 bp, Zea mays
  Clone ID: MRT4577_148806C.1
ggcatgggaaatttcatcatcatttttctcatagcccaaattattaaacccccttcattgataataacgcttacttacaaaccatgcccctatttgggtctatacaaaaccattttttgggcgcatgccaagcaggctttctgaaaatccaaagagctatgcctaacttaaactgaggcagttttgacaactcacagtaaatattctttggaatgatgcatcccccatctttattcaccctgtttctaaagggtacatacagttcattaggtggggaaactccaacaatgttaatattgccatcagaaacgtgatcaaagatgtcacagcccaaccaattaatacagattctaaaccg

SEQ ID NO: 53514 - DNA, 815 bp, Zea mays
  Clone ID: MRT4577_148807C.1
ggccggccggggtactactatccccgctaccgctagccgccgcgctgctcatctggtggcggctcgcctccctccccccatccgccgccgccggctcctcctctagctccctccttaccccgagctttaagctcgtgctacctgcctacctatccgtagggagagagagagagaggggagaaggttcggtcggtcggtcgggggctctcggatctcgccgctgcctccccgtttcttcgttgggatctcgctcgcttcgctttatggatcccaacctgttctatctaccagcgtattactatggaggctacgacagttccatgagcgagtgggatgattatccaagatatctaaattcagatggagtggagattgccccagcagtgtatggagatatttatggatatgggtatgctccttacggggcatactctccggccacttccccagttccaacggttgatggtcagatgtttggcgcacagcattaccagtatccaaccacgtattttcagcctcctacaccaattccttctaccactcaaagcaacctccagtcttccaacaatcctgaaaagccagcagctaaagcagatcctgccaaggcaaccgctaatggtgttccaaatggtactggtcacactcacagttacagtggaactgtaccaagccaacaaagttcagcactgacgcctgatggaacttatagggcgcccttgctaggtggagttccttctgctggttacctagacacgacatattatgggtatgacagcacaggggcacaatttgcatggtatgatggctctgcttat

SEQ ID NO: 53515 - DNA, 2806 bp, Zea mays
  Clone ID: MRT4577_148809C.1
cctttttccccttcacagccccgtactactatccccgctaccgctagccgccgcgctgctcatctggtggcggctcgcctccctccccccatccgccgccgccggctcctcctctagctccctccttaccccgagctttaagctcgtgctacctgcctacctatccgtagggagagagagagagaggggagaaggttcggtcggtcggtcgggggctctcggatctcgccgctgcctccccgtttcttcgttgggatctcgctcgcgccatggccgccgtcgcgacgccaccggcccccgcgcccgccgcgccggcaccggcaccggcaccggctgctgctccggctcccgtcaccgtcgcccctgccgcggaccaaaccacggatctgctgcagaagttgtcgctggattcgcagcccaaggcggcgggtgcgacagagcctgctgctgctgccgctgccgccaaggagggtgctgtgacaaatcagccgctgagtgtggccatcccgccagagcggtctatcacgccggtgcttcaggactttatggatcccaacctgttctatctaccagcgtattactatggaggctacgacagttccatgagcgagtgggatgattatccaagatatctaaattcagatggagtggagattgccccagcagtgtatggagatatttatggatatgggtatgctccttacggggcatactctccggccacttccccagttccaacggttgatggtcagatgtttggcgcacagcattaccagtatccaaccacgtattttcagcctcctacaccaattccttctaccactcaaagcaacctccagtcttccaacaatcctgaaaagccagcagctaaagcagatcctgccaaggcaaccgctaatggtgttccaaatggtactggtcacagttacagtggaactgtaccaagccaacaaaattcagcactgacgcctgatggaacttatagggcgcccttgctaggtggagttccttctgctggttacctggacacgacatatgggtatgacagcacaggggcacaatttgcatggtatgatggctctgcttatgcaaatggacagcaaagaacaaccacaactaatcgttttccatcctcgtcattcagtggtaatggttcatcagcaagatatcaaaacaagagctccaccacgcagcagatgggtatgcagaatagaagacctacaactacatcagcagctcctacctatcccaataggatgtaccctagcccccggccgtacacccagtatgggaattcagtaaaaactggtcttccctacgggagtaacggttacgattccaggatatatggtcgatgtggtcttggtatggataacaggtacaggcccagggcatgtagtggatactatggttatggcaatgagagtcaggatggaacaattgagttaaacagaggtcctagatctggccggttcaagaaccagaaattgtacggtcatactgtcactattgctgtgaaagggcagtctctcccttctagtgaaagcaagaatgatagtgctgtgcctgatagagcaaagtacaatagagatgacttccctgttcagtacgatgctgcaaagttctttgtcattaaatcgtacagcgaggatgacatccacaagagcgtaaaatacaatgtgtgggcaagcacaaccaacggaaacaagaagcttgatgctgcttaccaagaagctcagtcaaagggatctgcatgccctatattcttgttcttctcagtgaatacaagtgggcagtttgttggtgttgctgaaatgactggcgccgttgattttgagaaaaccctagagtattggcaacaggacaagtggaacggctccttctctgttaagtggcacattgtgaaggacgtgcccaacaatattctcaagcacatcatcctggagaacaatgagaacaagcctgtcacaaacagccgtgacactcaggagatacgcctcgaacaaggccttcagatgctcaagatattcaaggatcatgtcagcaaaacttccatcctcgacgactttgccttctatgagagccgccagaagttgatgcaggataagaggtccaaacagcagcagctccaaaagcaggtctgggacactaggacccccgtttctgtcaccggtgaacgaccacaggaacctgctaatgggaagcccaatccgtccgtaccagatggtgtcacggcagaggtgaaggcggtgaaggctcccgcagagaacggcatcactgctcctgttgtttcctatgcagcaaaggtggcccagacagcaccagagaaacccgtcctctccaacggagtcgccaagaccggttaactcgaccgtgcaaccagagctccatagccagggtggggtgggtgtcctgaagactcagatgcggtgcaagggaactggtgaccaaccaaggcaggctgtggaactggcagcatggccccataagcgttgctcgatctcctcatcgctactggatggagagcagttggctagttgttagcggtttccctagtttctcttcctcttgtgttccccgtttcagtttgcttatagccccgaagactcttttctcccgtagtgtcggaatgccagggtctgtccctgtgggtgtgttgcgtaactgggatccgagtataccctgctgtgttcgtcgttacattgaatggatctgaatgaaagtgggttagattggagctaaaaaaaaaaaaaaaaaaaaaaaaaaaaaaaaaaaaaaaaaaaaaaaaaaaaaactcgagagaggg

SEQ ID NO: 53516 - DNA, 1126 bp, Zea mays
  Clone ID: MRT4577_14880C.1
cattgggtacctcgaggccggccgggacagccattacacgcatactgcatacacaacgcagagcatcagaagcagctgcgcatctgatgcgacatgggctgccgccacgcatggctatcacctcccgcgcgctcatcggcaagccggcggctggcacgagggacgtcttcggcgagggccgcatcaccatgcgcaagaccgccgccaagcccaagccggcggcctccggcagcccctggtacggtgccgaccgcgtcctgtacctgggcccgctgtccggctcgcccccgtagctacctgaccggcgagttccccggctactactggtgggacaccgcggtgctgtcggcggacccgcgagaccttcgccaagaaccgcaarcyggaggtgatccactgccgctgggcccatgctcggcgcgctcgggtgcgtgttcccggtagctgctcgcccgcaacggcgtcaagttcggcgaggcggtgtggatcaaggcgggctcccagatcttcagcgagggcgggctcgactaccctaggaaacccgagcctgggccacgcgcagggcatcctggccatctggggcgtgccaggtggttgctgatgggcgcccgtcgaggggtaccgcgtcgccggcgggcgcctccgggagagggtgggtcgacccgcttgtaccctgggcggcagcttcgaacccgctcggggctcgccgacgaacccggaaggcgttcgccgagctcaaggtggaaggagatcaagaacggccgcctcgccatgttctccatgtatcggcttcttcgtgcaggctatcgtcaccggcaatggccccctcgagaaccttggcgaccacatctacgaccccgtgaacaacaacgccttggcttacgcaaccaacttcgtccccggcaagtgagcgacggcatgatgcttgcatgcgtgtaccgtagacgtaccgtattcctacgtactgcaggttgcaccagtatttgtgaagggagctgtgcgtgggagccagaagagattgtaccgctagtgtatttttgtatgcacgctgtggagtggagctgatcaatgaaatatgctgtaaatatattatgtcttagaaaaaaaaaaaaaaaaaaggccccta

SEQ ID NO: 53517 - DNA, 1933 bp, Zea mays
  unsure (1)..(1933): unsure at all n locations
  Clone ID: MRT4577_148810C.1
cattgggtacctcgaggccggccgggaatactgttctcgcagcagctaaagcagatcctgccaaggcaaccgctaatggtgttccaaatggtactggtcacacttacagtggaactgtaccaagccaacaaaattcagcactgacgcctgatggaacttatagggcacccttgctaggtggagttccttctgctggttacctggacacgacatatgggtatgacagcacaggggcacaatttgcatggtatgatggctctgcttatgcaaatggacagcaaagaacaaccacaactaatcgttttccatcctcgtcattcagtggtaatggttcatctgcaagatatcagaacaagagctccaccacgcagcagatgggtatgcagaatagaagacttacaactacatcagcagctcctacctatcccaataggatgtaccctagtccccgaccgtacacccagtatgggaattcagtaaaaactggtcttccctacgggagtaacggttacgattccaggatnatatggtcgatgtggtcttggtatggataacaggtacaggcccagggcatgtagtggatactatggttatggcaatgagagtcaggatggaacaattgagttaaacagaggtcctagatctggccggttcaagaaccagaaattgtacggtcatactgtcactattgctgtgaaagggcagtctctcccttctagtgaaagcaagaatgatagtgctgtgcctgatagagcaaagtacaatagagatgacttccctattcagtacgacgctgcaaagttctttgtcattaaatcgtacagcgaggatgacatccacaagagcgtaaaatacaatgtgtgggcaagcacaaccaatggaaacaagaagcttgatgctgcttaccaagaagctcagtcaaagggatctgcatgccctatattcttgttcttctcagtgaatacaagtgggcagtttgttggtgttgctgaaatgactggcgccgttgattttgagaaaaccctagagtattggcaacaggacaagtggaacggctccttctctgttaagtggcacattgtcaaggacgtgcccaacaatattctcaagcacatcatcctggagaacaatgagaacaagcctgtcacaaacagccgtgacactcaggagatacgcctcgaacaaggccttcagatgctcaagatattcaaggatcatgtcagcaagacttccatcctcgacgactttgccttctatgagagccgccagaagttgatgcaggataagaggtcgaaacagcagcagctccaaaagcaggtctgggacactaggacccccgtttctgtcaccggtgaacgaccgcaggaacctgctgatgggaagcccaatccgtgcgtaccagatggtgtcactgcagaagtgaaagcggtgaaggctccctcagagaacggcatcactgctcctgttgtttcctatgcagcaaaggtggcccagacagcaccagagaaacccgtcctctccaacggagtcgccaagaccggttaactcgaccgtgcaaccagagctccatagccagggtggggtgggtgtcctgaagactcagatgtggtgcaaggcaggctgtggaactggcagcatggccccataagcgttgctcgatctcctcatcgctactggatggagagcagttggctagttgttagcggtttccctagtttctcttcctcctgtgttccccgtttcagtttgcttatagccccgaagactcttttctcccgtagtgtcggaatgccagggtctgttgcgtaactgggatccgaatgtaccctgctgtgttcatcgttacattgaatggatctgaatgaaagtgggttagattggagcttttcttccaaaaaaaaaaaaaaaaaaaaaaaaaaaaaaaaaactccag

SEQ ID NO: 53518 - DNA, 3471 bp, Zea mays
  Clone ID: MRT4577_148811C.1
tttgacgagggaggggaatccggggggggggggaggcggccagacgccgtgccgagccgagcagtccaactcccgggcagaggcagaggcagaggcggagggcggggcgagagagccgtgcggctgtccaactccccttccctatccggtagcagctgctcctatatgacccccggagcccgacagggaccttcccctttttccccttcacagccccgtactactatccccgctaccgctagccgccgcgctgctcatctggtggcggctcgcctccctccccccatccgccgccgccggctcctcctctagctccctccttaccccgagctttaagctcgtgctacctgcctacctatccgtagggagagagagagagaggggagaaggttcggtcggtcggtcgggggctctcggatctcgccgctgcctccccgtttcttcgttgggatctcgctcgcttcgcgccatggcccgccgtcgcgacgccaccggcccccgcgcccgccgcgccggcaccggcaccggcaccggctgctgctccggctcccgtcaccgtcgcccctgccgcggaccaaaccacggatctgctgcagaagttgtcgctggattcgcagcccaaggcggcgggtgcgacagagcctgctgctgctgccgctgccgccaaggagggtgctgtgacaaaccagccgctgagtgtggccatcccgccagagcggtctatcacgccggtgcttcaggactttatggatcccaacctgttctatctaccagcgtattactatggaggctacgacagttccatgagcgagtgggatgattatccaagatatctaaattcagatggagtggagattgccccagcagtgtatggagatatttatggatatgggtatgctccttacggggcatactctccggccacttccccagttccaacggttgatggtcagatgtttggcgcacagcattaccagtatccaaccacgtattttcagcctcctacaccaattccttctaccactcaaagcaacctccagtcttccaacaatcctgaaaagccagcagctaaagcagatcctgccaaggcaaccgctaatggtgttccaaatggtactggtcacactcacagttacagtggaactgtaccaagccaacaaagttcagcactgacgcctgatggaacttatagggcgcccttgctaggtggagttccttctgctggttacctagacacgacatattatgggtatgacagcacaggggcacaatttgcatggtatgatggctctgcttatgcaaatggacagcaaagaacaaccacaactaatcgttttccatcctcgtcattcagtggtaatggttcatctgcaatatatcagaacaagagctccaccacgcagcagatgggtatgcagaatagaagacctacaactacatcagcagctcctacctatcccaataggatgtaccctagcccccgaccgtacacccagtatgggaattcagtaaaaactggtcttccctacgggagtaacggttatgattccaggatatatggtcgatgtggtcttggtaatggtatggataacaggtacaggcccagggcatgtagtggatactatggttatggcaatgagagtcaggatggaacaattgagttaaacagaggtcctagatctggccggttcaagaaccagaaattgtacggtcatactgtcactattgctgtgaaagggcagtctctcccttctagtgaaagcaagaatgatagtgctgtgcctgatagagcacagttcaatagagacgatttccctgttcagtatgatgctgcaaagttctttgtcattaaatcgtacagcgaggatgacatccacaagagcgtaaaatacaatgtgtgggcaagcacaaccaacggaaacaagaagcttgatgctgcttaccaagaagctcagtcaaagggatctgcatgccctatattcttgttcttctcagtgaatacaagtgggcagtttgttggtgttgctgaaatgactggcgccgttgattttgagaaaaccctagagtattggcaacaggacaagtggaacggctccttctctgttaagtggcacattgtgaaggacgtgcccaacaatattctcaagcacatcatcctggagaacaatgagaacaagcctgtcacaaacagccgcgacactcaggagatacgcctcgaacaaggccttcagatgctcaagatattcaaggatcatgtcagcaagacttccatcctcgacgactttgccttctacgagagccgccagaagttgatgcaggataagaggtcgaaacagcagcagctccaaaagcaggtctgggacactaggacccccgtttctgtcaccggtgagcgaccgcaggaacctgctaatgggaagcccaatccgtccgtaccagatggtgtcacggcagaggtgaaggcggtgaaggctcccgcagagaacggcatcactgctcctgttgtttcctatgcagcaaaggtggcccagacagcaccagagaaacccgtcctctccaacggagtcgccaagaccggttaactcgatcgtgcaaccagagctccatagccaggatgcggtgcaagggaactggtgaccaaccaaggcaggctgtggaactggcagcatggccccataagcgttgctcgatctcctcatcgctactggatggagagcagttggctagttgttagcggtttccctagtttctcttcctcttgtgttccccgtttcagtttgcttatagccccgaagactcttttctcccgtagtgtcggaatgccagggtctgtccctgtgggtgtgttgcgtaactgggatccgagtataccctgctgtgttcgtcgttacattgaatggatctgaatgaaagtgggttagattggagctttaaaaaaaaaaaaaaaaaaaaaaaaaaaaacttactgcccatgggtgaacgggaatgttgcagcggcttgctgcaacaacattggctccagctcaagtagttcagcgccctctggttggcagctaacaatagatgcagtcgacacgtaccaatcacttggtcaagcccaaaatcaaataatgcaatctgattctgcagcttcattatatatggatgaccaaataactcataaccgcaaggtagggagacggccttctgtgagcagaagctttgggaagtgctgatcggaactcctgtagctcaagtgtttcctagacagaaacagcattacagaagttccagattggtgtaacaggagaaacaaaataatgatagtctcagtagattgttatcaccccgtgggtgtgagcttatagctgttttatgttgttgcatattgatacatcatatatatgtgtatttatattccgaaagggtttattcaacagtctttcatttgacagtaaaaaaaaagaaaaaaaaaaaaaaaaaaggccccta

SEQ ID NO: 53519 - DNA, 187 bp, Zea mays
  Clone ID: MRT4577_148812C.1
gaaagttatttgttttgtttttcctttccctgttacacgttgagaaaaggaaaaccaaggccccaaaacccaaaaaacacgttaaaacccgggaacccagaaggcaaaagcgttaattcaggcaacggtgtttaaaggcttaacatgtttacgaataggcatttaaaacccgtcaaacactttagaa

SEQ ID NO: 53520 - DNA, 2797 bp, Zea mays
  Clone ID: MRT4577_148813C.1
tttttgcagggagggggcggcgcgaggttttttttttttttttttttttaaagctccaatctaacccactttcattcagatccattcaatgtaacgacgaacacagcagggtatactcggatcccagttacgcaacacacccacagggacagaccctggcattccgacactacgggagaaaagagtcttcggggctataagcaaactgaaacgaggaacacaagaggaagagaaactagggaaaccgctaacaactagccaactgctctccatccagtagcgatgagaagatcgagcaacacatgccttggttggtcaccagttcccttgcaccgcatctgagtcttcaggacacccaccccaccctggctatggagctctggttgcacggtcgagttaaccggtcttggcgactccgttggagaggacgggtttctctggtgctgtctgggccacctttgctgcataggaaacaacaggagcagtgatgccgttctctgagggagccttcaccgccttcacctctgccgtgacaccatctggtacggacggattgggcttcccatcagcaggttcctgcggtcgttcaccggtgacagaaacgggggtcctagtgtcccagacctgcttttggagctgctgctgtttcgacctcttatcctgcatcaacttctggcggctctcatagaaggcaaagtcgtcgaggatggaagtcttgctgacatgatccttgaatatcttgagcatctgaaggccttgttcgaggcgtatctcctgagtgtcacggctgtttgtgacaggcttgttctcattgttctccaggatgatgtgcttgagaatattgttgggcacgtccttgacaatgtgccacttaacagagaaggagccgttccacttgtcctgttgccaatactctagggttttctcaaaatcaacggcgccagtcatttcagcaacaccaacaaactgcccacttgtattcactgagaagaacaagaatatagggcatgcagatccctttgactgagcttcttggtaagcagcatcaagcttcttgtttccgttggttgtgcttgcccacacattgtattttacgctcttgtggatgtcatcctcgctgtacgatttaatgacaaagaactttgcagcatcgtactgaacagggaagtcatctctattgtactttgctctatcaggcacagcactatcattcttgctttcactagaagggagagactgccctttcacagcaatagtgacagtatgaccgtacaatttctggttcttgaaccggccagatctaggacctctgtttaactcaattgttccatcctgactctcattgccataaccatagtatccactacatgccctgggcctgtacctgttatccataccattaccaagaccacatcgaccatatatcctggaatcataaccgttactcccgtagggaagaccagtttttactgaattcccatactgggtgtacggtcgggggctagggtacatcctattgggataggtaggagctgctgatgtagttgtaggtcttctattctgcatacccatctgctgcgtggtggagctcttgttctgatatattgcagatgaaccattaccactgaatgacgaggatggaaaacgattagttgtggttgttctttgctgtccatttgcataagcagagccatcataccatgcaaattgtgcccctgtgctgtcatacccataatatgtcgtgtctaggtaaccagcagaaggaactccacctagcaagggcgccctataagttccatcaggcgtcagtgctgaactttgttggcttggtacagttccactgtaactgtgagtgtgaccagtaccatttggaacaccattagcggttgccttggcaggatctgctttagctgctggcttttcaggattgttggaagactggaggttgctttgagtggtagaaggaattggtgtaggaggctgaaaatacgtggttggatactggtaatgctgtgcgccaaacatctgaccatcaaccgttggaactggggaagtggccggagagtatgccccgtaaggagcatacccatatccataaatatctccatacactgctggggcaatctccactccatctgaatttagatatcttggataatcatcccactcgctcatggaactgtcgtagcctccatagtaatacgctggtagatagaacaggttgggatccataaagtcctgaagcaccggcgtgatagaccgctccggcgggatggccacactcagcggctggcttgtcacagcaccctccttggcggcagcagcagcagcagcaggctctgtcgcacccgccgccttgggctgcgaatccagcgacaacttctgcagcagatccgtggtttggtccgcggcaggggcgacggtgacgggagccggagcagcagccggtgccggtgccggtgccggcgcggcgggcgcgggggccggtggcgtcgcgacggcggccatggcgcgaagcgagcgagatcccaacgaagaaacggggaggcagcggcgagatccgagagcccccgaccgaccgaccgaaccttctcccctctctctctctctccctacggataggtaggcaggtagcacgagcttaaagctcggggtaaggagggagctagaggaggagccggcggcggcggatggggggagggaggcgagccgccaccagatgagcagcgcggcggctagcggtagcggggatagtagtacggggctgtgaagggaaaaaggcccggccggcctcgag

SEQ ID NO: 53521 - DNA, 292 bp, Zea mays
  Clone ID: MRT4577_148814C.1
gtttatgcataacgtctttagcatcaaatgttgaaaatttgctttgattagagtgtgagatttgctgggtgcagcatgcaggtgtatccgtatccggattttatttccctctttactctcatatatctaaacaatttgcatgtgataggatgaaagatgggcacttggccctgtcatgatcttgtatttccttttgtattagctagttagctgagcacagcactaaacaatgctaaaaaccattttagtacagtggcaggtgcgtttttttggaggcctgtagtttctcttc

SEQ ID NO: 53522 - DNA, 231 bp, Zea mays
  Clone ID: MRT4577_148815C.1
atgggatccggtgcgctaggccgccgaggccttctacatgtgcctctggctctatttggcagtggccatgagtactctccaagtgagtatgtctttggcagtcaggggttgtacaatggtctagatgaccagggacaaagtggtccatgtcctctagttgctccacactcagatggcgagatcaagggagacatagatggtcatggtggtgctggagacaatgttgagtga

SEQ ID NO: 53523 - DNA, 376 bp, Zea mays
  Clone ID: MRT4577_148816C.1
tttctcctttttttttttttttttttttttttttggggttattggtattttctttttcctttcttccctttttccaattaccagcagcggcccaaataaaagcaaaccgggcaaacctaaacgtttcaaatggccaaacacagggggtaaactcccctatggtccctctagggggccgatctttggggggggatggccattcatattgggggccctttccaataaacctgaacatatatgcccaggaaaatcccaatccaaacccccgatcaggtgttttcatacccgggacccatatgggaccgcaagcaattaaaaacaaccaggacattggctccccgggtccttgacccggtttctggcggaaatgataaac

SEQ ID NO: 53524 - DNA, 178 bp, Zea mays
  Clone ID: MRT4577_148817C.1
atttgcataaattacaggcgggaccttttcaagatattgggtcgagcgaaaaggatacacatgggggcgggaaacaggaaaaagggggctttatatgtggtcgacaagtgtcaaggccggccctcgtgggtgattgaacccaaatatttttgtgaaataaaaaaaaacttttaccctg

SEQ ID NO: 53525 - DNA, 462 bp, Zea mays
  Clone ID: MRT4577_148818C.1
tatggataaggatgacgaaaaaaagataacatcaagatattctatgatactctcctcaaccaatgtcaacgaaaagaactatgcaagaatccatggaccatggtcagtggtcaccactcaccagtaatccccgcaagagcaggaaccaccattgaagtggtggaatcgcacggcatctcggatcacgaattctcggccagtcactgtggatatcagcttgatcacagtgtgacagtcgccgcaaatgcgcagattcttcatgatgtggatcggcatccaggtgggcaaggtcatgagcccgaatgctacagctagcttctcgctgtggtgaatctcggagcgcggggagtctgtcctcacgtaccctaggcgcgcgatcttctccatgagctcatctagcttcttccgaatcgcgagcacctggggatggctcacgtcatccgctttgaagacgtggacctt

SEQ ID NO: 53526 - DNA, 835 bp, Zea mays
  unsure (1)..(835): unsure at all n locations
  Clone ID: MRT4577_148819C.1
ctcgaggccggccgggacacttagactcttgatgaatcttggtcctcttgactgcggctgcgcggccgtcggcgatggaggcatggcaccgcgggcaggagcagcaagcccggggcatcgtgttgtaggtgagggacgggaacctggagcgggcgctgtcggtcatggagctcaagatgcggtccgccgcatccggtcgcgcacccaccgccacgtgaaggactcggagaagcgcgtgctcgcgcgtaaggcgctaatgcagcacgtccggtaccaggagctcggcaagaagctccgcgagatcctcatcaggaagatcaggtcaggggcatcctcccatctccaccaatacctgtacctgctagcacaccgcctctgtgtgcttgtttttgtcatttcttgctggttgatttgttgatcagacatttatagtggcttgcggtgacgaattggaacggattctatagtgatcgccaagtgctcgacgaaatgtctcgtgaagttctatctaccacgcttagtggaattgagtgtgtttgcggattgagttgcgctgaggaagaagtttcagtgctgagcgcagtgtcaacccggtgcaggtatctggattggaaggtttgtgtgagaggaacactttcatgtgcacccaactcatccttagctcacttaggcatccacgaaacaggtgtgttgtatggtggtaccaggatatatgaacatgctacaaattttgaacatgctacaaatttaggagccttttggtgtggtgatcccancgtnatcagggttgtggtcactaatttgatcctgcattttttatcatatttgttgcaat

SEQ ID NO: 53527 - DNA, 282 bp, Zea mays
  Clone ID: MRT4577_14881C.1
aggcttaaaatttgaccatctggttttttttttaagaccgatggtgcctacacacagacacccactctggtgtgtggtcctttgaactccactgctttttacatggcgagccggagaatgcactcaggtatgccttagtcatgcgacgtactagagctggcttgatctctcagggatcgccggcgtgcaagcgaaggtgccggcctatcgcttgagcctggagacataggaccccattcctgggcttgatgaggtacttcctgaacaactggctgttgatct

SEQ ID NO: 53528 - DNA, 291 bp, Zea mays
  unsure (1)..(291): unsure at all n locations
  Clone ID: MRT4577_148820C.1
cagctacccaagctccaggagcttccgaagaaacaggaccagagagggaaggtgatctgaaagtcacagaataattttttagagctgaatcagaatccaagcctgcaactgcagagacgatagatcttactgctgtctatactcttggaaagcacatcctaatatctttgcagattatcctgatctttgnaaatgcctaaagtcanaagaagccggaaagcacccccagatggctgggagttgattgagccaacactggatgctttagatcaaaagatgagagaagctgaa

SEQ ID NO: 53529 - DNA, 262 bp, Zea mays
  Clone ID: MRT4577_148821C.1
ccatgcgttgtcttccacaggattgaacattttgtacaccaaaccattggcttttccacccgcggcaggcgaaacgggggagggaggtgcgccaccgactgccccccacctgctgagccccggctgaagatctacgagcagcttattctgaggcaggaacaagatgggtgccagcggctcgatgaccggaaaggggcgggagaagcaagaacagctcgcccgagctaacggtggcgccgcgatgcagctgttgtcggttgag

SEQ ID NO: 53530 - DNA, 673 bp, Zea mays
  Clone ID: MRT4577_148822C.1
tagcttctctgcttgcttgattgatgctgcagtgatgaacaataatggccatcgccatagttcccacggacgccgagctgttgcaggggcacgccgatctgaggggccacagtccctactacctgacatccatggcgctcaagtgcgcggaggatctccacatacctaccgccatccactacctacggggaactgccaggttgacgtacctaataggccgcgctgtccctgccagctgccaagatcctgttcctcgggtgcgtgatgccgctgctggttacgtaaggcgtcttcccttcgtacgaagacatgcagcaccggctgaacccaactgtactggctgctggcggaaggcgtggagtctgaagaccacacctaccataaggacttactgctgtgcaccgtctcccgacactacgtggaagccggcatgtgactggccgactggctcaaaaatgaggaggacgatgaccgccagctgccttcgtcgatcgatgccatgcactatgtgcccctcgtacacgagagcaccaagctgctggacgatgagctgtgacagggtcacggaggaacgctggggcgatgcatacaacctggacatcggtaccaacatacgggagtgccggctccgacgacttcacttggctccgatcgatcacctactgctgtcatc

SEQ ID NO: 53531 - DNA, 147 bp, Zea mays
  Clone ID: MRT4577_148823C.1
ctcagttccctcctccttgtggcggtgacctcaggatatggaccagcttcctctcactcatccagccgcgttgtccatggtgaggatgaggtaccgtacagatggctctggaatgtttccctgcagtatgataaaagtggaagcttg

SEQ ID NO: 53532 - DNA, 442 bp, Zea mays
  Clone ID: MRT4577_148824C.1
gcgcaagaacatcgtgaggctgataggctgttgcctagaagtcgacaagccaatgctcgtgtatgagttcctctccaaaggcagcctcgacgatgttcttcatggaagcagacgtgatccactgaacttgaaatgccgtctggacattgctgcagagtccgcagaaggcctagcctatctgcattcgaaaacaacaaacgtcatcttacacggcgatgtgaaaccagctaatatacttttggatgaggactggacaccaaagatctctgactttggtatatcgaggctgattgtgaaagataaacagcacacggattttgtcattggcgacaggagttacatggatccagtgtatctacgagacgggctactcactgatagaagcgatgtctatagtttcggagttgagatcttggagctcataagccggaaaagggcacct

SEQ ID NO: 53533 - DNA, 645 bp, Zea mays
  unsure (1)..(645): unsure at all n locations
  Clone ID: MRT4577_148825C.1
aattcggcacgaggctccagtgttgtctgttgatgaacggacttgtccatgaagcaagtgaggaagcgaccatgaatgctatgaatgatgaacttcctaggattcaagaacaagtttattatgggcatatccagtcccatacagatattttagagaagtttttgtcagaaaatagctacaagcggtacaacccatcaattactggcaagaatgcagagaagaaatttgtttcgctctttgcatcgtaccatcaggacagctttatatttaatgacatgaagtacttacagtctcctggaactacagatgatgcaaaacctgttactcatctacttgccattgatctttcatcaaaagttggaacaaaattgctttatgaggccatactttacctgatggacggatctgatagagctcgtgttggtctgctactttatgtccacactggtggttcatcacctattttacttctgaaagatattttcgatagaactatttcttctttcagctataaagaaaggttattagtcttcctgcatgggctcttgaaattttatgatgcccaacctttgcccgcctcatctgctgctgatgattggactagaactatgatggaanaaggtctataccttagctgctgaaact

SEQ ID NO: 53534 - DNA, 484 bp, Zea mays
  Clone ID: MRT4577_148826C.1
aaaaataacaaagttcagttgagttcaatgctcagccatgaagagaaatgagatcgcagcagcagccatggttttgctcttgttgacgttgggcgctgaggcccagatctgttactcgcggagcaagaccttcaaggggtggtgctaccacagcaccaactgcatctccgtttgcatcaccgggggggagattagcgggttctgccagcatggaatttgcatgtgcacctatgagtgtctcacgggtaacgaagctagcctgcctggtggtggtggtggtggtgaagacccacagttattacacgtcgccacgccaaacggtgatggggctagaccactgtcacttgaggatgacaagaaagagacatcgacagagacggctatgaggggcgccaagagccatagtccgcgctacatgaggaggtagctgacagtagagcggctggtttcgtgggatggtgctactctcttctacatgcttatt

SEQ ID NO: 53535 - DNA, 423 bp, Zea mays
  Clone ID: MRT4577_148827C.1
atggccttgctagaccctcccgagtgcttccagtccgaggtggcactcgacttggtgcgcaacctgctcggatggggtgcgccggcgttcgccggaaggatccgtgtcggtgcctctcctcacgacgatctcgctgccggggtgttcgcgctcttcgtctccaacctctcctgcgggttggcgctgccgatctcgtctttcttcgtgctgctgctggaggagctcggcctccaccctcagcacttcacgccctgcttcatccttcaggcggccatcatcgcctacctttgcaagatcgaccttccagaggcggaaggcgagctgagctgcggctccatctttcgtgtgagcttcaccagcatcccatggtacaccaccatgaactggtctagctccaactccatgaggtgggaagcgagctga

SEQ ID NO: 53536 - DNA, 597 bp, Zea mays
  unsure (1)..(597): unsure at all n locations
  Clone ID: MRT4577_148828C.1
catatttgttggttttcacgagggctccgagagaaatacaaactggtgcagaatcatgatcaaagacttgtggtccttgaagtgaatcggctcgttttttctgcctacaccttcagacatggtgcttgatgcctatgcgcactataagctgtctacgaatatgagcagatcacattggctgtaaaagccggcatgtgtctttacatatagcatgtggattattagaggaaaccgaaaccacatcacatccatacagtggcgaaagacacagtagggctaagtattgcggctttggtagttgtcatatctaaacttttgatagtcttatatgttagagtactcgttagggttttgattgtctcctgtgtatttaccctctcgcacttattgtaatgggcctggcccaactatcgagtgtatcaatacaacgccgcccaaccccactcaagggttagggtttcccacnnnnnnnnnnnnnnnnnnnnnnnnnnnnnnnnnnnnnnnnnnnnnnnnnnnnnnnnnnnnnnnnnnnnnnnnnnnnnnnnnnnnnnnnnnnnnnnnnnnnnnnnnnnnnnnnnnnnnnnnnnnnnnnnnnnn

SEQ ID NO: 53537 - DNA, 447 bp, Zea mays
  Clone ID: MRT4577_148829C.1
atggccttgctagaccctcccgagtgcttccagtccgaggtggcactcgacttggtgcgcaacctgctcggatggggtgcgccggcgttcgccggaaggatccgtgtcggtgcctctcctcacgacgatctcgctgccggggtgttcgcgctcttcgtctccaacctctcctgcgggttggcgctgccgatctcgtctttcttcgtgctgctgctggaggagctcggcctccaccctcagcacttcacgccctgcttcatccttcaggcggccatcatcgcctacctttgcaagatgttcgtgggggcaacgcttcttcctccaatattcgaaggaatgggtgttgcgcagcgaccttccagaggcggaaggcgagctgagctgcggctccatctttcgtgtgagcttcaccagcatcccatggtacaccaccatgaactggtctag

SEQ ID NO: 53538 - DNA, 3916 bp, Zea mays
  Clone ID: MRT4577_14882C.1
gcacgggcacggggacgcgagcgtgtcacgtgcgcaccaacattccgccccgaattcggcatcccgtttccagcaacctaaaagaaaaggaaacagaaaaaaaaaatcacaggagaaaccgatttcccccttttctttattttcttcgtcctcttcgtctctgctcggggcccagtcacctcgaatcccttcgatccaatctccaaaccctaggcaatccaacatcaaagtattaggtgcccccttcctcaaaccgcggcgttgcggccatggcccacggcggcggcggcgggagggcgaaagtgacgccgaacctggcggtggacggcgagggcacgcggacgctcaatctcaccgtgctgcagcgcctcgaccacgccgttgaggacatcctcatcaccgcggctcacgtcacgctctacgacttcgacaccgacatcaaccagtggagccggaaggacgtggaggggtcgctctttgtcgtcaagaggaatgctcaacccagattccagttcattgtcatgaatcgcaggaatacagataatctagttgaagatcttttgggagattttgaataccaactacaagctccttatataatgtaccgcaatgctgctcaagaagttataggaatctggttttacaattcccaggagtgtcaacaggttgcaaatcttttcagcaggattctgaatgctttctcaaaggtggcaccaaagccgaaaattccttctgtccaaagtgaatttgaagagctggaagcagcaccttcgttggttgatggtcctctggaagcgcaaacgtcaaatatcatgtcaactactactcacgttcaagaggatcctttatctgcatttttcagtgtatggaacttgttctcattagttttacattgtatttgggtcccttcactccattaacttttggctgcttttcggctaaagattgttacctactttctccagcatataacatctttagtttttgttttgtgtgtttaaatgtgcatctctggaaacaggcagctgcaaatgctggtggcaattctgctgtagctgttgcaaggcaaccaattcaaccttttggtgctactccggtggctacacatgcagctactagtatcactacaacacaatcgccaggcttgcattatttgcttccttcacaagcctcatcggtttctgggaggcctgctgatgctcatggtggcactggttctataggaaggtccacaagccttgtatatccgtcacttttctcaccattgacatcttcacagacgaaaatggtgcacactaattctgcagtaccaactgctccacctcaacatcctcggattgctcagcagccgcaaagtgctcccttgcttcagccttttccgttacctacggcttcatctccaccatatgggactccattacttcaaccgtttccgccacctaatccgtcgccatctcttgcatctgcaccagtcttgagcccagcgctgactagagacaaagtcagagatgcattattgagacttgtggagaatgatgaattcgtcgatttagtctaccgcgagatcatgaacagacagtaatggatttacaaggtacagtcctctccatcaggctagcttgtgtttggactctgtcattatctgttgtttagcctattccaagttatcctgtaaattattattgataaaatccttcggttggtggtgtttgtgctattaatgtactttttacatctgtataaatggttataaaatctgtgctgtattcgtggcgcagaaaagttttgttctgagtattatcttgaaacttttgttcaaacaaaaaaaaaaacggtttgtggagcttgtgctattaatgaatttacaagataacttgaagtagcctagacaacagataatgacagagtccaagccacgcacgcatacacagcacagtatgaggtacagcatccgcaaaaaagctgtgaatcttgatcgacatggcgcgccgccaccatggcggctcacctcccgcgcgctcgtcggggagccggggaccagcaccagggacgtcttttttttttttttttttttccatgcgcaagactgctggcaagcccaagcccaagccagcggcgtccggcagcccctggtacggggccgaccgcgtcctgtacctgggcccggctgtccggccagcccccaagctacctgaccggcgagttccccggcgactacggttgggacaccgcggggctgtccgccgacccggagactttcgccaagtaaccgcacagctggaggtgatccactgccgctgggccatgctgggcgcgctcgggtgcgtgttcccagagctgctcgcccgctaacggcgtcaagttcggcgaggcaaggggaatccgactgtttaattaaaacaaagcattgcgacggtcctcgaggatgctgacgcaatgtgatttctgcccagtgctctgaatgtcaaagtgaagaaattcaaccaagcgcgggtaaacggcgggagtaactatgactctcttaaggtagccaaatgcctcgtcatctaattagtgacgcgcatgaatggattaacgagattcccactgtccctgtctactatccagcgaaaccacagccaagggaacgggcttggcggaatcagcggggaaagaagaccctgttgagcttgactctagtccgactttgtgaaatgacttgagaggtgtaggataagtgggagcctccgggcgcaagtgaaataccactacttttaacgttattttacttattccgtgggtcggaagcggggcaccgcccctccttttggctccaaggcccggcctcgccgggccgatccgggcggaagacattgtcaggtggggagtttggctggggcggcacatctgttaaaagataacgcaggtgtcctaagatgagctcaacgagaacagaaatctcgtgtggaacaaaagggtaaaagctcgtttgattctgatttccagtacgaatacgaaccgtgaaagcggggcctcgatcgttaagaccgggtctgcgggcagaggtcagaaaagtctacagggatcgggcttgtggcagctgcgtcgggcggtcgcctgttacagcccagtcggcgagggccgtgtggttcaagggccgggtcccagatcttcagcgagggcgggcttgactacctcggcaacccgagcctgatccacgcgcagagcatcctggccatctgggcgtgccaggtggtgctcatgggggcccgtcgagggggaccgcaatcgccggtggccgccctcggggagggtgggcgacccgctgtaccctgggggcagcttcgacccgctcgggctcgccgacgacccggtagtcgttcgcggagctcaaggtcaagtagatcaagacgcgccgcctcaccatgttctccatgttcggcttcttcgtgcaggccatcgtcaccggcaagggtcctgttgagaacctcgccgaccacctcgctgaccgtgtcaacaacaacgcgtgggcctacgctaccaactttcgtgcccgggcagttagcgacggcgtatacatacttgtatgcgtgtaccgtagacatacatattcgtatatgtactgcaggagatgtaccagtattaatttgtgaagcagggagcatgggctcagagattgtaccagtagtgtacgtatttgcatgcatgctttggtccttgtggacataatcaattaaaaatgctgctcaattatacatacgtctttaataatgcatactgtacatgatttgctctggcacttaagtcggtgttgtgatgaagtgcaacaaagttcagtgagggcggaaaaaaaaaaaaaaaaaaaaaaaaaaaaaaaaaaaaaaaaaaaaaaaaaaaaaaaaaaaaaaggaaaaaaaaaaaaaaaaaaggggcggcc

SEQ ID NO: 53539 - DNA, 156 bp, Zea mays
  Clone ID: MRT4577_148830C.1
ccgtgcgccactctgctgagtcacgggggggcattcgtacagcggagcgaaaatgtctcgcgccacatgaactgtcctgttctacatgatccgacctcctgctaatcacatgtatgcgtagagaaaaacaggtcaccgaaggtatgtactcctgcc

SEQ ID NO: 53540 - DNA, 545 bp, Zea mays
  Clone ID: MRT4577_148831C.1
gaacgcgtctgctgacctgccaagaggaggaaaggaacgatcagacatgggttgccctgcgcagaccacgctctccacccacgtctgcatcttcctgagcagcaagcctcatgcgacatcccaagagcgagcaggcatacatcgacggagaccgcaccagtctgccgctcctgctcacctgcaacgcttcctctcctccgaccccttcctcaccaggagccacaggaagaagaccccgactgcaacgaggaggagtgcgcccctcacaaggaagtaggaaacctgagccgctcaacgatctggacgaagagacgacccacgtcggccgtcctttgccatccaagaagagacggggtaccggcttagtggagaaggacaccgccggccagaccaagatcaactccgtccagacgatgttgtacttgtaccagagccccacaaggtccggaacggcggctacatcgaccgatgcagccaagaacacctgcaccatcgacgcgcgggccgccctcatcaccgtatccacgggctctgccattatcatc

SEQ ID NO: 53541 - DNA, 472 bp, Zea mays
  unsure (1)..(472): unsure at all n locations
  Clone ID: MRT4577_148832C.1
cataaaacttctanaaccatctccccctcgccacaccacancccctcnaagcgaaccaagcaatggcccggatcngatcgagggccctcccccttnccccccttctagcgggcctctccctctcnntgggctgggcttgcaggggcccccncccanccccctctccnccnccntggccacgtcatcacccttctcctcggccctcntcncctccgccgccgccttcctcttcnccgccctcccccactcagccgatggggcctcntgcctncangctacctatcantacttcccccgcggggggggccnccncctanatctatttattntantgctatccantantactantantantgagatttgttcggtgctgtcntgtcntcctcccattttnggccgatctgngttccttagtacaaggaggggttctataccatgtcncggggtcnngtgtgtgatctcatccccc

SEQ ID NO: 53542 - DNA, 357 bp, Zea mays
  Clone ID: MRT4577_148833C.1
tttttttttttttttttttttttttcttgggtggttttataatttgtttgtgtttttttttttttattcacagtttttggaaaaagcaaatacaggccggggaaattacccccaacaacttatttgacaccgacaggggattgattccaaaagaaggggggaaaaaaccgggcggtaccccccccttagaagcctcctgccgggttgttctgggaaacaccatgactggtgattggagttttaaaaactctgacgacaagcccccgagcaaattggggggggggggaaaggggggcacttaacctgggccccaaagcccggggggaaatatggactggggggcgggggccgcccctg

SEQ ID NO: 53543 - DNA, 426 bp, Zea mays
  Clone ID: MRT4577_148834C.1
cagaaccataccaattccgggggcgaatcttgaggcattcgataggatcgtgcgaagaatcgcgagggtgcatgtatagctaggcttaccctgggccaaggcacaagaggggcaacatgagcggagcgagactggacggttgcacgttgcgacgagttcgatgtgaacgaggcctccttcgctcgcaggctgaacacacggtgcgcctaacaggactccaacgatgacggtgtgctcgccctggccgagactgggcgagcactcgagagcttccgactgctacactggggcagattaggatactacaaaggggcgccggtccgagccacagggatacaaactatacaaaggcgggtcggagcagatgaaccacgaccacagacgcgtccatgacagggcctagctccactataagatgcgctaaat

SEQ ID NO: 53544 - DNA, 405 bp, Zea mays
  Clone ID: MRT4577_148835C.1
cgtgcttacgctctcgtctcggctttgctgttgaaggaccagctgctagacgtggtgcactaatatccggagcatgtactgcacttcttcaatcgttgtatctatttataagttgtaatgttacttgaaaacagtgacaaggtaattatttacctgtctaagcagttgctgaatcaataaggaaaaaacacaacacatcatgataataatgaggcaatgcaaatacgacttttgtattgcttgatctagctagggtttgttactgcttgatctagccaggataagaatgccaaaacgatcccttaaattcaaaggccccaacgactgaatgaaagcagatccaaaaaaatgctcaaaaaaaagagcagttccacaaatgttccttcccctacctatggtgacctt

SEQ ID NO: 53545 - DNA, 322 bp, Zea mays
  Clone ID: MRT4577_148836C.1
atcaacgtacgttaacaacttcaactcgccgtcaagatgatgaagcccctgagacatgagatggccgagaccgggatcgtgcctgtcagagtgaccatacttgcttccgacatggtctaagcctatcttattgtcaagggtattttcgtggattgaggcacaaacttcgacgtgggggggttgcccaatcccatggaaaggccataaatattacgaagtgtttttagagggtctttctaggggtctacgctttaaactaagaggagcggtgaggagcagcttccttttatcgaagagatggaatatagtttggtttgtaatt

SEQ ID NO: 53546 - DNA, 361 bp, Zea mays
  Clone ID: MRT4577_148837C.1
cttcctcgatcttgtttctacttgaccagcgccgagggagtcgcgagagttgcgccactgccatcgcctgaccacaactccggaatgaagccgtcggagagagcagtcagcttcggcgcactctgcatcgtctcgctcgcgccaccaatctcagggtgctacctccccgacgccaagcgtcaatgacttcgataagacagatccacttcctgggcaagccaacaagctgacctcaatcaagtcacaactctccctacatcctactattctactcgcatgctgcaaggccctataccataggtggactgagcgataaagtctcgcgtgaatctcactcccgcgagaccgaagttgaaaactc

SEQ ID NO: 53547 - DNA, 405 bp, Zea mays
  unsure (1)..(405): unsure at all n locations
  Clone ID: MRT4577_148838C.1
gggcgacccacgcatcctctnataccttaatctctaccaaaactctcaattcttccctatccttcacatcttaagatgtgtttcatcactaaacaccctccacatctcatttatttatctttattctcctccaatttacaataacattacctatatctcacaccctacttctaaataacctcttatcataaataactttatacttcaaaccaacaaccttctattttacaaaaccaatattacttcaataaagcctcttatacaacttctcactcttaactcctttcaacattcaacactaatccatcatacttttagaacaaaacgctgcgcatttcaagtaatccgttaaaacacactctctccattctctataaatctacaaattccttgcactacaaacta

SEQ ID NO: 53548 - DNA, 858 bp, Zea mays
  Clone ID: MRT4577_148839C.1
atgtacaatcggttcaagatgatggtgaaccaagttcgcaacctcgggagcaccaaatggaccgaccacgaagttgttacactcatgttaaggtcactcatattttgcaatgctacacttgttcaagtattgcttgaaaatcctgggtacaaggtgatgacccccgaagagatgcttgggaagtttgtgaactttatgcttagggtcaaagactctagacatgtggaaaacattgcccaagacaactcctccacacccgagctgcaacctgttgcattcaaggcaacaaaagagaaggaggagaccactccaagcaaggggcttgtaatagacaccttcaagcttgatagtgaggagatggctctcattatcaaaagcttccagcaaatcctcaagcaaagtaagggcaaggactacaagccacactccaagaggttttgctaccgttgtggtaagttcagtcattacattgcaaaatatccatatgctagtgatgatgatagggacaatgacaagaaagggaagaagagaatagaggagaagaaattcttctataagaataaggacggcgatgcacatgtcaggagggaatgtgactccaacgagatctcctccgactcctccgacgaagacgtcgccaacatcgtcgtcaataagggccttatctgccccaatgttggccacaaatgcctcatggccaaggagagcaaaaagaaggtacaacctagagaaacccctaagtatactactttcgatgatgatggccttagcttccaacaatttgagaaaataaatgaactagtaaaaccattaacgagaaggatggactcttggaaagccaataggtctactcgttag

SEQ ID NO: 53549 - DNA, 1353 bp, Zea mays
  Clone ID: MRT4577_14883C.1
cattgggtacctcgaggccggccgggacagcatctcaagtcttcacacttcctcgccatcacataaaaccagtgcaagcagaagcagcgcaatggcgagcagcaccagtgggccctgctcctccacagccttgcgccggcaagggcatgtgaacgtgccccgtcgtctctcttcggcgagggcccgcgtgacgatgcgcatagacggctggcgataggcaatagccgtgcggcgaggctgggggggcgccgtggtaccggccccgaccgcgtgctctacctgggcccgctgtccggcgcgcccccgagctaacccttgacgggcgagttcccgggcgaactccggcttggaccccgcggggctgtcggcggacccgaagacgttcgccaagacccgggagcctggaaggtcatccacttccccgctgggccatgcctgggcccgttggcctgcgtgttcccggagccgctcgcccgcaacgagggtcaagttcggcgaggcccgtgtggttcaaggccgggtcggcagatcttcagcgagggtgggctggactacctgggtaacccggagcctgatccacgcgcagagcatcctcgccatctgggccatgccaggaccgtgttcaatgggcgccatcgaggggttccgcgtcttcggcgaggcccgctcggagaggtcgtcgacccgctctaccccggcggcagcttcgacccgctcggcctcgccgacgaccctgaggccttcgcggagcttcaaggtgaaggagctcaagaacggccgcctcgccatgttctcccatggttcggggtcttggttacaggccatcggcaccgggaaggggccggtccagaaactccgcgaacaccttcgccgaccccggccaccaccaccgcatggggcctatggcacccaactttggtgccccggcaaggggagggggtggaggcgccaccgcccaccggccaccggccaccgctgcgggatattctaaggtgttcgggatgcacgtggagcgcgcactgggttccagtttgtacccattatgtaaatttactttaccgtaccaggggtttcaatcggcaaggaagaattgttgtgttcactgtctcgggcagatctctacgtccaatattaaacaacttacacagcatctccaaaaacttctaaaattactagctgaatgcccgtgcgttgcaacgggaatatataataccagtatactacgataacttatatacaaaatgtatgttatatcgttatgagaaaatgtttcataaccaatttatgattctggccaaaaaaaaaaaaaaaaaagcggcctcaaaaaaaaaaaaaaaaaaggcccctagggcc

SEQ ID NO: 53550 - DNA, 1462 bp, Zea mays
  Clone ID: MRT4577_148840C.1
aattcggcacgaggaatccttgactcggttctctccatgagcttactgccccatctccatttcttcaatcattactcgcctttccgttcaagggcgttgcttgcctggataaccacggcatcgttctacccgccgggcccgagctaagtcatacgtgcaaacaaagagcagcaaaagaagaacaagtggggcgacagggacagggaggaggggaaggcagaggaaatggaagcctctttcttgaggaaagatggcggtgatcaagccagtgcggcgacaatgtccggcgagcacaggaacaagggccttgactgggatttgaacgactggaggtgggacgccaacctgttcctggccacgccggcggccatcgcgccatccgagtccatcagcagggagctgagccgaggtcagggggagatcgatttcggcgtcgtcgttgacaagaggcggcggctctcaccagaggaggacggcagcggtgggtgcagcaattctgcggtagcagatggagacaacagtcacgtggtgtgtgttcagagagggcggaacactgaggagacgagacccaggaaaggtgccaattcgagcaccactccttcttgccaggttgacggctgccaagctgatcttagtggtgccagggactaccataagaggcacaaggtgtgtgaagcgcataccaggacaacagtggtctgcatcaataatgtagagcatcggttctgtcagcagtgcagcaggtttcaccttcttcacgaatttgatgatggtaagaagagctgccgatcacgtctggcacaacataatggaaggagaaggaaagttcaaccgcaacctgctgtgaacgggaattccatgaatgaagatcagtctctaagtagcaccttattccttctgttaaaacaactttccgggctcgagtctggtagctcttctgagcaaatcaaccatcctaattctttggttaaccttttgaagaaccttgctgctattgctagcacacatgcatatcaagatgttctaaagaatgcaacttcaatatcatcaaatgatggtaataatgctgcaaatggctctataatgcatgagcaaaccatacggtcaattcctgtcaggagagaatcattagcagaagagcctgcggtgaaaagacgagtacaggactttgatttgaacgattcatgcattgaagaagccgagagccgaacagataaaattgcgttcaaactctttggaaaagagccaaaagattttcctgtttatctacgggaacagatcctaaactggttgtggcattatccaactgatatgtaaagttatattagacctggctgagttattctaactatttaccttgacctccctaattggatgtgtgatgagtttaatgatgacccaagttcatggatagaaaatcttattagctcatccaatgatggattctggagaacaggatggt

SEQ ID NO: 53551 - DNA, 378 bp, Zea mays
  Clone ID: MRT4577_148841C.1
tttttttttttttttttttttggttttttggttttttttttttttttttttttttttttttttttttttttttttgggaagcaacaccgtaacccgcctttttttttttaaaaaccccgggggcaaggggggggaataaacaacttttacaacatgggggggggaaaaccaaaaaatttttaaaaacaaacccccttaacccgttggcgggggccctttttggcaaatcacgggataggggcaacacactggcctgatgctgggtaataaaaaaatttttttagtactgggaaccctggtggcctttcttgcctttattgaactaaacaccgacctcttggaaatctttttagagccccgccaggtcctcaggggcct

SEQ ID NO: 53552 - DNA, 623 bp, Zea mays
  Clone ID: MRT4577_148842C.1
gataaagtaacgctggttgatactttaaaatgctaggtttcatatcaatccggtcacaactcacaactcacgatcaaccaagtacattgatttataattattcgcaggacctgtccaggagaatggtcagctagcggttgagcttgccgccggcgtgccgatccgcttgctggccgtgaacccaccgtcaaccacgagattatgcccggtgacgaacttggcctcgtcggaggccaggtagacggccgcccttgcgacgtcctggacctgcagcaccgcaccacggaggtcgctcatgccagtctccaccaggcgcttcagctgctcgtcggggacgcctgggtgcagcctggcgagggagcggagcagcagcggcgtggcgatggcgtgcggcgagatggcgttgacgcgcacccccgaccgcgccagctcgtccgcggcggcccgcaccacggagatgaccgtggccttggacaggctgtagggcagcgcggcgaggccgccgagcatacccgtagtgctccccgtgtacaggacgcagccggcgccctggggcaccatgacgcgcgcggcgtgcttgaggcacgccaccgcggcccgcgcgttgaccgccatgacgcggt

SEQ ID NO: 53553 - DNA, 2429 bp, Zea mays
  Clone ID: MRT4577_148843C.1
gttctgtcagcagtgtagcaggtttcagcttcttcaagaatttgatgaagggaagaagagctgccgctcgcgtctagcacaacataatggaaggagaaggaaagttcaaccacaagctgttgtgaatgggaattccatgagtgaaaatcaatctctaagtagcaccttaatccttctgttaaaacaactttccaggctagagtgtacagacatagtcattctaaatgtgtgcttgtatgggtggcagctggtagctcctctgagccaatcaatcatcctaattctttggttaaccttttgaagaaccttgctgctattgctagcacacagtcatatcaagatattctaaagaatgcaaattcaaattcaatattgtcaaatgatggtaataatgctgcaaatggatctactgtgcatgagcaaactatacggtcaattccaatcagtggagaatcattagcagaagagcctgctgtgaaaagccgagtacatgattttgatttgaatgatgcttgctttgaagaagttgagagccgaacagataaaattgtgttcaaactgtttggaaaagagccaaaagattttcctgtagatctacgggaacagatcctacactggttatcgcattatccaactgatatggaaagctatattaggcctggttgtgttattctaactatttacctccgcctccctaattggatgtgggatgagcttgatgatgatccagcttcgtggatagaaaagcttattagcttatccaatgatggactttggagaaaaggatggttgtatgctagggtacaggactgcctaacactgagttacaatggtagtcttatgtttgcatctccctggcaactggtaattggcgacaagcatcagagactgtgtgtaactcctattgcagttgctatgtgcttcgtctgtaaaagtctcagtgaaaggcagagctcatgtctcggttaccatgcccagcacaattgatactgtcggaaagcatgctagccgaatgaagcctgccgatcaaatcacatttggtgttgagaaaaaacaactaagcatcaaccaaacattgagctgcagacagtgtgtccagcaggcccagcagcttgcattccatccccgaacaaataaggtttctgtctaataggactgcgatgctttccttggtctccattgctgccgtctgcgtctgtgtgggattgatcatgaagagcctgccacaagttggttgtatgaagcctttcctctggggcaatataggttggggccccaattgatagactgcagaagagccagcccgatttgtatcaggtgtatgatgaagatgtttgcgccgagcgaagctagtttcttgtaatgtacatgtttctgtatactaaatgtctaacttatttctgtttatagtaaaacctgtgaacttgcctagcttgtaactccattgcatttgcatcctgactgaagtaaagcttttacttgttttaaaaaaaaaaaaaaaaaacaaaatgtgttgcttactgctgttaaaaaacgctcaaagcctttagttgagtttctattaagatacacagcaacagattatgctccagtgggcggtggagccggcgctccagttcagttcttgttcactcctgcgatgactggactgtcaaatatcacacctcttcatattgcagccacaatcagtgatgctactggtgttttggatgctttaactgatgatcctcggcagttgggaatcaaagcgtggaagaacgctcgtgacgccactggcttcactcctgaggaatatgctcgaaagagaggccacatatcctatatccaattggtacaggacaaaattgacagaagggtgagcagagctcatgtctcggttaccatccccagcacaattgatactgccggaaagcatgctagccgattgaagcctgccgaccaaatcacatttggtgtggagaaaaaacagcgaggcatgaaccaaacattgagctgcagacaatgtgtccagcaggtccagcagcttgcattccatccccggacaaataggtttctgtctaataggactgcgatgctttccttggtctccattgctgccgtctgcgtctgtgtgggattgatcatgaagagcctgccacaagttggttgtatgaagcctttcctctgggacaatatacgttggggccccaattgatagactgcacaagagccagcccgattgtatcagtgtatgatgaagatgtttgcgccgagcgaagctagtttcttgtaatgtacatgtttcttatactaaatgtctaacttatttctgtttatagtaaaacctgtgaacttgcctagcttgtaactccattgcatttgcatcctgactgaagtaaagcttttacttgttttggttgagaggaaaaaactaatcaaaaaaacaatct

SEQ ID NO: 53554 - DNA, 157 bp, Zea mays
  unsure (1)..(157): unsure at all n locations
  Clone ID: MRT4577_148844C.1
cagacactggtctcgagcacgagaagagctcctaactccatgctatatgtatcaccactantatctcgaggagcagcattgacatcctgagtgatgtgcagctgatcaagactggagacatagtgcgaactagcgaagcacgctgctggacatgctc

SEQ ID NO: 53555 - DNA, 2331 bp, Zea mays
  Clone ID: MRT4577_148845C.1
aaagacgagtacagtactttgatttgaacgattcatgcattaaagaagccgagacccgaacagataaaattgtgttcaaactctttggaaaagagccaaaagattttcctgtagatctacgggaacagatcctaagctggttgtcgcattatccaactgatatggaaagttatattagacctggttgtgttattctaactatttaccttcacctccctaattgcttgtgggaggcgtttaatgatgacccagcttcatggatagaaaatcttattagcttatccaatgatggattctggagaacaggatggttgtatgctagggtacaggactgcctaacactgagttgcaaaggtagtcttatgtttgcatctccctggcaaccggtaattggtgacaagcatcagagactgtgtgtaactccaattgcagttgattgttcttcgtcagtaaaattctctgtgaaaggtttcaatatagttcagccaaccacaaaattactttgtgtgtttgatgaaaaatatttaattcaagaagagacacaaatgctacttgaagattcaactatgcagcaaggccctcaatgcctgaccttctcttgttcctttccttgtacaagtggaagaggattcatagagattgaagactatgatcaaagcagcctttctgttccctttgttgtcacggacaaagatgtatgttctgagattcggatgttggagcatggattggatttagtttcatttgatcaaacctccaaaagaatagatgatctgatgatttatcgcagtcgagcattacattttttgcatgaaatcggatggcttcttcaaaggagccatgtgcgagctacgtctgagcagcgacaatattgtcctgaccgcttccctgttgcaagatttagatggctgctatcctttgcagttgatcaggaatggtgtgctgttctaaggaagcttctgaacaccatgttccagggtgatattgatgtattgtcaccaattgaatttgccttgggagaaaatctattgcatactgcggtcaaaaaacgctcaaagcctttagttgaatttctattaagatacaccacaacaaatattgctccagtgggcggtggagatggtgctccagttcagttcttgttcactcctgcgatgactgaactgtcaaatatcacacctcttcatattgcagccacaatcagtgatgctattggtgttttagatgctttaactgatgatcctcagcaggtaactactctaaattgccatgttcttacctgttgtagcctgctttaactaaaaaaaagcacatctacattcaaatttcaaagtagcagatttccgattcttagtgtaaaacagttaaaataaaaactaagaccaccatttattgttagaacctaagtctgcacctgaaatattttcatctgaaatgcattatgtacatatcaagaaaaagaaaggacttccatcaaaacattggtttgtgtattacattgattgttgaatagatcgtgtagggtgtataatatcacatcagagttccgcatgaggtgtagtatgataaaaattcatttaccttaaaaacattttcttttacttttgagaatttgtgcaagcactgaaacatttgctgtctggcttctttctgcctaaatgtctcagttgggaatcaaagcgtggaagaatgctcgtgacgccactggcttcactcctgaggaatatgctgcaaagagaggcaacatatcctatattcaaatggtacaggacaaaattgacagaagggtgaccagagctcatgtctcggttaccatccccagcacaattgatactgtcggaaagcatggtagccgaatgaagcctgccgatcaaatcacatttggtgttgagaaaaaacaactaagcatcaaccaaacattgagctgcagacagtgtgtccagcaggcccagcagcttgcattccatccccggacaaataggtttctgtctaataggactgcgatgctttccttggtctccattgctgccgtctgcgtctgtgtgggattgatcatgaagagcctgccacaagttggttgtatgaagcctttcctctgggacaatatacgttggggccccaattgatagactgcagaagagccagcccgattgtatcagtgtatgatgaagatgtttgcgccgagcgaagctagtttcttgtaatgtacatgtttcttatactaaatgtctaacttatttctgtttatagtaaaacctgtgaacttgcctagcttgtaactccattgcatttgcatcctgactgaagtaaagcttttacttgttttggttg

SEQ ID NO: 53556 - DNA, 558 bp, Zea mays
  Clone ID: MRT4577_148846C.1
ccgggtttaaaaaaaaaaaaaaaaaaaaaaaaaaaaaaaaaaaaaaaaaaaaaaaaaaaaaaaggggagccgcgggatcccacaccccccgagctcagtttagctccactccagctccaatcgcagtcgtgaccagagcgagagccagctagctagagggccgggaaaatgccgatcaataggatcgccctggggagccaccaggaggggtaccacccgggggccctaaaggcggcgttcgctgagttaatctccaccctaattttcgttttcgccggccagggctccggcatggccttaagaaagctgaccggggggggcccgacaaccccggggggcctgatcgcgggggggggggcccacgcgttcgccctgttcggggcggtgtcggggggcgcaaacatttccggggggcacgtgaacccggccgggaccttcggggccttggggggcggaaacatcaccctgttccgggggctcctgtactggggggcgccactgttgggggtaaccggggggggcttgctgctggggttgtgagaggggggggagggtagg

SEQ ID NO: 53557 - DNA, 1470 bp, Zea mays
  unsure (1)..(1470): unsure at all n locations
  Clone ID: MRT4577_148847C.1
aaaattactttgtgtgtttgatgaaaaatatttaattcaagaagagacacaaatgctacttgaagattcaactatgcagcaaggccctcaatgcctgaccttctcttgttcctttccttgtacaagtggaagaggattcatagaggtacaatgtttgtatattttttatatcctcattttttgtgtatattacagacttgactccgttttcagattgaagactatgatcaaagcagcctttctgttccctttgttgtcacggacaaagatgtatgttctgagattcggatgttggagcatggattggatttagtttcatttgatcaaacctccaaaagaatagatgatctgatgatttatcgcagtcgagcattacattttttgcatgaaatcggatggcttcttcaaaggagccatgtgcgagctacgtctgagcagcgacaatattgtcctgaccgcttccctgttgcaagatttagatggctgctatcctttgcagttgatcaggaatggtgtgctgttctaaggaagcttctgaacaccatgttccagggtgatattgatgtattgtcaccaattgaatttgccttgggagaaaatctattgcatactgcggtcaaaanncgctcaaagcctttagttgaatttctattaagatacaccacaacaaatattgctccagtgggcggtggagatggtgctccagttcagttcttgttcactcctgcgatgactgaactgtcaaatatcacacctcttcatattgcagccacaatcagtgatgctattggtgttttagatgctttaactgatgatcctcagcagttgggaatcaaagcgtggaagaaagctcgtgacgccactggctttactcctgaggaatatgctgcaaagagaggcaacatatcctatattcaaatggtacaggacaaaattgacagaagggtgaccagagctcatgtctcggttaccatgcccagcacaattgatactgtcggaaagcatgctagccgaatgaagcctgccgatcaaatcacatttggtgttgagnnnnnncaactaagcatcaaccaaacattgagctgcagacagtgtgtccagcaggcccagcagcttgcattccatccccgaacaaataggtttctgtctaataggactgcgatgctttccttggtctccattgctgccgtctgcgtctgtgtgggattgatcatgaagagcctgccacaagttggttgtatgaagcctttcctctgggacaatatagttggggccccaattgatagactgcagaagagccagcccgattgtatcagtgtatgatgaagatgtttgcgccgagcgaagctagtttcttgtaatgtacatgtttcttatactaaatgtctaacttatttctgtttatagtaaaacctgtgaacttgcctagcttgtaactccattgcatttgcatcctgactgaagtaaagc

SEQ ID NO: 53558 - DNA, 285 bp, Zea mays
  unsure (1)..(285): unsure at all n locations
  Clone ID: MRT4577_148848C.1
ttattcttgtttttaccncacgcgatgaataacatcatctcatggactgcactttttgttttttatggacagaacgcctgcaccccggaggctgtcagggtgttctctgagatgcaaagagatggcattgatcctgatgatttcaccctaggaagtgttataagttcttgtgctaacctagcaagcctagaggaaggagctcagttccactgtctagcgcttgcgtcaggattgatgcattacatcacagtgtccaatgcactagttaccttgtatgggaagtgc

SEQ ID NO: 53559 - DNA, 623 bp, Zea mays
  Clone ID: MRT4577_148849C.1
gccggccgggtcgggaacttcttaccatctccctctactgtatgccgacccgcacactgatccctccagcgcatggcagccgctagcagctgacttcacacgtacatctcgttcgagatgcccgggaaccagagtaaacatcgccttcgttaccgccgtggagggatgctcatgcatcaaacactacgaggactacgactacaacgaggaggtaatcgaagactccaaggagcggaacctcatattctcgcccgcttcacgccgcaactactccgcctcgactcatacgcaatcatccgccgagaattacaaacacgaaaactcagaatagacgacactagcgtccagatcaatataagccacatcgtcgcttgtaataggtactaatgctggaatatcgcttaatatagacgcgcgctgggaggtatgctggactactacatctagcctgatactatcatattccatacacatatccaccatagtatacatgactttcgagaccatgctgacactaacatagcgataatgatcaatgtgaactagatagaattcgaccaccagaatcacgcgagcattgataataatgagtgatgatgcgtgcttgtgatcctcttcttctt

SEQ ID NO: 53560 - DNA, 633 bp, Zea mays
  Clone ID: MRT4577_14884C.1
cccacgtggccgcccacgcgtccgcccacgcgtccgaaaaaaaaaaaaaaaaaaaaaaaaaaaaaaaaaaaaaaaaaaaaaaaaaaaaaaaagggaaaaaaaatataaaaaaaaaaaaaataaaaaaggggggccgccttagaggtacctcttttatggcgccccctatgttccgttttctgtcctttgtggggcgccctctttttttttttttgccccggcgttccccaacgttgtggctgggaaaaccttgcggtttcccccctctgtcgttttggggaggaggccccttccgccggctgttgcgaaaaggtgggggcccccactgttgaccgttccccgccttgtcccgtcttttttggggcgggggacgcgccgtgtccccgccccttaacccctccccttgggggggtcctaccgggcgggccttttgctttctcccgtgcctttctccccgcggttttgggtttttcccctccctttttggccgggcggctcgttttacgcccccaatttctggtttgttggctccttttccggttccattttggtttttttgggggcttccgccccgggaactttttttgggggatggtttttcggccctgggcctttgccttccatcgccctttt

SEQ ID NO: 53561 - DNA, 2010 bp, Zea mays
  Clone ID: MRT4577_148850C.1
tcgttacgacgagtcgacgcggtgccgtgccgtgccgtgtcgtgaccggccctgatacaaagcgcttcggacaaacccgacgaactcgatcgcttggcccaaataagttcattggcaccctcgaggcccgcccggacacatgcagctccagcatcggtacggcactgagcatcggtgaggcaggcgacgcgcgccgcgcgagagaggcgcctcgcctggggagacagggagggtggccgagcccgagatggccgccgcgagggaggaggacgaggcggcacggccgctgcttctgctgccgcggacggcgcaggaggaccagaagtggtggaggcggtgggcgcgcgaggccgggtgggtggggtacctggccctgcccatggtggtggtgaacctgtcgcagtacgccgtccaggtgtcgtccaacatgatggtggggcacctccccggcgtgctcccgctctcctccgccgccatcgccacctccctcgccaacgtctccgggttcagcctcctgatcggaatggcaagtgcactggagacgctatgcggccaggcctacggtgcgaagcagtaccataagctaggcctagacacctacagagcggtcgtcaccctcctggtggtctgcgtccccctctcgctcctctgggtgttcatggacaagatcctggtcctcataggccaggaccctctcatctcgcaaggcgccgggaggtacatggtctggctgatcccggggctcttcgccaacgcggtgatccagccgctcaccaagttcctgcagacgcagagcctcatctacccgctgctgctgtcgtccgcggcgacggcggcggtccacgtccccctgtgctacgtgatggtgttcaagaccgggctcgggtacacgggcgccgccctgaccataagcatatcgtactggctgaacgtggccatgctcgtcggatacatcgccttctccagctcttgcaaggagacgcgcgcgcgcccgacggtcgaggtcttcaggggagtcgacgcgttcctgcgtctcgccctgccttctgcgctcatgatgtgtcttgaatggtggtcgtttgagctccttactctcatgtcagggcttctacccaacccagagctgcagacctcagtgctttcgatctgtctcacgagtgtaacattactcttcactataccttttggccttggagctgctggaagcacgcgagtggcaaatgagctgggcgctgggaaccctgacggagctcgatcagcagtccgcgtggtgctgtccatggcggggatcgacgcggtcgtcgtgagcggaagccttctggcggcccggcgcctcgtgggcatcgcgtacagcagcgaggaggaggtcatatctgcggtcgccgccatggttcctctggtctgcatcaccgccataactgactgcctacaaggaatcctctcaggcgtcgcccgcgggtgcgggtggcagcacctgggcgcgtacgtgaacctcggctcgttctacctgctggggatcccgatggcgatcctcctcggctttgtgctgcgcatggggtcgagggggctctggatgggcatcgtctgcggctccctgtcgcagaccacgctcatgtccgccatcacgttcttcaccgactggaacaagatggctgagaaggctagagagagggtgttcagcgacaagcagccacaagagccggggccatgatttgtacgccgactagcggcagctgcacatttttccagaccggttttgcaggggatcggaaggcgtttgcttgtcattccgtcgcattcacgaggagggagggggtcatgcctccctcctgcaaagtttctcacaaggcaaatgggttcttgctttgaacttcgccttcctacgtttgatttttgtatcatgtaaagtggagaggaacatggaacgaacaaattggacctcatatatgactaacaaggcgaaaatcatctcactaaaaaaaaaaaggaaaaaaaaccactcgagggggg

SEQ ID NO: 53562 - DNA, 220 bp, Zea mays
  Clone ID: MRT4577_148851C.1
cggaccccaggggcgaccggtgaattcttaaccggggcctggaggcataccagcaaaccctatccggagccggagaggagcctggcgtaaccacgggaaaagcggtatccagcgtgaaagagtgatcggcttacaagtccacacaggcaaaagagacccaccgcctaaaatgcaaagccgggggcgcccagggagcgaaacaaccaacacacagggagcc

SEQ ID NO: 53563 - DNA, 229 bp, Zea mays
  Clone ID: MRT4577_148852C.1
cccttctacttattttttcatatccatcacccagatcggcgaatctaaaacgcgcgccaaacatctaaccatcataaagctaaaatcatacgtcttaatcctctttctcactcattaactaccatctatctataatcgcggatgcactttacagaatcttatttacacacttctattaattatatttatacgcctcgtcgtcgtcgtcctctcaactctcgtgcgccat

SEQ ID NO: 53564 - DNA, 179 bp, Zea mays
  Clone ID: MRT4577_148853C.1
agggggatgcgggacactatacagaatgaacagatacctttgccaagacattacctacgttcatgtagaccctcgaaagatacagaaccacatggaaggatcactatctcgatccaaggacgggacttttctataggggggttgccccaaggggcagaagggggggggaaccaagccag

SEQ ID NO: 53565 - DNA, 362 bp, Zea mays
  unsure (1)..(362): unsure at all n locations
  Clone ID: MRT4577_148854C.1
agctgatccttaagtcaccacgcgtcgcggaccgtgggcgacaaactaggtgggtaccgccgacgcgcgcgcgccgccgcccccgtcctactgcangtgcgaggccttcatcggtatcttaacaagcgacgagcaaccaggctggactctaccaagggggggccttccggcaccggttccgggggcttcccggggctcttccgggccaaatcgtgcttggcttgttaaccgaacttcaacttgtttggccggttggcgccttttaatgggcttcggcaaaataagaaccggattcttaacggtcgtgccaaaggtggcactggcgtgcaaaaaagcaacacttgtgatgaatgaaccaaaaa

SEQ ID NO: 53566 - DNA, 416 bp, Zea mays
  Clone ID: MRT4577_148855C.1
ttaccaaaaagaaaaaaaactgcaattctgttgtaaagttagttcgtatgtttgggagccatgtaatgtagccaaaggccatgaaaccgattttcccagagtatttgtgtacatttgtttaaaaaaaaaaaaaaaaaaaaaaaaaaaaaaaaaaaaaaaaaaaaaaaaaaaaaaaaaaaaaaaaaaaaaaaaaaaaaaaaaaaaaaaaaaaaaaaaaaaaaaaaaaaaaaaaaaaaaaaccttggggggggggcccggacccaaattccccttaaaaggggggaaataacccccccttatgggccgttttttaaaaaggggggaagggaaaaaacccgggggtacccaaattaaatccctttgaaaaaaaacccctttttccaaggggggaaaaaaaaaaaaaggccccaaccaat

SEQ ID NO: 53567 - DNA, 369 bp, Zea mays
  Clone ID: MRT4577_148856C.1
aactttattcaatttttgttgtttaattgatcaaattcaattctttattatcattaagggagattccagcatcaagttaagaatttgaacaaaaaaatgtccatgcttttaagttttttgttggcacttatgactagtgcagttttttccttatgcttgtactccttttggatcatgtttttaactttttatttgatgaaatgctcttttaagatcatgttcccttcaacgctacttggaactggggaaaagtggacaatgatgaagacaataagtgttactgaatatttaaattatgaagcaggaaaattttcgaagagtaaaggtattggagtctttggtaatgatgcagaggatacaaataatcct

SEQ ID NO: 53568 - DNA, 820 bp, Zea mays
  unsure (1)..(820): unsure at all n locations
  Clone ID: MRT4577_148857C.1
cctcgagccggccgggatatcctgacttcgacaactcgtcatcctcgcccaacatgctggtcgactacggcaacgaccacggtaacgcgcccaacctacaccatcaacccgatcccaactcccccacacagcgacccgcccggcaccatccacgcccctacgccctcccttggtaccaggacacgctctggggcgggctcatcaacaaactctccaagcgcagagcgttgccgttccccgaggagcgtgatgactttgtagcgcccgaagagtatctgcctggttacaagacgcgcaaccacggcaccaacgccgccgccggccgaagcggatcgcacgactcgcgcgtttcgggcgcagagtctgagacgacgcatgttggaagcggtacgccgaaggagcccaagacgggcatggtcgaggccaacaactcctcctcctcctcctcgtctcagcagccctccccgaacaacgccggcagcgacgacgagaagaaccgcgaaacgccccccgacaacctcgaagactcctccgacccctacctcgtcgactggaacggtccctctgacccggacaacccgctcaactgggcgcccgcacgcaagttcttcgtcaccgccctcctctgcctcctcacattctccgtctacatgggttcggcgatctacacgcccggtgtcgaactgctcgccaactactttggcgttggtgtggtgcccgctactctcggnctgtccctcttttgtctcggttatggactcgggcccgatggtggggttgagctcggcatccgagatcccagctatcggtcggtcgatgc

SEQ ID NO: 53569 - DNA, 1267 bp, Zea mays
  unsure (1)..(1267): unsure at all n locations
  Clone ID: MRT4577_148858C.1
gtgatctcatgaaaccacanacgagttcagtaaagagaacatcattggtactgggaggacagggactatgtacagggcggtgctgcctgacggctccttcctagccgtgaaaaggctacaggactcgcaacattccgaatcacagttcgcatcggagatgaagacacttggccaggtgaggcaccggaacttggttccgctcttgggattctgcgtcgccaagaaggagaggttgctggtgtacaagcacatgcccttgggctcgctctacgaccagctaaacaaagaggaaggtagcaagatggactgggcgctgaggctacggatcggcatcggtgcagcgaaagggcttgcgtatctccaccatacctgcaaccctcgagttctccaccgcaacatcagctccaagtgcatcctcctggacgaggactacgaaccaaagatatcggacttcggtctcgctaggctcatgaacccaatagacacccatctcagcacctttgtcaacggggagttcggagacctcggctacgtggcgccggagtacgcgcgtactctggtggctactcccaaggcgatgtctacagctttggcgtggttctccttgagctcgtcaccggtgagaggcccacccacgtctcctcagccccggagaatttcagaggaagcctagtggaatggatcagtcatctgtccaacaacgcactcctccaagatgctatcgacaagtcgctggtggcgaaggacgctgatggtgagctgatgcagttcctgaaagttgcgtgttcctgcacgctcgccaccccgaaggagaggccaaccatgtttgaggtttaccagctcctcagagccattggcgaaaggtaccatttcactgccgatgatgacctggtgctgccacctcttagcacggacagtgacggtgtgacactggacgagctcattgttgccaagtaattgcaaaatcatacttatgtagcagaagacaaaacaagactgaacgtcttctttttcccccctccaagagagttatagtaatgatgaagtgagtaagatggcttataagatgtatgttccaattagtagcatcccgctgtatagttgttgtagcgtggttggtagttggtacccgccctttggagatgatagtagctgtaaaggataattttcatgtaaccaatttggggacgagacacatgttacttgtaagtttgttacaggtaaagtcatttcatattaaactgatatgatcatattggatttaaaa

SEQ ID NO: 53570 - DNA, 268 bp, Zea mays
  Clone ID: MRT4577_148859C.1
aactgcatccacgcactcgtgatatctcttttattgtgctacctaaattcaaccaactgctggcttttatacacccggaagatctgcataaaaccctggcgcttcccaactggatacccgtacgcaccattacgcatattgtcagcccacttgctagacaagaggcccgtcacactatgctgttttctacagctataccatcctcaatgttacaatgagacacgcacctgtagtcgtgatatcaattcgcatctggatgtaggagtgt

SEQ ID NO: 53571 - DNA, 253 bp, Zea mays
  unsure (1)..(253): unsure at all n locations
  Clone ID: MRT4577_14885C.1
tccaattccacataatccattgcnaaacatcccgtctnttttcaaattttttgcccggaaacacancncctaaactcccacttcaatatatccttcttcancattggttcaatatcgcggaaccctctnattttattcttaactgattataaaaaagcccttattcaactctttctacctgctcaacctccaaactccattcacattctttgcatctgaatacagctccttcatcttgctaaaacaaaaacta

SEQ ID NO: 53572 - DNA, 272 bp, Zea mays
  Clone ID: MRT4577_148860C.1
ccttttgaatttttgacaaacccaaataatgtctcaggggctacttatgatatatcggctcaaaaaacatctaaacaaccttaactaatcaaaaatatgaattcaatactttattcctccataaatatatgaacatattcacaattactgcaaatagaatatgctacacaagcgattgtgacatactacaccccaggcaactcttgtttgaattacagcctaaaattacaaaacgcactcttgccatgtttaaattaacattaaaaccataa

SEQ ID NO: 53573 - DNA, 231 bp, Zea mays
  Clone ID: MRT4577_148861C.1
cggccgctaccaatgtataacttacggtcggataggtgcacctgatacagggagctccgactcaacccccatgatgtcagcgtatggttacacaagaacatagatcacgtcaagagccccctggtgaaggaggacttcgccaacttctaacaggctcatggaaggtgccattcttaaaaaaaggaaccttgagaaccaggggataagggtcaaggacaaacttgttctccc

SEQ ID NO: 53574 - DNA, 238 bp, Zea mays
  Clone ID: MRT4577_148862C.1
agcaccggactggcttctaatatatagagggagagctccgggacatcatacttgacatgctatagccaagggtaaggcaacaatgccacaaagtccacacgagggaaggacaccattgatgaagcacgagcggaagcaagggggcacacatgaggctctcatcttaagcggccatggccgaccagagtcgaagctctctacccatactgagggcccccaactgatcataacattgggc

SEQ ID NO: 53575 - DNA, 354 bp, Zea mays
  Clone ID: MRT4577_148863C.1
attcggctcgaggtcgaacacagtttttttctacagatcaatgcacggtttaccagggggcattttacgactgatgttgatctcttcctcaccatacgaaatcttgactaatagctagacacagggctccaggctctggcccatagattgcggggggaggaaggacatgaccaccctccctgtgactgtgattcaggcttataggaagaagctgccgaaaatgttgatggagttggagagcgagaggaaggacatggtggtggcgccgcttaatgatccgggtcaaccccgtgccgatttgcggaggcctgcgcgcgcagtctcagtggggggatctcgcagcattagacccat

SEQ ID NO: 53576 - DNA, 904 bp, Zea mays
  Clone ID: MRT4577_148864C.1
gcacgagcggacttcccggccggggcccgtcgccaatattcggacggttcaccgggccggccccgctctgctctccctttccaagggccgccgcatccactccgccccccgcctcgcagtgcctccccaccgccctccgcgcccggcaggcgacgtcccgttccagatccaggattcaaacaaaccagtacattaccaccatggttcttgattcattatcatcacctcacaggaggtcccaaaacacattcttcgtgtcatctgcaaaaaagcctcagtcatctcgtgacgacagttggtctgcactggttgagcgacaccggtttctcctgacgacactccttgttcttgccttcctgtgcactgtctatctgtactttgcagtaaccttgggggcatcagatgcttgcactggattgacaggagcagagaggattgagtgccaggcaagatcagtgctgcaacatggaaagttgaaattccgatgactttggagactcattgatgaagaccaaattattgagttttatatgcactcgggtcacatgacaaattcttgataccatgtatctgtatatggtggggtggctgatgttattggaccacaaaatttgctgtactggtagaggcaaatctaatagttagggttgagcttgtggaaacgggtatactggggtaggcccatattgttcttttaccttggtgtgcgaaaaacatcatggcgtctgtaattcttccaggagatattggtattgtctcccttgagacatactcacagttaatttgaaaccatgctaccttgagtaccgttaatccaaaaaaaaaaaaaatttcccagccatgaatttttttagccctgtacagctcaaataaaaaaaggcccaaagaaaaaaaaaagcggccc

SEQ ID NO: 53577 - DNA, 278 bp, Zea mays
  Clone ID: MRT4577_148865C.1
ggctgtgcgaagtttaactgtgcatctgaacaggtgacattcaaacctggtggcaggaggacccgatttctgagtacgccctgcttggctctttgtgtgtaacaccttcactccttcgcttgtccttgtgtttctgctgcttggatctgatgtttcacgcagtccattttcatttgtctctttttgtatatcatctactcagtggcttggctggattactgttaccctcagaagtttgggcccccacattaattatgataaaaaatgtcaaaataaca

SEQ ID NO: 53578 - DNA, 127 bp, Zea mays
  Clone ID: MRT4577_148866C.1
aaaggggccctttgggtcgaagccaaacggggaacactttccctaaggttcatcgttcgaattgaagaaccaaccttagacacaaaaatttgggaaaatttcacaaggtagccattcaaaccaaaca

SEQ ID NO: 53579 - DNA, 227 bp, Zea mays
  Clone ID: MRT4577_148867C.1
caaagaacagggtagcttgaccttgttggactgtctgtcagcaaatgcgcccttctcgctgacggcgatgcatgctctgcctgaggctgtgttttggttggtggtctgcagatacggaggtcctcctaccacgacgtgatccgggtgtcggagatccagaaggtgctggacatcagcggcgtgcagacctacatcatcaacagcgcgcgcgtggtgttcctgaacga

SEQ ID NO: 53580 - DNA, 325 bp, Zea mays
  Clone ID: MRT4577_148868C.1
tgggagactgggagggcgcatagcacatgcatctatgtcgactcgcggagcgagaactgcacttgaacactagagacacaagtggtcgcttttgcctaagatttgccaaggacgtgccataaatagcgtttacagcacaaaacggcggactgaagctttgagctgaaaactcaggctacacgacagtaattgaaacatgaagggggaaaaccacttacacagggtgcacgaaccaaaatttatttggatgctgttattaatcgaaaacacctgtgttgccatgaccggaaggatataattacatgtaaagaagaacattgaaaat

SEQ ID NO: 53581 - DNA, 313 bp, Zea mays
  Clone ID: MRT4577_148869C.1
gggagaaaaatttcaaccttattttgggcccctggttttgttaccccaaggggtcaaaaaaccagggcccaaaaaatcccaaagacccccctaaggtccccggctgaaaactcggcagggatggtttccctaaaaaaagaccgttggaaaaaaatttcccccccccaaagggttcccccgttttacaaccaatcccccccggtggggtggcctttcaggatttgttaaacccaacccaaaacccccaaggggggggggtcccccccaccggggaaaaagcccccccctttactttgggggctttaaaagggga

SEQ ID NO: 53582 - DNA, 182 bp, Zea mays
  Clone ID: MRT4577_14886C.1
gtcaaaggcattacacagaagatgtaggaagagctgcctctaccagaatgtgggcgtggtttaagaatggatcgacaccgtacttcacaaatcatacctctatctacaaatggaatcctagggagacctatccacccttgattacgttaacgtctacttcacctattcagccaacttttttt

SEQ ID NO: 53583 - DNA, 174 bp, Zea mays
  Clone ID: MRT4577_148870C.1
acgatttctttctactataagggcgctaagatgattgactgctctgatcgagacctgctggtaaaacccgacctcctcgacggacaaccgagaatgcctactgaacagaggcggtggtgtgaggtggtggttactgacatagttagttctttagattgagagactggagaacat

SEQ ID NO: 53584 - DNA, 302 bp, Zea mays
  unsure (1)..(302): unsure at all n locations
  Clone ID: MRT4577_148871C.1
ctgccaaacacattttttaacataaaacaaggcccaagacatacaaacaaagaggaagtccacaaagggtacatggtcatcattgttgaaattgacctttattacaaaaacccagggaactcattccattcacatgggggcttgaaagcttggggaacccccntanaatntcttctttgcatccaaaacaatcttccttttaaacataacacattattacttaatataatccaaccatttattgtaaccaactttccttgataaaccaacccgcacgatttatttctttttttgagcaccct

SEQ ID NO: 53585 - DNA, 367 bp, Zea mays
  Clone ID: MRT4577_148872C.1
gccggccggtccggacgtcgtaccatccgatctgccataaggacatgacagtggtgtttaatgtagagtctcttaaggtgtttaagagggttatttgcaaaaaaaaaattttagaaccgtctctccgtgaagagacgcttctggctcgtaaaccaagtagcaacagacgcctcacttcccactgtacgaatttgtcgtctgttctatcgatctgatgctatacaaatacatttaattctgtatttattaatagactatgtttatagacactccattgtacaatagagtctcttagttgtctcctgtgattggagaaccgttttggtgtctctccactgcaaaaaaaaaaaaaaaaaaaaggccccta

SEQ ID NO: 53586 - DNA, 436 bp, Zea mays
  Clone ID: MRT4577_148873C.1
ggcgctacgcacgcgaacccaagctccgaattcgagccaacagaactgcttctcgttgccttcgttctcctctctctgctgccttcgtcttcctctcattcttccctagatctctcctcttctccattccctagctgtagctaacacttgctggccatggtcgcgacggtcgccctctccgtcgcgcgtcgcatctacgctggccaccccgtggggtagaaggaacaggccagccacaaccctgacgcctttctccaaccttgcaccctcttctggcgccagcagaaggaggagcggagccacgttccccgcgttgccgctcctgtcttggatgccgtcaccggccacacgtccgccggttcggactgtgcagagcccccagagctttggtgccagtctagagaagcccctatcgcgccagcgagtgcggacgctg

SEQ ID NO: 53587 - DNA, 247 bp, Zea mays
  Clone ID: MRT4577_148874C.1
aaaacaaacaagaacccctatcaattaaataaagggtcaggcccgaacctggccccggggaaaggaaacccggaaaccccaaaagggggggggggggcaaaattatccctggaaaccaaaaaaaaaaaaactggggggggggtaccagctctaccctatggggggcttcccattccccgggtaaaaacaggaaaaaccccctggcaggccgaggcgaagaaagttaggggcaactggcaagcccact

SEQ ID NO: 53588 - DNA, 290 bp, Zea mays
  unsure (1)..(290): unsure at all n locations
  Clone ID: MRT4577_148875C.1
gtttgttttttaaccaaaacatatacttcagactgcataccaaagaaatggctcgcttaccttcacagcataaaccaacatattaaacctctggtacccctacaagccattaccattttcatacaaaaaagcaacaattactcatttttggtgggggggggggcactttcnctntaaccacatacaccttacaaanatcccaaaacactaaatattcttaaccanacntctcatcaaaaaccttcacctctacacaaatctttaacctcctcttaaccaaactctccctc

SEQ ID NO: 53589 - DNA, 1711 bp, Zea mays
  Clone ID: MRT4577_148876C.1
ggaccctccagccttccggggtcgcctagagggggtggatagacagcctcgaggccggccgggctattcctcctcagataccccttcttccttcgtcattcctccgtccccattgatccccttcccccctccactcgtctcccaaatcgccagcgagcgccatgccgccgcctcccctgccctcgccgcccctgaccggctgacccgacctccccactgttctttcccttccacctgggcgccacagcgtttcccttcccgtcaccacgaaatcccggagggacgaggagggagttcgtcgcctgatcgatcggccgatccacgccgccggcctcccaatccttcgctgccgccatgttcaacaagataatcaagaggggaaaccgcaagggcgcgcgcggggacagcgcggaggtcgccgcgcgccccgcagcgccctcgtcgtcctccgggagcggcggcggcggcgcggggggagccgcgcccgtcaccgtcaaccacgcctcccgggccacagcgccttctccgtcgtcgcccacttctccgcacgtcgcgccgtccgcgtttgcgaccaacccggcggtgggggcggcgtcaccgccactcctcgagccgctcccgctcctccgcgacgtcgccgccgcagaccgtccgggcctcatcctccgcaagctccgcctcgtcgcggcgctcttcgacctctcggactcgctcaagcacccgcgagagaaggaggccaaacgccaggcgctcctcgagctcgtagattacgtgcaggctccagctcaggccgcgggcgccaacgcgcccacgcgcctcccggaccacgtccaggaggcgctagtccttgccatctctgccaacatcttccgcccgctgccacccgcgctgcacgagtccgccgccgcgatcgaccccggcgccgcgcccgacgacgacgaggagccatacctggacccctcctggccacacctccagctcgtctatgagctccttctccgatacgttgtttcgcctgacacggacaccaaggtcgccaagcggtatgtggaccatgctttcgtcctccgcatcctcgacctctttgactccgaggatccgcgtgagcgggaatacctcaagaccgtgctccaccgcatctatggcaagttcatggtacaccgaccattcatccgtaaggccatcaacatgtgttctaccgggtcatctttgagactcagcgctacaatggcataggggagctccttgagatccttggagcatcattaatggatttgccttgccaatgaaggaggagcacaagctattccttgcccgtgctctcatccccctgcacaagcccaaatctgttgtgatctaccatcagcagctatcctattgtattgttgagttcgttgagaaggactacaaattagcagatactgtgattaggggtctgctcaagtactggccagtcacaaattgccagaaggaggtgttgtttctgggggagcttgaaaaagtgctcgaggcaacacagcctgcagagttccaacggtgcatggtgcccctgtttaagcagattgcccgatgccttaacagttctcacttccaggtatggctttaattgattttttggcttaagtttaattatattgtcttcaacatccctttaaggttttgtttttagtcaaaaaaaaaaaaaaaaaaaaaaaaaaaaaaaaaaaaacac

SEQ ID NO: 53590 - DNA, 500 bp, Zea mays
  Clone ID: MRT4577_148877C.1
ggacttttgggtcgatccacgcgttcgcagagtacttctcgtcgtctctcatgctgttcgcggacgagttcattccgttccactacgtggagatccggctgtggcaggacatcaagaacccctgctgcgtcaaccacgaccccatcttctaacagcttcatgtctgccgctcgtacgaagtgctggttttcccggacagcgttttttacccgcttaattttgcgcccacgctcgaggccaacgagaaggagctcgccaacgggaggttggcgatgctggcgttactgggctttctgatctcatcacaacgttaccggctaggggcccttcgtcaacctgctgcagcacctgtttgacccatggcacaacaccattatccaaaccttttttggttgagtcgaggtctaggaggtatactacctcttgctggtgagctgatttggactggaagacaaacattgaaaccttaagtttctttctggatcagtctgtgtgtgtta

SEQ ID NO: 53591 - DNA, 191 bp, Zea mays
  unsure (1)..(191): unsure at all n locations
  Clone ID: MRT4577_148878C.1
naacctcttttccaaaaggggagctacgctacccgcctttcctcaacgaaaaggtctagctcccggtacaggtccgagtgtgcagctgtgcgtaagagcccgcctggcaagactactaccgtcgatccgcatgctgctgacgccagtgacagcgcaatggccgaactcgagccacaggagggtataccccc

SEQ ID NO: 53592 - DNA, 308 bp, Zea mays
  Clone ID: MRT4577_148879C.1
ggaaaaaaatgggaaaaccagccgaccaaaaaaaaaaccaaacccttggtttaaaaccattttgtaacgcattatgcacataaccgaaacacacacaaaaaaggcgggcttatggccactcctaaatgtcccatttggaagccgccgccgttgttttcttaaatgaccgggggcaaatccttgtccgttacgtcaacgtgcactataagcttcgggaagtcttccacggaaaacggtttgctgaagtaatcgtttaccaggaacaagttaatgtcgtcgggccccaacgggttgttcaacaacccctc

SEQ ID NO: 53593 - DNA, 188 bp, Zea mays
  Clone ID: MRT4577_148880C.1
atatttgctgggtcgacgttcttctagtcggcggccgccctttcttcttgtggttttttttagaatggaagagcgatctacatcaagtgatgaagttcaatacagacacggactttagccgtacagcggttccagacgacgaatgcctccacaccatcactactaaaagaaccaatgcgggctgagac

SEQ ID NO: 53594 - DNA, 339 bp, Zea mays
  Clone ID: MRT4577_148881C.1
cttcataagttcatagtcaacatgactccagcgaaatacacatgactgagcgtcactaacaaccttaatcatagccatgagtttatcatagattcacagtttcacactgtcactaacaacctaacagtaacacagatgacagatccatcacagattagacttgaatcacagattcacacattaacagttaacattgataatagtctacgagactacgacagtttagactttatattctaaataaagaacactgaaggactcaaaagttcccaggcagtcactgaagtttgaactcttcttgtaagacctacatttcaaaatatgaaaataccattagtc

SEQ ID NO: 53595 - DNA, 344 bp, Zea mays
  unsure (1)..(344): unsure at all n locations
  Clone ID: MRT4577_148882C.1
ttctagatcgcgggcgcaaaccccgccaaaaaatatgaacactttgtttcaaagcttggcagcttttatcgtttttaataatgagttctgttttcaataatgagttccggtaggatgtgtttttgccttcggtataaggtctcccatgttcattgcgcggctgagctcgttataaaaaaactaattatgtgaaaaaaaaaaacaacaaaaaaaaacaaaaaaaaacaaatataaaaaaaaaaaaaaactaacaaaaaacaaaagacacaccncggatatacgggtcctgtggtcacggaccaactcttccaaactggtgccttgtttcttgcacaccttataat

SEQ ID NO: 53596 - DNA, 444 bp, Zea mays
  Clone ID: MRT4577_148883C.1
gggggggggcaacccccccccaacaaaaggggcggggcccttgtttagggaacccccttaaaaacaatagttcaccccggggccagttaaaaggttttatttttcttgggggggccccgggttaacgggaaaagggcccgtttgggggctttaaaaaaccttgttccaaaatggggaggggggtttttttacttaaacaacgggggattcccccagggggggccataaattttttttttccccatcaggggattaaaagggaagggccttggggggcatccccttttcctaaaagttccccacatgttttggggggaaaggaaccccaggggaacagttttaaagcccttaaggttttttcacccatgcttggggagcttcaatggttttctttttgaagcgaaaaatttttgaaaaaaaaaggctgggtttttaaagttcatc

SEQ ID NO: 53597 - DNA, 329 bp, Zea mays
  Clone ID: MRT4577_148884C.1
ttgcttcaaagcagcgtaagggcaacatcaatggcatctaaaatcggtgctaactgttacagcgcaaacgataccgcttttgtttggatgggtgtgctaattatattcactcccttaaatcgcctccaccctgcaaagggatcggatagaggtaactgagctatgtacgacgggatcggatagcactgtcatccattgcagatatgtccaaccaaccataaacaatgatatccattatcacagcaaacggattaccgtctatattctcagaaccaaacagcacctatgtctatacaaagtgctaaacagacgcagagtgcaacccctta

SEQ ID NO: 53598 - DNA, 773 bp, Zea mays
  unsure (1)..(773): unsure at all n locations
  Clone ID: MRT4577_148885C.1
naactctgtgcccttgttcgccgccgccgcccttcgtccattcaccgccgccgctccatcacttcgccgccggccgatggattcgccgggtcgtcgctcctcagggccagcccctcccgccgcgctggatcacgtggcggcctagggaaccctaaccagcccccgatcttcgcatctctccctgaatccctcctcctccacgagccgcgcggtgtgcttccctcctcccacacgatgctcctctccctccccaaatcgacatggatctcgcgctgctggatcccctcctctccctccccaaatcgacatggatctcgcgctgctggatcccctcctctccctccctgacttgccgtgaatcttgtgctgcgagagctgctctatcccttccctggccgccatagatctcgccagccaccatcggaggaagccccacaaacccaagtttgatgggcttgccagcgatgttgaggtccttgccatggctccgagcctggagagtagcgctgtcccagattgaggtggagctccggagggagatgacgctgttcaagacgctggccatcactttctccaggatgatgatcttcactgggatcacgtctttgtacggtagcatcctccagttaggaaggcctgccggccagcctcgtgtggggctgggtcatcatctccttcttcacctgagtaatgggtgtcgtcatgttggggaattctccttgcctttgtctgaacctctaactactgaagttgaaaatgaagttcacgaattg

SEQ ID NO: 53599 - DNA, 444 bp, Zea mays
  Clone ID: MRT4577_148886C.1
aggtgccttggcgctgcttactggcaaaagccatcgacgggttttccaaaatttgcctccggccacagaaaataagggaatccccctgggggggataattttaaacagaagggcaagcaaatccagagaaccggacagcccaatccatttggatgggtcccgaaactgaacaatttattttattctattttattcatgggacccgactccacacattattacgcgggacataattaaacaaatcccaggaaccggcccatccaaaaaaaaaaacgagaccaggccaggtcgacgggttcctggttctaataaaaaaaacccatcccctttttccttttgagtgccccaagcgaagtgttcatgaaggcatgccaacatccacggtttatgtgaactttatatgatatcccggaaaatttgagcttttcctccagggacttgggt

SEQ ID NO: 53600 - DNA, 494 bp, Zea mays
  Clone ID: MRT4577_148887C.1
atattgtaaaatatatatatataaacggaaggcaaccatatttagcgcatatgacagtaagtaaattactggacctccccaaaatcatctacaactcaaacaagtagagatcatctagtggcacaatgaataagctacactatgccgtctgcttatcaatcagcagcgagtgtgagtgatttgacttttaagaccgagggaataatcagttcaagttgaatggcaagccgacgaactattcgtacctgatgtggctctagaacgttcggaagcgctctcaccacagcatccccctggccatgccggattgcttcaactatatcgggtggcgcataatcactgccaccatgactcccacggtcggcggcactagaatattgcgttgatgtaacatgagaaccatgcaccttttgtgtgcgcaggaccactgcgagcagccatggcggaccggaaaaagtatttctgtacggtcaggcctaggaagatagagacgc

SEQ ID NO: 53601 - DNA, 287 bp, Zea mays
  Clone ID: MRT4577_148888C.1
cttacgttcactttttgacatggccatcatgaagcgcccctggccagtacccgagcataacatacattacatagccggcccggacgcaaaaaccgagccgtgcaagcaagcagacccgtgacgatggcctcggcgacggggaaactaccatgggtccctggcaacagacaaggtgcatgaggacattgtatcccgaaagatcaatagtggcacgactcatgaggaacagggctcccaaggagccgagcggcatgtggatcattccatcgagggaaaagattgacgag

SEQ ID NO: 53602 - DNA, 126 bp, Zea mays
  Clone ID: MRT4577_148889C.1
cacgcgtcagctaacgcgtccggtcacatgtaagctgatctgcgaacatgcttgaaatacttcagaaagacctcaggggcttgcactttgtttatgttcaggcctgtgtcaaatggcgctgctggg

SEQ ID NO: 53603 - DNA, 508 bp, Zea mays
  Clone ID: MRT4577_14888C.1
taggggccttttttttttttttttttcttcttttttttttttttttttttttttttttttttttttttttttttttttttttttttttttttggtaccgaaaactaaaaaccctaagcttcccataagggggggaaaaataccaccaagaaattccgggagcaggaaaactggtccccaacacaagaaatcctggacaaacccgggccccccaaaggacacagcttattgccccccgactaaacccgaaaggggtgccaaagggggaacaaaccccctcaaaccgggaaaattgaaaaataacagcccctaaaaacatcttttaaaaggggcgagccaaaacttatgggttctatttccctgaaccctgccaaaaaaacgacccaattttcaacaaaaaccaaaccaaccccggggccccgctaattctgacccaagaacccccccttatccggtcaaaattttcccccaaggccccacccttctggttttgaaattcaatggacccc

SEQ ID NO: 53604 - DNA, 682 bp, Zea mays
  Clone ID: MRT4577_148890C.1
ttttaaaattcttttttttttttttttttttttttttttttttttttttttttttttttttcttttttttttggggtttaaaaggattacataagcagcaaaaccaaaaataatcctttaggggaaaaagcagacacaataagaccccgcacacgtccccctttttaggacaggggcaggacagtacaaatgataagcagggggcaaatcaagaaggggaggggggagccataaaaaagcatgataaaggggaggccccccagaccagaccagaccaaaccaaaagctttttccaaaaaaaaggaggggccttatgcaaaaaaagggttttcccccttgggggggttcaccacctcccaggggaaggggggggcggccctcccaaagggcccggaagcccccgttttgggggaacgcccgttgccgccttttttgggggcgaggttgatgaaaaaaatgccgggcctgaagacaaaattttcctttacgaattttaggaattccttgggggggatcgggccggggccgaacgtgtccacaaacaccgacaggggctcgggcaccccgatggggtaggaaacctggacaaatggacggggggcgaggccgggggagaaaaagcttttgggagcctggctcgcgaaggaagccccggtgggggccaccttggtgggggccttgg

SEQ ID NO: 53605 - DNA, 303 bp, Zea mays
  Clone ID: MRT4577_148891C.1
tctgaagagagcgggcctgagcgccgtgcctgctgacgctgctccagggcccaaaaggctgtgggctacatctgcaaatgcaacgggggccgtggagccatccgggagtttgcagaacacattttcctcctgttagaaaaggttaataactcatgccaaaaatagaagtggttgtagtgtgggggaagggagaacgaagccttttccagccactttgcgttgtttttgatcaagtctcgaagtgtaatctgctgcgagtgatcagatctgtaagataccttactcttctcaagctgagttttt

SEQ ID NO: 53606 - DNA, 229 bp, Zea mays
  Clone ID: MRT4577_148892C.1
atctccgccggctcaacctcaacgcgggtagcacgaccaccaccagtccaccaccacgcccacctcaccctctctcctcctcttctatagtcaaaccagccccctccttccacaaaccttcgcagacggggccaaccggcaaggacgcagctttttccgtatccttctgggttctaacttctacttctttccccacctcgccttcgttccgaccgaaaccaaatcgcga

SEQ ID NO: 53607 - DNA, 443 bp, Zea mays
  Clone ID: MRT4577_148893C.1
aaagcgtcgaatttattaattcaaactcccacacataacgtcactgaaaagccaaatcatacactctattaaactgtctattccaaaggaatggaaccataagctggtctcaagttccttgtgcttgctgtggagcgcgaataggacttttggaggaaaccctttttatccatgggtctagacatttgcaatgcccttgcaaagaactgcgtcacaaggttccacgcccgagcctgacctcacatgctgaagtctgaattttctgcacttcacacaaagcgtatgagggccacggtccagttcatataagtgcagacttaagtggccggcttttcggcgattgtaacggaactgactcacatgatcctgacggatgagtgagcgaaattttctgcccggggtttttcagtgacagatgctgcaatacctttgttcgcccaggc

SEQ ID NO: 53608 - DNA, 329 bp, Zea mays
  Clone ID: MRT4577_148894C.1
aaagttcctaacacacaccgagagagaaagccgcaggggacaccacagagaagaaacacagagacgcagaaccggctcacacccgacaaagggcacagaggcgccacccccgcagacagagggtaagaaaaggctgtccacgggggggggacacaaccacatatagcacagcgcacaaaaatagcaccaccgcgggggagcggggggccaagccagatatgaagggacaaggcgcccccaaaacaaacagcggccgcaaataggggcgccattgcacaagcaccagacggcaagagacaaccccacaaacgccgaagcgaagccaacgg

SEQ ID NO: 53609 - DNA, 574 bp, Zea mays
  Clone ID: MRT4577_148895C.1
aaaacaaaaaacttacaattatcattgtatacaagttgcccagtatagatgatattaattggtctagatagctcattgaaactcagatcgctggatcatttcatcgtaaaataagtttgtttcaacactatctttacatataaggggcaatgcctctgtttagaatttagtaaaccttagaagtcatagtctaacttacagcactacaagcgcatgcataaggccaatcactgatggaattgggaagaaaactttttcctttgtaatgacctggtacaaagggtttacgtatttttagacacccagtcattttgtccttctttagcaaccctatggtgccaaaatattcagccagcatagtctcatcagttctaggaggtaggttgcaaacataaactgaaccatttgggaggcatcttgacatatatccagccttcttgaaccagaactccaattcaagacgcctcctgtgtttagtcctgaatggtttatcagttggttgacttagcaatttcgtgtgtggtagtggaagcagctaacaacaaacgactaccacgtcaatgtttaagtgtgg

SEQ ID NO: 53610 - DNA, 484 bp, Zea mays
  Clone ID: MRT4577_148896C.1
aagaaaagggcctattttttatttgaataaagaaggggggttccttttatttacaattaaaacacacaccgaacacaaaaactgttactaggaggtatgttccaccagacctatgttacaagagcccaaacaaccacaatttccacaggcccaaaaaagttccgagtcctgaccaaccagtacacacacagtttttgttataaaaccaaaccccgcatgaccaggggacccgggaaacacttggagcaggagcagaggaaacccaaatggaaaaagggggctgggagcaggtcaaaaacttttggaaaaaactaaagccaggtggggggggcaaatccaaaggccttttccatacttttccagctgggagggggggcaaaggcaccaaaataagaggttggggggcggccttttcccgggtcccaccccaccgtggagcataaaaggcaagaaattgcccccatccacccggcctttatgggcc

SEQ ID NO: 53611 - DNA, 358 bp, Zea mays
  Clone ID: MRT4577_148897C.1
aacaaaatatacaagttttgtcgttaagtgcctaaatttcaaatcatcagtacgatcaagctaacagaatcaataacaattagatgctagatgtactggatatttttacccattgaaatttttctttatgtattgaaaatttatgtgttataaaatagtgcaatgttattaaagttaatgatgctgttgttgctcggagataatgacgaaaagaataaacagttaaactgcaaaaaacatttgcataaaattttgcaacatgtcgaacataattaaatgaatggaggtgaaaaaacaaatgccaatgaaaaacttcttttgcaaaaattaaaggacgacgaccacgacgaccaccttt

SEQ ID NO: 53612 - DNA, 2950 bp, Zea mays
  Clone ID: MRT4577_148898C.1
atgggcggcgagaatatgtccaccaccggcgctggcgatgacatcctgcctgtaacatctgtgcataagccagcagagggtgtctctgttactcctccggcagcattgagggcacctggacatatcgaagagcacacaaaaacagcagacgtggtcggcgcagagaagcacatccccatgagacatattgggccacatgaacaggacacacctcatattcttcaaagccacccggacaatattgatataagattgatacctaaagtcggtatgacatttagtaacgtggacgaggcgtataatttttatagtcaatatgcatacgaggtaggatttccgttgaagaaatatagggagcggaagaattgtaaatggttgaactgttcaatggaaggaaagaatgctgaaagggtagctggaaatccaaggatacgtaacacatgttcgaaacgaacacagtgcaaggctgggatgaaacttaaaaaaatctacgatgatgctaaagagaaagttatttctgttcggattgatctggtaaactatgagcataatcatgaatttttgaagaaagatacagaaaaagggcaattgcaatgcaacaaaacacatgatcgtgaatatatggagttccttagtgcgatgcaagaaagcaggattccaccacattgcattatggattttgttacagaaatgcatggtggcccagaaaacgttccaataaccgtgcaggacatgagtaacctgaaaaaagcatggcaaagggagagaaatgcaaatgatgtgtcaaagttgttatcttttttttcattatgcaagaaagataatccacaatttttttcagactttcaactggacaaagaaggaaaaattttaagcatattttggtcccatgctagccagcaagtcgaatacattgattttggtgatgcagttacatttgatactacacataagactaatatgtatgataagccattaggcatgtttgttggctcgaaccaccacctacaatgcacaatatttgggtttgctttactaggagacgagacagttgatacattcgagtgggtcttcaatacgttcaaaacatgcatgggatgtgacggaccacgagtgatgctgacagatcaagaccctgccatgccaattgcacttggcagagtattcccaaacacaatacatcgattgtgtttgtggcatgtgcaaaacaggtatatgccccacttgaatgaattatatgcaagatttgaggacatggatttcaaaacaaggttccaatctataatacatcatccattgaatgaaatggagttcgaggctgcctggcaaatgatgcttgatgatttccaactacacgagaacaacacccttgccagattatatgaaatacgcaaagattgggtacctgcatttttcaaaggagattattgtggtcttatggtctctacacaacgaagcgagagcatgaacaagttggtgaagagtgcccacgtggatgcaaacacaccgcttcatgaatttgcaaagcaaatgatgaagctcctacatagtaggaagatgaaagaggccaaagaggcactaggatgcatgggtcaaaaggatacaactacattgtatatgtttgaaataagagttgcaagggcagacactagagctgtgatgacaaggtttcaggagacagtaaaatatgcaactgcataccgaatagaccgtgatacagagggtgaggaacatgattgggtggtgaaacatactacaagatcaaataaaattgtttggggtcaacaccaattcaagataagggctgatgtggatgccggaaagtattcatgtgagtgcaagcattgggagcatacaggtctattttgtgttcatcttgtacgcgctttcatgcatctacaaattgaaaggatcccaagtgagtatattttgcaacgatacacatactccgcgcatcaagatgtggctttttcaagagacgataggaatttgaaaggaaaagatggagaaactagatcatatagacagaagatgttgcttaaaaaagcaatgaaagtagtacaccatgcgagtctgtctaaagctgggaatgataaagccctagagatgatggacgaattattagggttattgatgcgtgtggagcctgatataggtactggtgagagttgtggcacaagtgtttgcgatgacatccaggtcgaagcgtatgaaacagaagaaatggctatagacaacttacgcaaattagatgatgggaacgaggaaattttaatgggctctaatacaaatgaatgcaatactaaggatgatcaatgtaatatgcagatattaacattggaacataacactgacattcagctggttgagagtagttctatggatgtggaagctagaaagaaactggaatttcatatggaaggtgtaaacttaacaagatcagataaggccaagcctaagggaagaacaatcaaaagtagtgagcaacaagttttaaaattgggtgcgaaaggagctaagaagatgagcaggaaatgccagaaatgtggcatagctgatggtcacaacagccgtacgtgtttaactgtcgaggataatagggttcgattggctaacctatctggacgtaagcgaggacggcctcctggttcaaggaacaaactcatagctgtagccctgcaatggaatgagacatcaacgtcgaaaaaacgaacggtggatgtcggagatgatgattcatctggtagagagtagaagaccataagatacaaatatttccttgtgtaaatgtgattcactgtgttcgtttgactacttccaaaaagaatcataaatatacttgcaaactggcataaatggatgtgtagtttgtcataagctttaacagtaatgcagcagtctgactgtacatgtacttagcataaatgtatgtgaaaaaatgcataacact

SEQ ID NO: 53613 - DNA, 853 bp, Zea mays
  Clone ID: MRT4577_148899C.1
cgttggggtccccgccggccggggcaataggccaaccatccgattgtcacaaactctcatcacaaagagctagccaagcatgctccttgaccaaaagctagataggcaaccatgtcggaggagaagcaccaccacctattccaccaccacaagaaggacgaggagcagcccaccggccggcgagtactcagagaccgtggccaccgaggcggtgaccaccggcgacggtgagaacgagtacgaggggtacaagaaggagcacaagcacaagcagcacctcggcgaggccggcgctatcggcgctggcgccttcgggctgtacgagaagcacgaggcgaagaaggaccccgagcacgcgcacaggcacaagatcgaggaggagctcgccgccacggcggccgtgggcgccggcggctacgccttccacgagcaccacgagaaaaagaaggaccacaaggcgccgaggaggcccccggcggcgagaagaagcaccaccacctcttcggctgatgacctggccggcgagagcaccggtccgtcaccgaccgaccgaccgccgcgccgcgccgcctgttttcgttgagtgcatgcctgcatgcatgtttgacgtacgattaacaataagtcccttccggacctctgcgagtgagactgagatgtggggccgcgcgcgtcgaggtgttcctgtacgcgcttgattttctctgcatgtataattgcgttgaataagcgagagccatgtgtgggtgaggctcctcccctcccaaagtcaagcccttatgtgtacctgtggttctttgttctggtatatggagatgatgtgttcatgtaacccgtttttatataacacctc

SEQ ID NO: 53614 - DNA, 224 bp, Zea mays
  Clone ID: MRT4577_14889C.1
tctgttaccgcccccgccgccgacaacagccggagggagtgtaaaaccggagaggggcggggacaccagtacagaaccgcaatgccgaccgaggaggctcacgcggcggaagcccccgcgacccaggagccagcggaggacccggcggccccaggcggccgaggcacccaacgcgaaaaaagcgcccaacgacaacaaggcccccaaagagaagaagcccaccg

SEQ ID NO: 53615 - DNA, 418 bp, Zea mays
  Clone ID: MRT4577_1488C.1
gaccccactgccacgaacgcgggctgcagaacgttagccatccaggcatctacagaagtcgtctcggtcagcgtactctaatgtcctggctatgccagtctagcaatggcggtgccactgaacaaatgacatacacggaacaaccgctagaaagactagactacttacgcacggagcttgatgaacactcatcataagccattaaagacttgctttcagatgcctcgctagtgcgatttattgaatcaaggaactgcaatgatgcataaagctagtgaaatgatgaaagcagctgtgaagtggccgcttgcattcaaacctgaaaacatatgctgggatgatatagcacaggaagcagacactgcaaagatatatagcgcagtattataaggacaaacatggcacaactgttattgta

SEQ ID NO: 53616 - DNA, 298 bp, Zea mays
  Clone ID: MRT4577_148900C.1
aaagaaaagggtttgagttcgattatcgaagttgtgaagatggattatgttaacactgcgtttgagagactcgagaagaacgatgtgcgttaggttcgtcgttgatgtcgaaggaagcaatctcgacgcttgatatcatgaaactcgaggctttttatacatactcgaatactcgatttaaacactcttatgtttgtttgtgagctttttcattcgtgtgtcactatttttcatgagaaagtggtaaaagatataatgatattggatttctaatcatgaatcatatgatatatgtgtt

SEQ ID NO: 53617 - DNA, 215 bp, Zea mays
  unsure (1)..(215): unsure at all n locations
  Clone ID: MRT4577_148901C.1
ataacacgttatcaacatctnntgcttggcctaatcacaacattattctgacaaactcanaaatttaattctctacaaatccttattctttccccctattcctaattactatagaaccttctcaaaatctctttatttacacctactgtctctattccttcactataatatatcctgacacgcacacattccccagattaaactttactaccttc

SEQ ID NO: 53618 - DNA, 858 bp, Zea mays
  unsure (1)..(858): unsure at all n locations
  Clone ID: MRT4577_148902C.1
ctcgaggccggccggacaggccatccatccgattgtccaaactctcatcacaaagagctagccaagcatgctccttgaccaaaagctagataggcaaccatgtcggaggagaagcaccaccacctattccaccaccacaagaaggacgaggagcagcccaccggccggcgagtactcagagaccgtggccaccgaggcggtgaccaccggcgacggtgagaacgagtacgaggggtacaagaaggagcacaagcacaagcagcacctcggcgaggccggcgctatcggcgctggcgccttcgggctggtacgttgtcgtcgtccatgcagagctatcgatcgatgcttcgttgcgctgacctatcacactagctagttcactacagcgtggacatacatgtcatgaactcggctgatcgatgatgttgtttctctcgtttttgcagtacgagaagcacgaggcgaagaaggaccccgagcacgcgcacaggcacaagatcgaggaggagctcgccgccacggcggccgtgggcgccggcggctacgccttccacgagcaccacgagaaaaagaaggaccacaaggcgccgaggaggcccccggcggcgagaagaagcaccaccacctcttcggctgatgacctggccggcgagagcaccggtccgtcaccgaccgaccgaccgccgcgccgcgccgcctgttttcgttgagtgcatgcctgcatgcatgtttgacgtacgattaacaataagtcccttccggacctctgcgagtgagactgagatgtgnngcgcccgccgtcaagggtgtcctgtacgcgcttgatttctctgcatggataattgcgttgatagcgag

SEQ ID NO: 53619 - DNA, 211 bp, Zea mays
  Clone ID: MRT4577_148903C.1
tgcagaacgtggcgtacccgaagaacgtgtgcgaccctctgctccgggagtgggtcaaaccctcacacaaccccatcatcgttcccgagggcggcatcaacgcgactcaattccgcgacccgaccactgcctggcgcgttcccggccccgagcagtggcagctgtttttctgtaattacttaatcttattcatttttatttgttacatccc

SEQ ID NO: 53620 - DNA, 300 bp, Zea mays
  Clone ID: MRT4577_148904C.1
gccacgcgttcacttacacatgcacagcctccttagtgactggaccaatctttactgcggcgacttcatgaactacgacaaactaatccaatgggaagacccaatcggaaacaaactactcaacgtggcccttgattatcacttcccagaaaatgggagccgtcttaaaaaacaaggtaacttatttcaagaacaactacccttaggaaaaaaaaacggttggttcacccttcaaaaggaaggtaattatcggaccaatgaacgggccggcctccttagacgccctcagggaggccatcc

SEQ ID NO: 53621 - DNA, 922 bp, Zea mays
  unsure (1)..(922): unsure at all n locations
  Clone ID: MRT4577_148905C.1
ccgctcgaggcggcgggcaggacccgaacaaacacagtcacacacagacacacaccccgatccctcactccctcgcgtgtactagcaaccaagggaaacaatggcgccggtgaaggtgttcgggccggcgatgtcgaccaacgtggcccgggtgctggtgtgcctggaggaggtcggcgccgagtacgaggtggtcgacatcgatttcaaggccatggagcacaagagccccgagcatctcgtcagaaacccgttcggccaaatccctgccttccaggatggggatctgcttctcttcgagtcacgcgcaattgcgaggtacgtgctccgcaagtacaagaagaacgaagtggacctgctgagggaaggcgacctcaaggaggcggcgatggtggacgtatggacggaggtggacgcgcacacctacaacccggccatctcgccgatcgtgtacgagtgcctcatcaacccgctcatgcgcggcctgccgaccaaccaaacggtggtggacgagagcctggagaagctcaagaaggtgctggaggtctacgaggcgcgcctgtccaagcacgactacctcgccggggacttcgtcagcttcgcggacctcaaccacttcccctacaccttctacttcatggccacgccgcacgcggccctcttcgactcgtacccgcacgtcaaggcctggtgggagaggatcatggcgaggccggccgtgaagaagctcgccgcgcagatggttcccaagaagccgtgatttgctatgcgggatctcgcatcctgggatccgatccgatcactgatcggcgttttcttgttggtgtcgcgaataaggcaatgagcttgtgttgctggaattgcattgcaccagcgtgcnagtttttgtgcttgcgtgtgtgtggtcgcttgaaaagaacca

SEQ ID NO: 53622 - DNA, 818 bp, Zea mays
  Clone ID: MRT4577_148906C.1
gctcaacaaccagtcacacacagacacacaccccgatccctcactccctcgcgtgtactagcaaccaagggaaacaatggcgccggtgaaggtgttcgggccggcgatgtcgaccaacgtggcccgggtgccggtgtgcctggaggaggtcggcgccgagtacgaggtggtcgacatcgatttcaaggccatggagcacaagagccccgagcatctcgtcagaaacccgttcggccaaatccctgccttccaggatggggatctgcttctcttcggtactatgattaatctgcctttttcagttactactttgtccttgtcaaaataaatgtgaactgcttggcctctgtttctcggcatcttaatggggccaactagtaaagcgaatccttcctttctgttctggtgggtggatgctccgtctccaaacatcctctcaaattctcaaaaacattgtgttcttgctccgttttcagagtcacgcgcaattgcgaggtacgtgctccgcaagtacaagaagaacgaagtggacctgctgagggaaggcgacctcaaggaggcggcgatggtggacgtatggacggaggtggacgcgcacacctacaacccggccatctcgccgatcgtgtacgagtacctcatcaacccgctcatgcgcgggctgccgaccaacaaacggtggtggacgagagcctggagaagctcaagaaagtgcttgaggtctacgaggcgcgcctggtccagcacgactacctcgccggggacttcgtaaggttcccggaactcaaccacttcccctaacccttctacttactggc

SEQ ID NO: 53623 - DNA, 394 bp, Zea mays
  Clone ID: MRT4577_148907C.1
cccacgcgtccgggagtagcagccaaaattgttgtgatactgctcctttccaattgccttcgtctagtaagaaagtgcatggatattgcagaagcaatcggcatctggatctagcccttggcttctcatggcctagataaagactccaactttaaccaaagcttcaggagtaagctagtgaaggaatatctcaaattttttcagcacttcgactaacattctatgcgaaggaaagcatatcccagctttcatgaaacttcggaaaaccactactccgatccatctgactcgggaagaagaacagtgctctctcctccggctctcactatggatatatcatgaaaatattttcccttcattgtctcaatttgtcctttcttgataatagatcttt

SEQ ID NO: 53624 - DNA, 1287 bp, Zea mays
  Clone ID: MRT4577_148908C.1
ttgggtctttcgtggcatcctgtaggctgatctactttggagtggaggcaatgatcacgctacaaagttctggtgtagaaacaggcctggtgatcttacccgtgatagatacaacagtggccaaatgcaaggttttggtgaccaacatgctgcttttggtgctcgtggtatgggtggattccagatgcctgaacctccaataacgcctggaccatttgctcctggattgtcacgcaatgaaggtacaatccctggcattggggttgcaatgaccttggcaggccagtcttttgatggatctgatggagagcagaggccatctattccgggtcttccacctgggcaacccccgttgccaccaggtcctcatccatcacttcttgggcagcaacaacagtatcaacagatacctcagcagcaacatccccagttttcgcagccaccacctccaaacatgccccaactgcaggcaccagctcacatgctttcacattcacaaggatctcggcctactcttccccagcttccaccaatgggtggaccatcagtgccatcacaagtgaacccaccgcttccgcctatgcctcacccaacggcaatgcatggttcacagagtcagatgatgccccaaatgccacagcacatgatgggcctaaatcagatgcatgctggttctgtgcctcctggtactgtacccccaatgggtgggttcccaagtgggatgggaaacatccaaggagcatcaggttcgtctggcgtacaaaattttcctatgggtggcatgtataatcggcctcagggacaaatggctccacaagggcaaatgacatccattcctggtctaagctcttaccagggaatgggcaatgttggccttacaccgcccccgccacagcacccgccgcctcgaggaggctcggcaacacagtgaccatccctggagcaaaacaaggattgtactgaacctaaattttctcgtgacactaaatttgtagcatgtaaatccatctcgagcaatatcagcgtgtctagactcccgcaaatcacgagggatttcttcacgattattgctcaggcagctaggatttttgctatctcgtgctgtggtttacaactgggggccttctgtcatgtgcctcatttgtactgtaattcgaatcgtgcctttacttgccggctgcttagatgttgaacatagagaattatttccctcagttttgagaagcgtgaacttcacttgtgccaaaaaaaaaaaaaaaaaaaaaaaaagaaaagacccggtacccc

SEQ ID NO: 53625 - DNA, 398 bp, Zea mays
  Clone ID: MRT4577_148909C.1
tcgagtttttttttttttttttttttttttttttttttttttttttttttacaaaaggctgttagtacccagaaagtcgaggtaggttaaagatacaggtaacatatataactaactgtacaaaacacattctctagatgaacgttcaaaaacagctagggcctaatttggaagcaagagggaggcaaccctaggaatgagaagtcctataaggagaactaaatggcttatccaaatgacatccccatggattgcttacctagtaaaggttgggatccctaggggtttgagtttccaaacaagccctaaaggttgcgctcatgtggttccagccaagggaatccaagcgtctcaaacacatccttctcggtgtgacagttaactatggcgtctgatct

SEQ ID NO: 53626 - DNA, 244 bp, Zea mays
  Clone ID: MRT4577_14890C.1
ttaaggtaataccctaaaatcatgttttaggtaaattagaaaaagtttatctcaagattaaaatgcgatgaaacaaatgactaaatgaaaagagctctaaagagttaaagtaatcctttcatttaaaacttatactttggaagattctttgaatgaatttcaccaaagtgtgggccactaaaggtttcatgatcatttatgagtatgtaataaacattaatttgataaaattattacttatttt

SEQ ID NO: 53627 - DNA, 390 bp, Zea mays
  Clone ID: MRT4577_148910C.1
ccagaacgtaaatcttcacatttgtgttatatgcaacaaataatgaaccaaaagaagaagaaaatcattgcaaggaaaaaactgttagtctagtctccgaagtgttaggatgaagaaggtcgtgtttcctgattctaccgattagaccattcatttacttcttcttcctcttgcggccaatcgatgccggtttcacggttggcgagagtttcatttaggagcgccgtgatctggtctccggtcagggtctcgtgctccaggagggcgacaacgagcgcatggagctcccgcttgtgcgccgctatgatcgtctttgcgttctcataagccttgctcaacaactctttcacctcctggtccaccatggttgtcgagttccagctcatggtc

SEQ ID NO: 53628 - DNA, 124 bp, Zea mays
  Clone ID: MRT4577_148911C.1
cccacgcgtacggtgagtatatattatcaaggcgacagcgaccttgtacttcgatgacccttggccgtgaaggagccagtcctaccccttgaagttgacccagcatgccctgttgtttcttttt

SEQ ID NO: 53629 - DNA, 885 bp, Zea mays
  Clone ID: MRT4577_148912C.1
aattcggcacgagggtggcccctcctcgcgctcggctgggacacacgagcgcactcccctgtctcggtgtctcctcccctctcgctctccatgttcgcggcttccaacgccacggccacccgcctcatcctcccgcgtccttcagtcccgttccgcgcactcctcattccccgccggcggggtcgcctccgccgcgcggtccacgccaacgccgtcgcaggtggcggaggaggcagcgagggcgttgcgaaggagccgccgcggacgctattccccggcgggttcaagcggccggagatccaggtgccagcactcgtcttacgcgtcggcaccgaggaggcgctgcggtgcggggatgaggtggccgacgccgtgtcccggggcgtgggcatcgtcgtgctcgaggccggagaggagggtggaggcagatcgtacgaggccgctcgcgctctcagggccacggtcggggaccgcgcgtacctgctgatcgcggagcgcgtcgacgtcgcttccgcagtcggtgcgagtggcgtcgtgctcgccgacgacggtattcctgctattgttgcaaggagtatgatgatgaaatcaaatgctgactccatatatctccctattgttgctagaaggatacaatctgcaaactctgcattaagcgcttcaagttctgaaggggctgattttctgattgtaaatactggcagtggtgattttgtggatgttataaatgatgttgttggtcaacatgtgaagattccgattttcgtcacgttgaatcatttaagtgaaggaacttattctgacttcacatccatgttgctccaatctggtgcatctggagttgttacatccttagctggcatggaaactcctcatgacgatctt

SEQ ID NO: 53630 - DNA, 788 bp, Zea mays
  Clone ID: MRT4577_148913C.1
agcctgccacacaagttgttgcagatagcgaacacagttacgaacagcagtagagatagcagtagctgagatggtgaagatcgccgccctcgccttgctcgcgttgctgggatccgtggcgtgccaaggtgacaatggctcgcctgcggagtcaccggcgtattctgcaagctcggccccggcgagcttgaaggcgatcagttatcctccaggtgccagccccagccaacccatgccgagcccgattgtgttgagcccgagcccgctcgctcagcctcctagtcctagcgtcgacctaggcgcaccgagccgaagcccgccggtatatccaccgagtgtcagccaacccgctcttcctccgtctgcttcttccagtgccccgagcgcaagctcaccggagtaccttcctagccctagtccaagcgtgtctggtcaaaccccacccacatattcacctgacccaagtccacctagtcatcctcctaccattagtccaagcccattgagcccgagcactactattgcttatccaccgagcccaagccctagccaacccgcatatcttcctagcccaagcccgatcaatccaaggcaacccaatcctgccagccctagccctagtccagcaccgtatatttcaagccctagcccaagcccaagcccaagcccggatagccctgctccagccccttatcctcccagtaactctcccagcccaagcactcccgtttcagggctcagtgtcggtcactacagctactcctgcccaaatgcggaggccattgtca

SEQ ID NO: 53631 - DNA, 176 bp, Zea mays
  Clone ID: MRT4577_148914C.1
gaaaccatttgagatttgaatctaatggttaacgctattctcattttcccaggggggcttacctcatgaaagtagttcgggtcagaatgatctactcagttaaaaaacaacaacaacaaaaaactaagcgattgggaaaaaacaggaattttatctggttattgcatctggtgata

SEQ ID NO: 53632 - DNA, 157 bp, Zea mays
  Clone ID: MRT4577_148915C.1
gtgtgaagttaaatataagatgaccacacgtggacaggccgcattaggcctcattcgtttggctaaaaaaaaagcgccaagggctacaaaaaaaaataaaacgaagacataagaatcggaaaagaaaacggagctcatgcacaaagcactgacacag

SEQ ID NO: 53633 - DNA, 301 bp, Zea mays
  unsure (1)..(301): unsure at all n locations
  Clone ID: MRT4577_148916C.1
tcttcctactcaacgcccacccaaatccnccaagaagcttcctttataaaaagaagaggaccacctctanccnncctctctttccccaatcctcctctactctatttcactttcacaatctcaatgcaacaaccccttctttccttccaccctcattgctctccttcctcataactcaaatccaccccattcctacccttccccaacattctatcttccccttctctcaacttttctataccccttttccacctaatttctcaccaccctattttctcaccatcttatcttattttatcct

SEQ ID NO: 53634 - DNA, 442 bp, Zea mays
  Clone ID: MRT4577_148917C.1
tcgggcggaccgctccttcccgttcatccatcacaccattcccactctctcctctccacccggcgagcggacacccccctgtcctcttgacccgatcccgtccccgcaggcccgccgcccgcgcagaggcagctgcaccagacgatggtgcgcgggggatccggaacaagaaatacctgcggtctcacgcagaactgctcgctctcgctgtggcctcatttatggggggtgcttttccaggtgcgtttgagacgcaggggcggcaggctcggagctgattgttacggctgtgtatacgactctaatcaggtggtatttcccatcacgcttgcgcctacatccgagagctcaggcgggcagttggaaaacaggaatcctcatgagttctagaagggaagcagggatctctgggtaaggggtcccggttcctcccgctgctgga

SEQ ID NO: 53635 - DNA, 386 bp, Zea mays
  unsure (1)..(386): unsure at all n locations
  Clone ID: MRT4577_148918C.1
atactctacgtatcagacgaatnactacatgcctctcttctctcctgccgtcgtgcgctgcaggatgggataatctactctaaggacaggacaggatatgaacccaaaccacatcatctaggcctactctactcacctcaagtgatccggtaagatgaaacgcacttaccggattgacattgcgaagagtgcaatgctcagtgagattcctcctcatgatactaactggaactacattacgtctgcattcattgcattgaaaagctaactaacgtaaggcatcggagcgggggggtttgatataatataatctgcgcggcacacgaatggatcgcctccaccacacttctgttatagcagaggagctgtggtgctgcacatcctgt

SEQ ID NO: 53636 - DNA, 102 bp, Zea mays
  Clone ID: MRT4577_148919C.1
gctgcaggaggcttcatcatcttcaaccatagctggaaagatgttattccagttggcaatactggaagctttgacatgatgtacagctgtttgataagagaa

SEQ ID NO: 53637 - DNA, 353 bp, Zea mays
  unsure (1)..(353): unsure at all n locations
  Clone ID: MRT4577_14891C.1
gcnctccttttttttttttttactggtttttcgcgaaacgggaccagaggaccgggtttcttaaaacgcgtgccaagattatattgttcaccaacaaaaggttctaacgcggattcaccgggcctaccactataaatggagcatatactgggccagccagccactggaggatacacacggtactgtctcaatcggcttagtccacctcctcgatcttggggccagggccaccgttttcagacggggcgtgctcgttcatgccggcggagcctcccttgtcggcacaggcgccctggttcatattggccatgatggggttgaaaaggttttacacttccttgatcttgtaataa

SEQ ID NO: 53638 - DNA, 130 bp, Zea mays
  Clone ID: MRT4577_148920C.1
gcacgagatctaatgcccaccacatgagatccctaggtattttatcgtaggcctttttcaagttgataaaaaccatgtgcaagtccttctgctccttataccgcttcatgacctttcttattaagaaaat

SEQ ID NO: 53639 - DNA, 608 bp, Zea mays
  Clone ID: MRT4577_148921C.1
acgtagtgcacgattggacagaggtgagcaaacgcatacatgggtctacatcagtggtgcgacacacttcagcgctatcctaatagatacatactatagatatgatctgaccacacacttatctccctacatctgaagggcaccacctttgttgcattcaaccaactgaggacactgaaccctgctgattatgtggagcaacagccatcaccatttatccaggtaacaactgcctactcttagcaacaacaagttgttacattggaaccaattgtccgcactgaaccacggagcttatgtgcagcagcaaatactactaccatggaaccagctagctgtagcgaaccgagcttccttcttgacacaggaaaagtggctgactggctaacagcagtgtgggggtaaccccgcaaccctcttacaactacaacaattgatgccctgtggccaacttgctttgacagacccagcgacctcctaccaacaacacataattggtggtgccctcttttagattgctgattagccgtaactcaataataaagctgatgggatgatagatgtggccaaccagaataagaagttacatgtccagattctaaagcgat

SEQ ID NO: 53640 - DNA, 317 bp, Zea mays
  Clone ID: MRT4577_148922C.1
gacccacgcgtccggccacccgtgcagtgacagccttaccaagagcatgtccaagatgagttccaacctcaagggcgcggctaacacttctgcttacaactcatcataacaatgataagttctcaaagactatttcaagacctattataatacccctaatctgcaccttatgctgcccatgattcgacccatcatactaacactcataattaaacttatcaattattgatgcacatttgactggacatgttactattttttgagtaccatatggaggaccagaggtttgatatcttgaacgttcctgtgaacatcaa

SEQ ID NO: 53641 - DNA, 930 bp, Zea mays
  Clone ID: MRT4577_148923C.1
aattcggcacgaggcgaatgttccttccgaaagcaccgcgctcgcctacagatcacgacacctcgcaccgccgctcccacttccggcctcgccggtgcgtgcatgtgcgcgccagggacgccaattgagctcggctccagcacgcaatcggctgcagagtgagctcagagctcaccctctccctctgccgctgctccgctggcctcttgaattctgttcatggttcggggatcaagaccattaggccagactatttcaaagaaattttcagacatgagatactccaatatttcctggccattccttctactgctatgttttgtttcgatggcagatgcagagtacatgaagtacaaggatccaaagcaacctattaactctagaatcagggatcttatcggtaggatgacccttgctgaaaaaattggccaaatgacacagatagaacgccaggttgcatctgcaaatgtcatgaaacagtactttataggaagcatcttaagtggtggtggaagtgttccttctccccaggccagtcctgcaatttgggtgaacatggtcaatgaatttcagaaaggtgccttgtcaacgcgtctaggaattccattgatttatggaattgatgctgttcatggtaataacaatgtctacaacgccactttattccctcataacattggacttggagctacaagggatcctggcctcataaaaagaattggtgaagcaactgctcttgaagtgcgtgcgacaggcattcaatatacttttgctccatgtattgcagtttgcagagatccaagatggggtcggtgctatgagagctacagtgaggatcacaaggttgtgcagcagatgacagatattatccttggtttgcagggtgagatcccagtcaatcataccaagggagttccatatgtagctggg

SEQ ID NO: 53642 - DNA, 513 bp, Zea mays
  unsure (1)..(513): unsure at all n locations
  Clone ID: MRT4577_148924C.1
cactctcttaggtattaaatttctctcgacattctcaaatcgttgttctcttgcaacgcactaaccttcccaggggtcgttgcggtttacgttccacttccccccgtttgctccacaagtctttatcttcctacaccacttctgtctgcacctcaacaataacaaccaaacaaccttaaacacacgacaccatggctaacgacgaatacgattttcttttcaaagtcgtccttatcggagactccggtgtcggtaaatctaaccttttgagccgatttactcgaaatgaattcaacctagactccaagtccaccattggtgtcgaattcgccacacgttctatccaagtcgactccaaaacaatcaaagctcagatctgggataccgccggccaggagcgttaccgagccatcacctncgcctactaccgtggtgccgtcggtgccctgctcgtttacgatattagcaaacatcagacttatgataatgtgacccggtggttgaaggaattgc

SEQ ID NO: 53643 - DNA, 635 bp, Zea mays
  unsure (1)..(635): unsure at all n locations
  Clone ID: MRT4577_148925C.1
cattgggtacctcgaggccggccgggatctcatcccaccacgagttaggttttgtctctgcttactgctgcgctgccattgtggtcttcttcatcccgagagcatggcttcggaatccgttgtcttcgagatcctgcactggagagggcaagtaaggttttntgggaagcattctcacatgaccgctcgcgatcttctcgtcgaccttgctggcatcaacatcaatcatttaattatggctggttttaccgatgcgctgaagccagaaaaattctctgttatgcacttcaagaggtggcaagccaaggacatgctctggcttagctgttatgaatgtgttccatgttagtaaaggcaaatcagagggcacactgactcctaaagaggaaaaaagtacgacgacgccaatattatctttatgagagcagttcttagcgtccttgttgatcgtcttgtttatgcgaatatgtaatacacagacgggaaggaattgtgggatgcacttactaccaagtatggtgcattagatgctagcagtgacttgtatgtcatagagagttttcatgattataatatggctgataatcgctctattgtagagcaagctcatgaaaaaaaaaaaaaaaaaagcggcc

SEQ ID NO: 53644 - DNA, 376 bp, Zea mays
  Clone ID: MRT4577_148926C.1
cccacgcgtccgcatgtttgggcttattacatgaaacgacaacaatattagaaagcttagcaagcacgttagggccaggatgaccaagacgttggtgccatagggacgcaggagcagcaacagcagcaagagcgtagtgtgtagtggctggaggagcacgcgcagtaggaagactgatggtgtacagtgacccagagttgttgcacctaaggattgtgttcctggaattgagatccttcacagaaaggccaaacaggtcaaattccatggaacaattattatcagtcgtaaactgacgaacagaaagaagattcttaatgatatcaggtgtaacaagaacattgctaagataaaactggccagaaagcaccatatc

SEQ ID NO: 53645 - DNA, 846 bp, Zea mays
  unsure (1)..(846): unsure at all n locations
  Clone ID: MRT4577_148927C.1
gggtacctcgaggccggccggaaggtcgtcgagctctcatctctacgccggaggtgctccacagagcagggctcgaagaggtgcgtcaagagctgcaggctgaggtacaccaactatcgcgcgctgatctgggcgacgaactgcgtgcgcgtttgcaggggctccctgatcgccaagcagctgccgcggcggacgggcaacgacgtgaggaaccgttggaacacgaaactgatagcaagcagctgcggcagcgcgggatcgaccccaccgcccccatcgccggcctcatgcacatcttcgtcggcgccctctccttacggtgacgacggcacgggaacgacgacggcacgggagagatcatcgacgccaccctggactgcgacaagaagacacgggtggaccagctcatcgcctagctgctggccgacccggcctactacgctggctcctcctccgagatgggctggatcatgggcttgatgaatgctgattaattagcggttatacaatggatccatgaggctaaagcaaactgactgaaatagtcactttagaggctaaagtttcaaacataaagaactaaaagggactaaaatgttttagctcctttagcttgtaaggacgagttaaactcgactaaaacagctggtcccacacccacacatgcaacttgcgcttgctgctgcacccgcgctaactgccttttccacaaatcaatgcctggtccccacactagcatttatgatttaatgactgctttagtcacttgttccaaacacgagtaactaaattttagtcagtcacttttaggactggacaaaaaactcgtangctcgtactcgctcg

SEQ ID NO: 53646 - DNA, 862 bp, Zea mays
  unsure (1)..(862): unsure at all n locations
  Clone ID: MRT4577_148928C.1
gccggccgggtctgggtcgagactcgagacggcgagaagcctttctgcctttcccggcgggcggtagcacaggccaaaccgtccaagacgtcatcctaattccttcacggttcacgctaatctctctgcttcctctgttcctaccctttcccctcctccccctcccgttttcctttccctttttcctccacacaagcaaggcggttcccgcagcttcgacttcggcgccgacgacgtgctctgctcctacgatgacttcgccgcctcgtccgagcccaagcgccccgatccggccgacagtgtgcccgattttcatgatagcagattgggggggccatttgtgaaaccttatgaacaagaaagttaatgggaaagaggatgtgctttctgctgttgagaaatgcatgaaaaagtatgctgataatttgctacgatctcttgagggaatcactagtcggctctcgcaactggagatttattgctataagcttgagagatccataggggaacttcgaagtgatgtgcttcgtgatgagactgacattangttgaagtctcttgagaaacatctaaatgaagtacacaggtctatccaaattcttagggacaaacaggagttagctgaagctcagaaggaattggccaaatttcagcttacacaagatacatctaanaaggaaggaagatgtaccaacatttattcctgagcaaaagaagcctgaagaaaaccctgacacatcaaaccagcaactgggctcttgttttgcctcatcaggtgaacctgccatcacttgcccctagagcttctgaatcagtccaacagtacaagaaatcacctgtgcaaccatcagacccaacccct

SEQ ID NO: 53647 - DNA, 551 bp, Zea mays
  Clone ID: MRT4577_148929C.1
ggcaacacccggcagccgagagacatggggcgccaccaccagcagggggcgctgctcctgtaaccaccacgacttgctgctcctactccttgtcccgcccttcgccggggcgtggggaaaggagggccccatgctggtctgaacgatcgccgtgaaggacctgtcggacaaggcggcggccgcggcgaaggcgttgctgggggagtcttccggcggggagctgtcggcggcatgcccgtgggcggaccaggagcgctggcactaccgctgggccatgctcctccattactccggcaccctgcagctctgcactgttcgagatttctggagactgccacaatggtgctgctcagggcggggtgtgcgtagtcgttgctctgatcctgtacgcgggccatctctacagctaccggcagacgactgtgaataacctggcggagagcctgatggtcctggcacacttcgtcggtgtcaggcaccagccgctgcacgttcgcttctaagatggcgtgggcggtgactccattagcgtccacaggttccgggcgaaa

SEQ ID NO: 53648 - DNA, 291 bp, Zea mays
  Clone ID: MRT4577_14892C.1
cccaattccacatttcaagacataggcggcaatatgccatatctgaatgggaaccattagttatcttattaggcctatcctgaagccaaaagaaatgagatcggaattcctaggggaattgcaatcccacattctaccgaaataaagaggcaaaaatgtgcatatatgaattcgaagtatgtgctatgttattaagcctatcctgaagccaaaaggaatgagatcagaattagtcggggaactccaatctcacattgataagaaataacgatgcacaactgttcatatatg

SEQ ID NO: 53649 - DNA, 471 bp, Zea mays
  Clone ID: MRT4577_148930C.1
gtcacatagatgcagttgatctcagtgccctggattgccctctctgaaaaggaagtgatggacactattgcatgcctcccatccgacaaagctaccgggcctgatgtgtttactgggaggttttataaaacctgttggaacattattaaggtggatctaagaggttttataaaacctgttggaacattattaaggtggatctaatggaggctctggctgtccttcatcaaggcaatgctcaaaagctttggcaactaaattcgtcctatctcatttgatccctaaaaagatggatgcttcttcgcctggtgatttcagacctattagcctaaattggtcacaaaattgcttgctaatcggctgggccctcgcctgcatgagttggttgcagctaatcaaagtgcttttgtcagaggaaggtcaattcatgataattttatgctagttcaacaatcaattaagtctcttcac

SEQ ID NO: 53650 - DNA, 584 bp, Zea mays
  unsure (1)..(584): unsure at all n locations
  Clone ID: MRT4577_148931C.1
tcctctctgtctctctagggtttttgattttagccgccgccgctgctcatctcacatccctcgagaagacgcctgctcctcgccgatcgatacgatggccgtcttctccgacctccacaccgccgacggcctcaagtccctcgaggctcacctcgccnggcaaaacctatgtgtctgggtgactccattactaaagatgacattaagggctttcgccgccggggccgtcgaaagcctgccggctgagtttccctaaaggccccccgcttggaacaagaaccgtctcttgcgggtggaaacccccaagattccccgggaaaagggtgggggggggaaaaaccggccggggggaaataagtttcctgggggaaaaccgcccccctgggaataaaaggcttaaggaaaaaaaataacccccctggtcttttcttggggggggaagaactgcggggggggggcaacaaaaaagcggctctttgatgaggaggcggccccccccactacaataaaagaccccttcttttaaaaaaagaaaaaaaagaagggggggggaacccccccccccccccctcttgggggggggg

SEQ ID NO: 53651 - DNA, 593 bp, Zea mays
  unsure (1)..(593): unsure at all n locations
  Clone ID: MRT4577_148932C.1
ggcccgctcgaggccnggccgggcccgggaccaccatctacagccaacgaactgcagagcagaaacagctgatcagagatacgtgttcttcctcttcgagttcttgtggcttgccaccgacagagtacggctatgttgaccgcctgtaaggcgatctagtcgcaaagcggcgctggcatcgggaggtcgacaacacgctgacgatcgaggcaggtggaggaggccccgccgcaagccatggaggtgcgcgtgcaagatcctctacaccggcctctgccacatcgacgtctacttctgtgaactcaaccggcaaactccgcctttccctatgatcttgctgcatgaagttggaggcattgttgaaagtgtccaacacggtgttaccgaactcaccgccgggtgaccatgtcctcccggtgatcactgctaagtgcaaggactgtgcccactgcaattctgaggagagtaacctctgtgacctcctctcgatcaacgcgtattctggcgtgatgatcactgatggagagtctcgcttctccatcgatgccaaaccgttcttgcacttctccacgacctccaccttcagctagtac

SEQ ID NO: 53652 - DNA, 591 bp, Zea mays
  Clone ID: MRT4577_148933C.1
cgctcgtgtgcggtattttgacctaccagtacggtttacaattcgccgccatcacagccactaccatggtggcttatacagctttcaccatcactaccaccgcctggcgcaccaagtttcggcgacaggctaatgcagccgataatcgtggcgccaccgtcgctgttgactcgctgatcaactatgaagcggtgaagtatttcaacaatgagaaattcgaggtctctcggtatgacaaggctctgaagcactacgaagatgcatcgatcaaggtcaccacctccctggctttgctgaactctggtcaaaacatgatcttctccaccgcgctcgccgccatgatgtatctggctgcggacggggtggcaacgggcacgctgacggtaggcgatttggtgatggtcaaccagctcgtcttccaactctcagtcccgctcaacttcctcggctctgtgtatcgtgaattacgccagtctctgctggacatggagactctgttcaacctgcagaaggtcaatgtgaacatcaaggagaagcccaacgccccgcttcttgcactccgcaagggtggcgaaatccgatttgagaatg

SEQ ID NO: 53653 - DNA, 354 bp, Zea mays
  Clone ID: MRT4577_148934C.1
ttttttttttttttttttttttttttttttttttttttttttttttttttttttttttttttttttttttttttttttttttaaacccaacgaaattgggggggttcgacaaaaaaagtcccaaagggacggggggggggaccaagctttcttggtttttaactcaaaaaacacaaaaaaggagggggggggggggcaccactttaaaggccgggaattggaccacctttaactttttaagaggggccggaaaaatctggatcaaaaacgggcaattaaggaaatctaatttaaaggggacctggggggccggaaaactaaggcacgggtaaccccccccccgcggccatgggt

SEQ ID NO: 53654 - DNA, 1296 bp, Zea mays
  Clone ID: MRT4577_148935C.1
tacctccgagccccacgcggccgcccaccggtccagtctctacagcctcagcacggacccggcctgcctcctcttctctctcacggcgacgactgggcgaccgaccaaccgtcgctgcgctacgccaggtgccaaggtcttcttcgggtccttcgccggcgaccagcagcaccaggcaattgcacttgtgtaagaaatggatgctactgccggttaattgcgatacagatttatatggacatagatattggggccatgtgtaagggcggaagctgttcctaccgcgtcaataaggggagtcctgctggttctaccaggaagatccgttccacagcctctcaaggtcggatggcatctgacacagcgagggtaacgaaaacagaggcatcaaagctgaagaacctgatctcggcatcattcaaacccttgtctctgaccattcccatcggcgacggattccacgaatcgctccctttcagccattgtcatttatagtagagaaagacctacaagaacgtcgaggtgctttctgcaggatctcataatacttgcacgagctaggatgcagctcaagcctcctgcaagacccaagctctattcagggctcatgccccaagaagatttggatccgtaccgtgatctaataccaggcttgcctgaagacttggcgaagatatgtcttgcccttgtccctcgtgctcattttcctgccatgggcgcagtttccaagaggtggatgtcgttcctcgaaagcaaggagctggtagctgtgaggaaggaggttgggaaacttgaggagtgggtgtatgtcctggttccagatgctggggcgaaggggtcgcactgggagattttagagtgttcggggcaaaagcagagccctcttccacgcatgcctggactaaccaaagcggggtttggtgtggttgttattggtggtaagctctttgttattgcgggctatgccgctgaccatgggaaagactgtgcttcagatgaggtttatcagtatgattcttgcctcaacaggtggactgtgcttgctaagatgaatgtagctcggtgcgacttcgcctgtgcagaggtcaatggggtgatatatgttgctggtggatttggtccaaacggcgagagtttatctagcgtcgaagtgtatgacccagaacagaataagtggacactgatcgagggcctgcgcagaccaaggtggggctgcttcgggtgcagcttcgaagggaagctgtatgtcatgggcggagggggatccgctctataggatccaagcgttcgggcgcg

SEQ ID NO: 53655 - DNA, 683 bp, Zea mays
  unsure (1)..(683): unsure at all n locations
  Clone ID: MRT4577_148936C.1
cccacgcgtccngaacaaaatttcagtcacgtaaaatattaggagacccgtttgttctctcctcttttctgaaggctccaacgtgctcgtcgcctcgcctgggacgggaacaaacccgccacctcgccgtctccggctccgaagaccaaaagccagtcgttgcctccttggttccgcttccgcccgctcgactcttgcttctgcttccgtcgcaggcgggggccatcgaccgataagggttccgggatggacttgcaagcggcgaggctcgacgccgcgcgccagcgggtgtatacgggggcgccgacctcctccgcgctggggcagccccagccccagccccagcatctcggcgccggcgaccgccgccgctgccttcctcctcgccctccgacttctagaggcgagacgcgcagcggcggtgtggggaaggcggacgaggtgcgcggtactcgggatcgggacacgcggcacggcagcggcgtgatgacgtgctactcggtggctgttgtaacgggcgacggggcgcctggggtggcgcggaaggacaagggagtcgccgagttgggcggcaagaggtgtctcgacttggcagaggagaagggagtcagcgacgcggggagggaagatgggcctggcttggcggcgtacccactgcgccctgcctaagcgagctagtgtcg

SEQ ID NO: 53656 - DNA, 840 bp, Zea mays
  Clone ID: MRT4577_148937C.1
agctactgtatatcctctctctctcgttctcgagaaccgagaatcgaatagaaggacggtcttaccttgccctaatgcctcctcgtccgatccattcctcaaacaataaaatatccccagatagctaggctcggccgggacgtacgcatggaggtggaggaggagctgcctgctagcgctgatcttaccggtggctcaaagcaggcgaccactacgacgcccttctacctcgccttagatcacacagcttccgccaggtcgtctccaccgccggcagaggcgccgccgctgccgcgtgctgctgctgccaacagcgagaggggatccgaaataatcaaggcgaagattatgtcccacccactctatccggctgtcttgagagccttcatagactgccggaaggtcggagcgccgccagagattgtcggccggctttccgccctcgctgatgacgtcgaaatgaattcagacgacagacaagaacagcgacgagcagtagacccagagctcgaccagttcatggagatctactgtcacatgttggtgaggtacagacaggagctcacaaggccaatccaggaagccgacgaattcttcaggagcatggaggcccagatcgacacgttctcgttattagatgacaacggctacgaaggatgtggctcctccgacgaagatgagcaagaagccgtcgacttgggcggcctgtcagttcttgagaccggcagccccgtccggggaggacaacgaattgaagaaccgcctcctgaacaagtacagcggctacctgagcagcctctggagggagctctcgaggaagaagaagaaagcaagctgccg

SEQ ID NO: 53657 - DNA, 527 bp, Zea mays
  Clone ID: MRT4577_148938C.1
gcctgctctactctgtcagcgattattgatgcatgcctgtatggaaggaccaaactatgcctctcatattgagcggatcctatatataccctgtcgctactcctaactatagtatatgcatttcgaaagattggctctcccgttcactaaagaaaatgttgttacgtaaaacagctatctttatagagattgataatgatatgacgcctagactcgctccacaatacaccgcttgtcccgcaatttccccttactacatattatcacttaacgagaacgatgaggtccttggcgactacgtgacattatatcatggtcaactctgttgaccgtgtatatgcgttggggctcagagtggactattgaggttggttatactatcgaactagataaccggaagatacaagttgatagaatacctgttatttattcgtcaaatacaaacatagttctctttatccatacagaaggcgtacctgccgggtcggacgatggactgggcgacctcctacgcactggcggacgct

SEQ ID NO: 53658 - DNA, 218 bp, Zea mays
  Clone ID: MRT4577_148939C.1
ccttttctctgtttttttttccttatgataaacctgacttcctaacgagccatagaacccatgctcatcatcccattcttccctcaaggaagaacagagtcaaatatttaaaactgcactggagtgccagcccaccccctcaagaatgccaagcctaagcgcagggattgaccgtctaaatagagctatcgtggggaactagacccctcgggtcggcc

SEQ ID NO: 53659 - DNA, 329 bp, Zea mays
  Clone ID: MRT4577_14893C.1
aataaaggaggctttttccaccttttattacccctgccttaagggcaaaaatgataataaaaactttgttctacaaaaaagagaaactataaaattttcagcccctttagggaagaaaacttggcaattccaacttctcaaaaaggccgacccgtttttgcctggcagacgtttttttctggcttggggccccttaggaaaagggaagaagactaattcctccttctttggggaagaaccttggggggaggggcccctaaaaaaaacattggggtcttgaaaaccgcgagaagggggttataccccgctttggggctcggctttagggg

SEQ ID NO: 53660 - DNA, 684 bp, Zea mays
  Clone ID: MRT4577_148940C.1
cccacgcgtccgtcttaccttgccctaatgcctcctcgtccgatccattcctcaaacaataaaatatccccagatagctaggctcggccgggacgtacgcatggaggtggaggaggagctgcctgctagcgctgatcttaccggtggctcaaagcaggcgaccactacgacgcccttctacctcgccttagatcacacagcttccgccaggtcgtctccaccgccggcagaggcgccgccgctgccgcgtgctgctgctgccaacagcgagaggggatccgaaataatcaaggcgaagattatgtcccacccactctatccggctgtcttgagagccttcatagactgccggaaggtcggagcgccgccagagattgtcggccggctttccgccctcgctgatgacgtcgaaatgaattcagacgacagacaagaacagcgacgagcagtagacccagagctcgaccagttcatgacaatggatctgcatgtcgtgtgtgaatgtgcgcgcacaggagatctactgtcacatgttggtgaggtacagacaggagctcacaaggccaatccaggaagccgacgaattcttcaggagcatggaggcccagatcgacgcattctcgttattaggtgattatgtttaactaaactgagttaataatcttgagttgtttttttttcgtc

SEQ ID NO: 53661 - DNA, 640 bp, Zea mays
  Clone ID: MRT4577_148941C.1
gaaaggtcgcatataggcttgcgtggcgccgtagctgcaggctccatgatggtatcgttctttttgctgccttgatcgatttcttgccggataagctcttcctccatcctatcacttgcatcgttcgctgctggttggcctgtctgctcttcattttgcccattattcttgacatctaatttggcttcagattgattgttcttcccgattcgatgagcatcgtcttggatatgttcctcctccgtcttgttaggtttatcatttttgtgcccgccatcttcctcttgtgccaaattactcggcgtattcgacgacggcaatggtggggcagccccggtggcctgatcagtacgcacggcagacaaagactgcaggacaccaatggcagttcgtgaaccgaactgggaagaaagagtggtgtagagcacgaggacgaggaagaagccgaggaggaatccgaccacgatccggtggtactgtttcaccgtgttcttcgccaacgccggccaccggcgccgttgacaacgacgacgacggcggcgagtcggcacccatccttcgctggtctccttatctttgatcggccgatggatcagaggcctggcctagcttatgcgacgacggtggtattagctatgcg

SEQ ID NO: 53662 - DNA, 765 bp, Zea mays
  Clone ID: MRT4577_148942C.1
ggtacgcctgcaggtaccggtccggaattcccgggtcgacccacgcgtccgccccttccttttggacaatgctttaggtatattgaaatatttaagagcagtcgagctgaagttagaactcattatgacccaccacgaaaacttatggccatgcagcggccaggtccctatgacagacctggggctggcagagggtataacagcattggcagaggagctggttttgagaggatgaggcgtggtgcttatggtggaggctatggaggctatgatgattataatggctataatgatggctatggatttggttcagatagatttggaagagacctcaattattgtttttcaggaatgtctgaccacagatatggggacggtggctctactttccagagtacaaccggacactgtgtacacatgcggggattaccatacagagctactgagaatgacatttataattttttttcaccactcaaccctgtgagagtacatattgagattggacctgatggcagagtaactggtgaagcagatgttgagttcgcaacccatgaagatgctgttgcagctatgtcaaaagataaagcaaatatgcaacacagatatgtagagctcttcttgaattctacagcaggagcaagcgggtggtgcttacgaacacagatatgtagaactcttcttgaattctacagcaggagcaggcggtggtgcttatggtagccaaatgatgggaggcatgggcttgcaaaccagtccagttac

SEQ ID NO: 53663 - DNA, 286 bp, Zea mays
  Clone ID: MRT4577_148943C.1
tatatgctgcttcttctgtggcatcttctacgtcattgtctgtcgtgggctacgcataaggaacggatgatgacagcgtttccaggagccagtcttggcctgtcaaccacgatgaagctggaccatctgctgacgcgcagtcattctcagacacgatcaaatctaggctgcagtcagtctctacaaagtacaaggactccataacgaagagcacgcgcgggtggaaggagaggtggttcgcgcagagcagccccatgtcgaattttggcttggagatgaggaggga

SEQ ID NO: 53664 - DNA, 1862 bp, Zea mays
  Clone ID: MRT4577_148944C.1
ccacgcgtccggtttttttgttgacgttacagctgcagccctgctcttacctaccaaagccgctccaatgatgaactcgcttgtatcattacttcgttagccacttccctcacacatcctgtttcttgccgcactagaaacgtcgatccagcaatggctgctaccccgaccatcgttctggtgcccgtctggggcattggccacttcgtaccaatgctcgaggtcggcaagcggctgctcgcacgcagcgcactgcccctcaccgtcaccgtgctcgtaatgccgttgcctgcagaggcgaagcgggcgtccgagatcaccgagcacatacgccagcaggaagcctccggcctcgccatccgcttccaccatctgccagcggtggaacccccaaccgaccactcgggcatcgaggagtacatatcccgctacgtgcagctgtactcgccccacgtcaaggcggccgtcgccgggttgacgtgcccggtggccggcgtcgttgtcgacatcttctgcacggcgctgttcgacgcggcgcaccagctcggcgtgccggcctacgtgtacctgatcaccagcgccgcgatgtgcgcgctcttgctgcgctccccgacgctcgacgaggaggtagccgtcgaggtcgagttcgagcaaatggaaggcggagtggacgtgccagggctgccgccggtgccggcgtcctgcctggccgacggggctggagaacagaaagatcccgacctatcgctggttcctgtacaacggcaggcgctatatggaagcagcaggcatcatcgtcaacaccattgccgaggccgagccgcgcgtcctcgcggccatcgccgacgggcggtgcacgcgtggtgtcccggcacctccggtgtactcgatcgggccggtgatcccctccaccccgcccgccgagcagcaggcgcaggagtgcgtgcgctggctcgactcgcagcctccgagctccgtggtgttcctatgcttcggcagcggtggctgcttcacggcgccccaagcgcacgagatagcgcacggcctggaccgcagcgggcatcgattcctgtgggtgctgcgcgggacgccggagcccggcacgaagttgccctcggacgggaacctcgcggagctgcttccggcggatttcttggcgaggacgaaggatagagggctcgtgtggcctaccaaggcgccgcagaaggagatactcgcccacgccgccgtgggaggcttcgtcacgcactgtggctggaactcggtcctcgagagcctctggcatggcgtgccgatggtgccatggccgcttggcgccgagcagcactacaacgcgttcacgctggtggccgacatgggcgtcgccgtggcgctgaacgtggaaaggaagaggaagaatttcgtggaggcgaccgagctggagcgagcggttaaagctctgatgtgcgacggcgagacagcgaggaaggttagggacaaggtcatggagataaaagccgcgtgccggaaggcaatggaggagggcggatcatcgaacatgtcgttgcagaggctctgtgatgcgctcgtcgaaggcgcggtgcacccgggaaagtgatgcccacagagttcaatcaggaggctctgtccaccagccatccaatggtgtacatgtattctgttatgagttctctgtttttagagcaagttaaataatattttttatgagttctctatataatgctcaaataatttatctaacataaatattatagcgataattattttagaatatagacagtatatttcttctattttaaaataaatattgtatttggcttcgtgctcatcatattttcagatttataaaaaaaatgttaacc

SEQ ID NO: 53665 - DNA, 271 bp, Zea mays
  Clone ID: MRT4577_148945C.1
caacaaatgggttccgagtcatgcttcgccacgtcgattcgggaaaaaattaaccaaactagagcgtgtccaacacgggatcaagcgtggaaagagcaggcttcagaagcttaatgcaatggtgttggcagcatcatcaacacctgattctgaagatcagttagaagcccctattcacgcaggaaatggagagtacttaatagagttagccattggaacaccaccagtgtcttaccctgcggttttggacactggcagtgaccttatatgg

SEQ ID NO: 53666 - DNA, 147 bp, Zea mays
  Clone ID: MRT4577_148947C.1
atgagtactttaaatccggtatatcatgatcaatccaacgaggccgacaatgtttcacttatcccctcccgcctcagctctgatggcataggagaagtggcggactttgttgaaggagctgaacgtggacgtctggaggattattag

SEQ ID NO: 53667 - DNA, 612 bp, Zea mays
  Clone ID: MRT4577_148948C.1
cctcgaggccggccgggatctttctcttacacatctgagggtacgagatttctgtccaacctagccacccagggagaaagagaccaaaagggaagggagagtggcctcatgtattccattggcgcttcctataggaccgatcctctacatacgcgctctggacaagatcatcgcagcgtcctccgctcccgggactgcctccaaccctcacggcggtgccagacgccgccggactccgaggataatacaccggatctcccctccgacgctaccagaggaccgagtcgccaagactatatagtacgcgagtaccagggaagcgacgctatgcgggactactatgtgcccatgctgttctcaaatatatcccgcgagccgcttagtgcgacgaacagaatagtgccgactgctgagccttgtgaacgactagcagatgccggacttcactccaagagtagctccgagactgaaacgagacacacgactacgaggagctgcaactgatgtggcacatgccattatctgtgaatgagcaccttctagcgggtctatagcacaacaatctggagatcacggctgaggtcaagaacgactagaaatatgactacgaca

SEQ ID NO: 53668 - DNA, 415 bp, Zea mays
  Clone ID: MRT4577_148949C.1
ccagtcgccatcgagagacccaaggaacaaggacgccgccgcgcggaaaactcgtggtcgccgccaatcctcgctcccatcgccaatggggcctgggggtcaacccagggggcttcgtcccatcgtcggggttgtgcccgtggccaagttgggggggaaacgaccattatggcgagcccaattgcacaccgaagattgtaatccacatcgaatccgcccttgacgcggtcagagatctctgcgcccctattctccgcgcgaggttacgagccacctgaggagcaagttggtacctggaatctcaagtcccaggtcaagaacagataccgcaggatgaggcgcatggaggatgctgtgacgagtacgtgagaggtctaggccgtcgtcttccagtcaaacttgggttgctggatcc

SEQ ID NO: 53669 - DNA, 412 bp, Zea mays
  Clone ID: MRT4577_14894C.1
aaggggggcagcgagcgagcgagccacgtacgaagcggtaggtagcagcagtacgtgctgccgccaagctagtgccaatggcgagggcgatgctcgtggccctggcgctggtcgtggtggtggcggtggagatcgcgaccagcgcgttcgccggcaagatcagaatgaggatactagacagcatcgacgactcgatcatttacaacaacaggtccaacgcctcagcctggtacaacatgacctacttcgagtcggaatgccgcgtcttctattccgacatgaagctggctgatgagacgggatctgcaccggctcctgcaacgacgccgtagccgacgaccagttgaagcgaggaaagtggaccaaactgaaggcccggctactatcttttgctataactaaaaatagggcc

SEQ ID NO: 53670 - DNA, 238 bp, Zea mays
  Clone ID: MRT4577_148950C.1
gagagagtagagttgcttttgaaatcagaaagtcagtgcagggttgtagtgttgatgggctctacttctgatcttggtcactgtgaaaaaatcaagaaggcctgtggaaattttggcattccatgtgaacttcgagtaacatctgcgcataaaggaccagatgaaactctgaggattaaagctgagtatgaaggggatggcattcctactgtatttgtggcagtggcaggcagaagta

SEQ ID NO: 53671 - DNA, 473 bp, Zea mays
  Clone ID: MRT4577_148951C.1
gggaaacaagcttcattttcttaaaccgataccaatattttggaggataagataatgggccacaacacattctaaccgattaccaagcttaccttgagaaaattggaaaccaaacaattattcccacttaaaccaaaacaactaaatggcccttactggtcctttttgaacacacccttggcgcttacataaataccattcaaaaacttcctggaatccctctttttgacatggcatttctggttgatgaaggcggcggaaccaaaaaataacttgaccgcgttgccattgaaaataaactcggccctgacctttttggaacggaggatgggcacccccgcaagcatggtcacctttttgaacttttttttgccgaggaaggtccttattttcatggcggggttggaattggtgaaggaccccttgatggggaaatgggcctaaaccaaccttattttggagcgggaggcccc

SEQ ID NO: 53672 - DNA, 263 bp, Zea mays
  Clone ID: MRT4577_148952C.1
gacatactatatcgccaagtccccttactggatctctttactcgcctcgcgttagagcccactgcttgcgacccgcacatcttcctacggtactaggcatgggcgccggcgccaacaaccacgaggagaccagccccctcattccatctgcggatgccgcccccgcggacgaaaagccgcctcaagctcccgcgccagacgccgccaattactatgccgacagtgttcctgtcgaaataaaagagcccaagtcggcccacgcc

SEQ ID NO: 53673 - DNA, 789 bp, Zea mays
  Clone ID: MRT4577_148953C.1
atgtgtgtaatcaaagtcttcctgccgattcgctggttcaagcgtctcccgcctctcccctggcgataccccgccgccgctcgcttgtccccgttcttgagcaatcatctgcctccctctgtccccgcacaatccctggttgggagggggcccaaggggcggctgcggccagatggccagtaacgtgcaaagatgagcagtagattactatcgatctgctccatcgccggcgtccatggaggccttctacctccaccttctccgctcctgcgcggcgctaccgcacgtcgcggcagtgcacgcccacctcgcgcgcgcgcacccaaacgcctctctcttcctccgcaactgcctcctggcctcctactgccgcctcggggtcggggccccactccacgccgcccgcctgctcgacgaaatgccccgccgcaacgccgtctcctacaacctcgtcatcgtcgcctactcccgcgcgggactcccggccctctccctggcgacgttcgcgcgcgcgcgggcgcgggccagggtggttgaccggttcacgtacgccgcggcgctcgccgcgtgctcttgggcgctagacgtgaggacggggaaggccgtgcacgccatggtcatcctgggaggtctcggcaacggggtgttcctgtccaactcggtcgccagcatgtacgccaggtgcggcgagatgggcgaggccaggcgcgtgtttgatgcagccgaggagcgtgacgacgtctcgtggaacgcgctgctctcccgggtacgtcgtgccggcgcacgtga

SEQ ID NO: 53674 - DNA, 785 bp, Zea mays
  unsure (1)..(785): unsure at all n locations
  Clone ID: MRT4577_148954C.1
ttgggtacctcgaggccggccggngaacagcaacaagcgcaaggcggccaaacatctctagctaagctagcatccctctagctagcatccagctgaaaagctgcaggtgacgatgtttcgacgcgccaaggccaccaccaccaggctcctcctcctactgatggcgaggtgaggattcagaaagttgacaagattgaggtcgtttacaaaaacatactctccaagccaaaactgtacaagcctactgcggcaaccgggaagcaccctactgctggtcatgaggtcgcaggctggaagaagaaggtcgttgatcagaaccccagcaggcctagaagtgcagttcatgtagatgacatcaacaagctgtctgaaaggtacatcacagagatgaagaaacgatttcttggctagcagctagtacctgatgaacctcctgtgatggcaaggtggtgaacttgtgatattaattgctgtcgcccatgtacgtaattggtttggttatatatatgtatatagttgatattgctatgtgggatgaatatatatatatatatgtgagagagagaatactttagttataaatgctactattgtgcattttgtatccatccatgctatctgtatcatacagagagaacataatgttgagtaacaagcttaaaaaaaanaannaaaaannaaaaaannaaaaaaaagccgcatcccttctttcattcgccgccgccgcctgctctctgctgccgtcgccatggggaagaggcctgcgagatgctatcgccagatca

SEQ ID NO: 53675 - DNA, 293 bp, Zea mays
  Clone ID: MRT4577_148955C.1
atagttgttcgtttggggaaggaacaaaccgtgagcaaaatcttaacgcccgtttagatcacaaaaaccaaggtgacgttaccggtctgaggggctatacttttcatggcaaagaaagccaggctggggtccccatgagggcgcaggtcaaggcgttaaactgggtttgggagcatgtgaggcattgccctgtacagtctcgggtggcgcagacctcctttgtggatttcggccggggtggcattctttttggcgcaccgccttagccggcaccttcgaaataaccgaagggg

SEQ ID NO: 53676 - DNA, 823 bp, Zea mays
  unsure (1)..(823): unsure at all n locations
  Clone ID: MRT4577_148956C.1
cccangccgcccttcctactanggttttccgattattaggtttctacaacctttcttcgcccccccccanaccccatgcacccccccccggtgctcccgttcccaatgggcccctnccccgctaccgtggccgacgcgctntccccctttttcccctccctccccccccccataattactacaccccccacgctcctatccttccaccacaccacactccacctanaacccacacccccggggacgccctccggacccccaccccccccacccgcccctccccggggggccctatacccccctcctatcttttttgccaaccaccccgccccccaccctcatcccctcctccccccacaccaccccatctccccacacacccaccaccacgccctccccccaccccaccccccccgactgccccccgtccccctcccgcgccccccccccatcccccccccacaccccccctccccccccatccccccccgccccagccaccccacaacccccaccccacccacacccccaaccccccccccccccccccttcttcctcatccagaccccgccccaccccccccccccccccccccaccccccaccccacccccctcctccccccctcacccccccccacccccccccactctaccaccccccccgccccatgctcccccccccccccctcccccccccccttatcatttccgcctcccccccacccccccctccgccgcccttaccccccccccccccccacaccccctgctcccccctcaccccccctctccccccccctcactccccactccccctcccc

SEQ ID NO: 53677 - DNA, 1436 bp, Zea mays
  Clone ID: MRT4577_148957C.1
ttgggacctcgagcggccgggaacacccacccatcccgtcaggacccggaccagagaccaatcaagggcgtctcggctcatcacaggcgctgcggcgaccagggcacgcggcacggaggtcgattggccgaaggttgggggaccggcggtcggcaccccagccgtggatcgagtgcggagggggagaagcgtctatcccatgtcccgcgacggcggggaatagggcgacagctgcggcggggatcggctgcggcggctcgacgaggcggcggcggcggcgcgggtgggcggcggcaccatgtctgcggtagtctgtggcaagaggtcctcctccatcttcgccgacgagctcctcccgccatcccctacctcccctcactcctcccaccagccggcgcccaagaggtcccgccggtccccctcgcaccgcggcagctccgacggacaccgacgggaggcgctcgtccaccatctgcttttactcttccccgacatggatccacagttgcttgaaaaagctctggaagcatctggagatgacttggattctgcaataaagagtttgaatttgctacgcttagagtcagcagaggctatcttgtcatctactggtttcaaatctgaaaatggtcagcatactgcaattcagcctcctgttgaaggaattcctaatggtggtgtggatacgactacagaacatcatcctactgtagataattaccagacaagtaaaaatggctctgaatgggttgagctatttgtcagggagatgacaaatgcttctgacatagatgatgcacgggctcgtgcgtccagagctttggaggctttggagaaatcaattgtagagcgtgcaggagctgaagctacacagaaccttcataaggaaaacatgatgctcaaagagcaactgactgttgttctgcgagagaatgctgtgctgaagcgggcggttgccattcaacatgagcgccaaaaggagtttgacgagaggtctcacgaggtccagagcttgaagcaacttgttttgcagtaccaggagcaagttaggacactagagataaacaactatgccctcacaatgcacctcaagcaggctcagcagagcagctccattcctgggcgtttcaaccctgatgttttctgagcagagactaataacctacgaagataccttgttttacaactgcccctgaaatggggatacctgatgggtggattcaccgcccatgggtccaaaattttcaagttacggtttgatttaaacgcgttgctttcacccaattggatatcgatatattatgtgttccctttttcgggatatggtttacttcatccatggctatcatattcgtcaacgtaatatagaaatactactgtatcatattgcagttcagttttacttcagaaaagagttaaaaaaaaaaaaaaaaaaa

SEQ ID NO: 53678 - DNA, 398 bp, Zea mays
  Clone ID: MRT4577_148958C.1
atagaaacgggccaattcctacccatatcagagggtcattttaccttggttcgggagctcagattccaacgctcggcaaattcaaagccatacatgtggctctgaccaagtccaatctatcacaataagctattggggggaggcacaccataccaataacgttgggcaaccaatgtcacaaaccggttgtacatgcagagacagcgcactatacaatgggtggagcccataccatacaaaagggggagcctattccaaacaagacttcatgtcctgtggatccaacccacctatttgtggaaatgtaccacacatattttgagacttggtggggacaaaaaactagactaggcctagacgaggtacctgtgaacccctacaagcactgactgtgaaca

SEQ ID NO: 53679 - DNA, 757 bp, Zea mays
  Clone ID: MRT4577_148959C.1
ccacgcgtgcgagggggagtgcaaaaacacacgagcgagatgtgtatctgtgattctggataggggcgcaggcaccgattggctccggatatcgcagcgtggcggtcgctcagttcagtccgccatggaaggtgcagccggccaaatgctcgtcccgatcctcggcatcgttgccgtggccgccgtgaccttctacaccgtcagcttcatggagatgcgagacaaatccttcgaggagctcgacgagaagtactcggacttcgacgagtcaggcgggcggcagcggcggtctcgccgcagggccgagcgcgacaggaagaagtccaaatgattggccacgccgccatttgtgtccctgctggtttgagaggggactgacgggggatgaagacgcagctgctacttacaaatttttgggtttcaagtcatgggtgagtgtgagtgtgagtgtgagtgtgtgtggttatgaacatctgcctatttcctagctattagccactgaagcagctaaaacgatggatttatttaaaagatcgactccgtaatacattatgtaccctctgttgtgctttcagttctgtcatcgggacttataaaacaaatttcccatggattgcttctagattgcgtagtccaaacgccaatttccctttgcataagcttcacgagctgttgtgagtcttttttttttttgaaaaaaaatagtttataaaacagttttacgggcggggaaaaaaaaaaaaaaaaaaggccccta

SEQ ID NO: 53680 - DNA, 270 bp, Zea mays
  Clone ID: MRT4577_14895C.1
aaaaccccaaaaggatatcataagtatattgcccaagctataagacctcaacatggaaaagttgccataaactctaatactttgacggagaacattattttaatacgatggaactgacatacgaacaatacttcacacattggtcctcaacaagcaatactcaggatgcaacccacaccttaaaacccttcaaacgaatcacctaccttaatgagtctcttgatcatccattgcattttgctggtctcatcatacggttggtgcacacgc

SEQ ID NO: 53681 - DNA, 325 bp, Zea mays
  unsure (1)..(325): unsure at all n locations
  Clone ID: MRT4577_148960C.1
agcagtggtaacaacgcagagtacttttttttttttttttttttttctgctttttttttttttttttttttttttttttttttttttttttttttttttttttttnttnnnnnaaagggccaaaaaagttttcatttttataatttaaaaacccgggccagattaaaagccccccggggcgaaaaccggtggcctgcaaagcaaaccccaggcccttggggggctgttttgttaggggaccgcccccaacatggcccggaggggcccccacccccccccccactttgtacggggggcccctaaacaaagggaacactaggggggg

SEQ ID NO: 53682 - DNA, 711 bp, Zea mays
  Clone ID: MRT4577_148961C.1
gggtacctcgaggccggccggggaaaccgcatgagaggatattattgatataagtgcgagcatcacaccagtcgatcacctgcaactagctggcggattcgtcgtctcatctctcgtcgatgcatcccctggccgccgatggggagactgagaggctggcacgctcaggaggtcccacttagaggatccgatgtgtacgatctgggcgcatggatcctggagtctccgccacatgataccaagacaactgttctccactgcggcatcccagctccccagacgtcgactcctcgatcctctcctctgccatctagaaatgccccaggcacgcatgcgccgccgccaaatgctgtgactgctctgcctcctatgccgctaagaacctcaagacctgcgacgggagagtcgcttcgggggactggactacgctctcccatctcatcctggctggcaactatctgaacatcatcaggattgctggacctgtgctgcccgactgtctggtgacatgatcgaaggcaagactccggcaggagatccgcaacacattcagcatcacgaacgacttcacccactactgggtggatgagatccgcatgctgaaccagtgggcctacgagtgattgttggcttcctttctctggtgatggtgcgggctcttttacaagaacatatgcatgactgcactgcactctactatgctagtctatc

SEQ ID NO: 53683 - DNA, 789 bp, Zea mays
  Clone ID: MRT4577_148962C.1
ggactcgaaacagctatactatgaaaattagtttaaaatttatttaatacctaggagcattttggcgtcgtgtgtattagtatgtttgtttatgtctgtgtaaaagatggtcaacgatataagtagaatcgtatatcttttatgtaaaagtgggcggagtacctcgtgccttgattggcatcatgcatgggagcgctacagctatagctcctgatcaagttttctattgcaagtttcaaaccttaccaatctttcacagttttcccgtcaacacccaagagtaagttttttattgtttttaatttatttatgtgaacatgtatatatggtgaaatttttaatggctgcagcacacctttggaacgatcacagacgtgaaccaatatgtccaggacatggatgtcacggtttaggtcacgcctcgatcctttgtgagatctctagagaaccaatatgccatgctaaaactccatctccgtaaaaagaaatgcaattctagattcggcaccaaatcaaacaacctttaagtttagttacatttataaataaaaacaatatcagcatttatgactcgaaacagctatactatgaaaatatattttaaatttatttaatacctaggagcattttggcgtcgtgtgtcggtgtgtattagtatgcttgtttatgtctgtgtaaaagatggtcaacgatatagctagaatcgtatatctttttatgtaaagatgggcggagtacctcgagtcttgattgccatcatgcatgggagcgctacagctatagcttctg

SEQ ID NO: 53684 - DNA, 256 bp, Zea mays
  Clone ID: MRT4577_148963C.1
acagcttgcatacagtagagcaggggaacgagaagttaacgacaggaaagtatacaggagaagagagagcagctgctgctcatgagagaagacaaggactatgccatacttgtagatatgatccacgctgcgcttctgaccattacctttttgcgtactgcagatagaagataatcgcacgatgacgtagcaactgaactgacatctgcatccgaactatctgaagtacgcctaggaattgcagacacattcttag

SEQ ID NO: 53685 - DNA, 646 bp, Zea mays
  unsure (1)..(646): unsure at all n locations
  Clone ID: MRT4577_148964C.1
ccgcactcgcanagccccagnagatccaaaaaccatacacgaaccttaacacgcctctcttcaatccttggtgcggtgcccggggccatgaccaccgccatcaacagcgacagaagcggcgaggggagctgggacccgcactgccgcccgcactaccgccacggctacgggtacggctgcttgcgcggctgctgctgctgccgctgcctgctgctcaccttgctggtgatcctcgtggtgctcgtcgctctggccgtcgcgctggtggtgaagccgcggaaaaagcacctcgaactgaaccaggagctcgagcaggacctcctgcaggacctgccgacgacctccccgaccacggtgcccgccggcgcggcctacctctccgtcaacatcacgctgatcttcactgtggagaacactgacaaggagggcatccgggacggcgtcacggacggcgacgcgatgtaccacggcgtgcaccacggggtggcggtcgggcccgcggtcgagcacgccgtgcacaagacccggctgatcaagagcctggtcaatatccaccgctttgacgagcgccagaccgaggcgcagaacctcatgcaggacgtcatgatcaacgaccggatcaagctccgcatcaacgtcgacatca

SEQ ID NO: 53686 - DNA, 288 bp, Zea mays
  Clone ID: MRT4577_148965C.1
gtcgtccttccaaggataatgcaggagcactactggtgcatattaaccaaactgtgcccggatgcatgacaagcacacgcacacggatgccttggtaggacagccgcgtctaccggccagacaaagctgaggccgcctccattgctggaggccgcaaggatgtagtacgccacgatatggactggcgagctccatgctaggacatcaacgaggttcaagcccactgtggaactggacttgatcatgggcgtaaactgcgtggaccgacaaaacacagtttataagtgc

SEQ ID NO: 53687 - DNA, 731 bp, Zea mays
  unsure (1)..(731): unsure at all n locations
  Clone ID: MRT4577_148966C.1
gggggcggaagcacttgcggcagcacttaaagcaagctttatgaaccctgtaaaggccgaagcaaatgatacggtcagtagatatcttcgagatatatgtttccttcgtaaattaactgtgaaggttataaaatatgggttttctttagcttagagatctgataatctgatagctggttgtgtaagtacacgagcaatcccatcatgctggtgttactggtaagttacttgcatcggaaatatttggcactagtatttagcatgtcaaccaggcaaacttctagtaaatatcatgagaatatggtagtgatgaaatgctgaatcatgaagtgacagctttcagatttatcaccttgacatcttatcaacatgttctattggaaattgtgatcgtaatcacagtattggatgtatgctttgcactagaaaataaaattaattatgcaggagtggtgatttagtgatcaaaggggcaattgagttttagggtacgcaagaatttgctatatatctagaattctagatgcataacagaatggatgtagcgaaaaagtcaaagcggcttagaatttggaacgagagggagtactattttttttcttgagatgttgatgcattgatgctgtgttggtgtaaatgccaacacttggtgctcttgncatctgtaacaggctgctgggagttctcagggtattagtggcggggcaggagttcagggccagtatgcacct

SEQ ID NO: 53688 - DNA, 274 bp, Zea mays
  Clone ID: MRT4577_148967C.1
tatcctacaggtgatttctgttgatcacagtcaatcattactcttgtagcacaggacatcaaacattggtattcagtcctatcaggagttcctgaatctggatccaaggaatcgtcccttagtggattgataacctcctcctgtgaccatttttcaaggccatgtgatttagttgcttcctcaaacttctgccttacataagctccatttctcatgtcagatgtatttacctctatcacattgaagccttgttctctggcgcatgcaaaaactg

SEQ ID NO: 53689 - DNA, 498 bp, Zea mays
  Clone ID: MRT4577_148968C.1
cttaaaaaaaaaaaaaaaaaaaaaaaaaaactaaaaaaaaaaaaaaaaaaaaaaaaaaaaaaaaaaaaaaaaaaaaaaaaaaaaaactctaaaaaaaaaaaaaaaaaaaaaaaaaggttttttccttgggccgccccccctttggggggttttttggatttttccttccccttgggggcggttgtgcctttcttttggggggcccatttccccttttggggggtctttttccatttccttggccgtttttttacacctttttgtttgggaaacccttgggtttccccaatttattccctttgaaaaacttcccctttttcccggttgggtttttaccaaaagggccccccccgttgccctttccaaccattttccccccttttttggtaattggcccccccttttgggggccctttaagcccgggggttttggggtttccccccagggggccctttatttttgccaggcccttagcccccgttcttttggtttttttc

SEQ ID NO: 53690 - DNA, 445 bp, Zea mays
  Clone ID: MRT4577_148969C.1
gcagcggaatttctttattacaaaagggtacaagttacatcaaatttacattaagtttattggagtgattacaaagggattcaaagaaataaatattgaaatggggataaattacttgtaagttcgaaatatatgctatcttaagtgaccatccttaataagaagtttagaagaggtacttatactattaagaaggccgagcccaccggcacttagcaccattcacagcaacacacttctatttttggttcttccttctgcttgggaaccacctttgtacaaaagaatgaaagcttcgcaggctcttcaccaaatgggatggcgtaatcacctccggtcaccgctcaaaagtcgtcttccgctgtgtagatttttcggtgaacaatcccaaggtgccccggaataaatccacccggaatgaccacatgatttgcactggagaatg

SEQ ID NO: 53691 - DNA, 432 bp, Zea mays
  Clone ID: MRT4577_14896C.1
tatgcactcggtccagcaggtcttacgaatgctaatgagagtaaatccacagggcatggccatgatgatgatctgtgtctcatggatcccgacggcaaaaatatggaacctgagccacccttccgctcgctttatagccccgtcgccatggcgtcctggctgacatcctcgatgccaagcccatgcctgcgtcgaacgagagggagaccatagacacccactggccctggcggtagtagagccaaagatctattcactagaagtacgcgacgcgccatggatcgcgtgcagccgacgatacctccgctgccatctgtccacaaacagacgactctggcggctaattgtagcacttccagagcggagacgcgttcaatgctccggttagatggtactttcgacattgaaacttgctagcaacttttacggatg

SEQ ID NO: 53692 - DNA, 417 bp, Zea mays
  Clone ID: MRT4577_148970C.1
cggattcccgggcgctctgctcgccgacccctacctccgacgccgcgcctcctcctttgacctccatcgctagatcgtcctcgtcccgacgcctctcttcgctgtcgtgcccaaatcctctcactggccggagctctagcgctctctattgttgtggacaaagaagaggcagaagatgaacgtgttttatttttagtctctatttgtatgtaaaaaaattgtttaggtagttttctagtttaaaagaaattggaaagagatccggtgatttgtttgtgctaccctcattagtatatagttaattgtgatctaatttctatttcgttatgtaattttagttgtatatttttgactttgaaatcatatgtatactaaacgattaatgtcatgtgtatgtgataatctgttttaattact

SEQ ID NO: 53693 - DNA, 342 bp, Zea mays
  Clone ID: MRT4577_148971C.1
taaaaaaaaaaaaaaaaaaaaaaaaaaaaaaaaaaaaaaaaaaaaaaaaaaaaaaaaaaaaaaaaagggcgaacgatatcataatgttccaagactaacaaaacgcaaagaatgcgagggcggaaccccttctatgggaccaacctaaaggccggccgctggtccctttttttccatcccttgtgccctggcctttgccggggggtgccctacctttatcgcctcgcatcccatccgggtttccccgggtgcccccctcctgacggggcccgccccgatcgcgctttggaccagtggcgcggcctccatggcgcctgggccgcgccccgtttccccgcgttt

SEQ ID NO: 53694 - DNA, 2052 bp, Zea mays
  Clone ID: MRT4577_148972C.1
ggccgctttttttttttttttttttttttttttttttttgataattaaaaaaaaaaatcaaaagtcgacaggagttcgtatttaagcttcacactttttatgtgaattaagttccgatccaaaacatcctttttaccctaatttattacatgaaagaaaaaaaatgttccttctagaggctactgaacatgacactgctttccaaacagacaaaaatggaatgggtccaattataccaagaggtgttctgtgctgtctgtatggtaaagaaagcatcattatatgtgcattctagagttcgaaatgcagatataagtttctaaaaaattggagaatatgccgcgtccatggcttatgttgtcttctcacaagagcctgacacgatttttatcgtcacaaaaaaatggcgtcgatgactgatattcatctgttccaaagtatctgtctccaaattcgcccatcccaggtacgacacggaaatcatcatttagaccaaactcaatctccgaagtaacgatcttcactctagggaatctcttgctcaccacatgcactccttggggcgctgaaataagattaaggaatataatatttgcttcttgtacacccttcttcaatagaagggagatggcctgaactgctgaatttcctgttcccaatatggggtccaacagaagaacatgcctatttgcaatatcttttggtaaattttgatagatgagctgttgtccattgtctccttcccgatgaataagaatcttcccaatctttatacctttacagcatgctcgtagtgcattctccatgctttcgccactcctgatcactgagataccacacaaccttttggagaactccacaccagtgtaaacagacccagtcggagtgatgacctgcttttcctggaaaggaagatgaccaagaccatgttcgacaaccaatcgaatcaaccgatcagcataaaatatgaaatcatgtgttgctgtggcagcatcccttattattgtgtgcatgcctcgtatctgataagtagtctgaattacatacagattagggtgtattttacgaagatcatgttgtccaagtttagtccgaatatgctgaacgattaggtcaattgccacatcattgtctcctccgcgtgggatgataacatcagcatacttcttcgttgggaggatgaagtcttcaaaagcaggcttaacaaattttgagaactgttctaacacagctttgagatctctacccttgtcaatggtatcacgatggatcctccttgttaaccgtacgtcagcgtctgtatcaacgaaaatcttcatgttcatcaaatccctgaggcgtgaatcatgaaaaactagaattccttccaaaataataacatccgaaggattaaccttccttgcatttgggacacttttgtatgtcttgaagttgtagttagggatgtcaacagctttgccacatttcaagttttgcatacaagagagaagtagctctgtatgaaatgcgtctggatgatcaaagttataattatggacatgtactaattcttcatccgtcaatccataataaaaggactcctgcgtaacaaccacgacacgctggtcacggagctgatcaatgatcatcttgcacacggtactcttgcctgacgatgcacccccagcaacaccaatgacaaagggctcctggtggccgttctccaggccagacgtcgttgcggaagcctggccgtccagacggagtgcggagtaatggactccggcggcggcggcgtcgagcacctcgtctaccgatttcgaacccatatttagatcgcaataggatttttcctaccggagaaaacagatctccggcccgcgccgacgccggctagaaggagcgggaaggggtggcgccgcggaggtatggggtggatctggatcgagggagggagaggcgtgctcggcgcggcgggcggtgcagagaggagagggaatagaatatataagaaatagtgattttggttccgggaaagtgccggcccggcccccctcgaggctcgaggtaccc

SEQ ID NO: 53695 - DNA, 233 bp, Zea mays
  Clone ID: MRT4577_148973C.1
gcacgagagaaaccactctcttgtgtgatcatcgtcgccgtccatgcgctactggcaaacaatgtttgcaaaacatgcaagcagggatagggacacggagtcgtagagatccttggtatatggtgacatcactattttcacacggctatatatgagtatatgacatcgtcgttgattgttagtttatttctttggacggatgcaccgtgtaaggttcttggatgcaaggctca

SEQ ID NO: 53696 - DNA, 903 bp, Zea mays
  Clone ID: MRT4577_148974C.1
tcgagccggccgggccgggaattcttgtaggctccctctctctctgcacacctcccgccgcgccgaacacgcgcctttccccttttcctctcccccagatccacccgccgcgccacccctctcggctcctcccaggcggcgtcggcccttttctcgccctcctccgtttctctccggcgtatatatgggttcgaaatcggtagatgaggtgctcgatgccgccgccggagtccattgctctgctctccgtctggacggtcccaacgtccagttttccgcctcctccgaggaagaaccaacgacgtctggcctggagaatggccatcaggagccctttgttattggcgttgctgggggtgcatcgtcaggcaaaagtaccgtgtgcaagatgatcattgatcagctccgtgaccagcgcgttgtggctgttacacaggagtccttttattatggattgacggatgaagaattagtccatgttcatgattataattttgatcatccagatgcatttcatacagagctacttctctcttgtatgcaaaacttgaaacatggcaaagctgtcgacatccctaattacaacttcaagacatacaagagtgtaccaaatgcaaggaaggttaatccttcagatgttattattttggaaggaattctagtttttcatgattcacgcctcagggatttgatgaacatgaagatcttcgttgatacagatgccgacgtacggttaacaaggaggatccgtcgtgataccattgacaagggtagagatatcaaagctgtgttagatcagtactcaaaatttgttaagcctgcttttggagacttcatcctcccaacgaagaagtatgctgatatcatcatcccacgaggtggagacaatgatgtggcaattga

SEQ ID NO: 53697 - DNA, 322 bp, Zea mays
  Clone ID: MRT4577_148975C.1
ccgagcccttctatcacaagatgttcctatactcaccaagaataactgattgaagcgtgctgtgtcatatctgcaatcgctactcacaacactctatttaaaagcacgagcatcttgatattcttgtacacatcaacgtctagggtacatccttatactatgtacttcatctcccatcaccatattagatccaacctttacgtctactactgctataaaaactcgaccaatttctatgttgctaatatctctgatatcaggtcgcgctctgaatcaaactccaattccttatatttgcacttattgtgggtcgtcaatcttc

SEQ ID NO: 53698 - DNA, 269 bp, Zea mays
  unsure (1)..(269): unsure at all n locations
  Clone ID: MRT4577_148976C.1
gagcactcnagtcggcggccgccctgtctgttttcgcgtgcgcgatcacaagcatactgtttaaaaacctacaaccaggtctggaacacggaatacccacctacgtaacccgacgggtgcacacccacaaataggttccaccccgcgtcggggtgctacccaccaccaaggtcgacctgcaagatacacgatttcgctgcttttaaagacggctgggacgtgacaaaaagggaaaccggctactgcgaaggggacgcccagggatagga

SEQ ID NO: 53699 - DNA, 224 bp, Zea mays
  Clone ID: MRT4577_148977C.1
aactacccactcgacccacgcactccttacagccaaacaattcaccccgttaatacattctactacgacaatctactacctgcgccaagtagcgatactattacacacgactttaaccatacctagcctcaaatacaaactatcacatgatctataaattcacatactcatgcatcatgcatccacatatatcttatataccgaagtctataacacttaattac

SEQ ID NO: 53700 - DNA, 308 bp, Zea mays
  Clone ID: MRT4577_148978C.1
aaacaatccatcaatccaaggtaaacaaaaagagagaaggggccccaccttcaggggggaaccgttttccaattccattgggcttagcagcaacaccaggcacccgttcttttttttttagccgggcaaacttattaagaaatttaaagggctggtttccccatttcttccccagcgggggcggcggcaacttaacaagggggggggggttcactttttaagacacccccacaccgtttcccccgccacgagatcacccttcgcgcgctttttttttttacccaccggccgttttctttttttttgcc

SEQ ID NO: 53701 - DNA, 182 bp, Zea mays
  Clone ID: MRT4577_148979C.1
gggccaggtggtcgatacatatgccgatatgcacgcggattgatccccacgaccggtgcgactggctcattcaaacctgcacgggactatgccaatacttaaccaggtctgtctcccgctcatagcttggttttctgcttgttgctaacgcttcgtgcgacggatgtccttgtaaatgctgg

SEQ ID NO: 53702 - DNA, 198 bp, Zea mays
  Clone ID: MRT4577_14897C.1
accaagaaaacaagcacgcaagaattaaggcagcgaagagctaaccgacacctgcacttggctcaacagtctttatacgaaacatgagaagggttgattaaagaatggtgagcaatgaaacaccgtgcgaatttgtgcgacgacccaaggaaacagaagaacgaggcctaaaataatgtgatacgttctgaacgagca

SEQ ID NO: 53703 - DNA, 288 bp, Zea mays
  Clone ID: MRT4577_148980C.1
atggatcatattattctcaatgatgaggttgaaccaatagaagtagttgctgcaccagatgatgatgagaggcagtatcctgagtttgttgacaagtgggatatgctagagtttgaggactatgatggagatattgtcacaggagcacaatttgaagaggctgatgaagaggaggaggaggaaaacatagctatgggggtggatgagcaaggagagggtgatgaagaggagactttagctgttgcttgtgcagacttgaaatggagtgctcggtttgctgttccttga

SEQ ID NO: 53704 - DNA, 421 bp, Zea mays
  Clone ID: MRT4577_148981C.1
aaacaaatatggtttcagtgatatccgtccatatttgattcgattacatccctaatccaactcgtcgggccacaaccgcggtggcggaggcagtgctctggtcatctagcggacgatgcgggatgtcggaggcggagcaccataccctatggtcactcgcaccatctacgacaaccgggttgtgatgatgaaggtcatgatggaggcgcgtggactgtgggaggcagttgacaccaggaacgtcgagcgcaacgaggattggtgggctatggaggcgatcctacgagcggttcctgcagagatgcatcagtccttgggggcgaaaacgacggcaaaggaggcctgtgacaacctgaagactatgcgaaccggctcagggctagtaaagcggtcaagatacaacaactgcggcaggagtacg

SEQ ID NO: 53705 - DNA, 221 bp, Zea mays
  Clone ID: MRT4577_148982C.1
gtcctattgtgttggccttcgggatcggagtaatgattaacagggacagtttcctgtacttgtggggtgaatttgtacgtgtgatacggtaactgggtccgtgtactgttcatgctacgttttcctacgtatatagtacagcacttgcgagtggctttacttgtgtgcacttcctaaaagtgtcgatattacctccatcagtaaatatgacccttgtgatg

SEQ ID NO: 53706 - DNA, 316 bp, Zea mays
  Clone ID: MRT4577_148983C.1
ttgtctcgggcggcagggagcgcagatcctggagggctggcgcgaaggcaggcgctgtggatcttctagctatcggggctgactacccacccaatgggagaacgcatggtactggcgcgttcggtgtggcactccactagccccaaagtgtgggcgcacaggtcatgcacgcacgcgtcctgcgtgcgatgaaaggagatagcctacaggtcccgaggaagtaccactacctgatgcacatgcgggtgcctgctgcacgctgtcatgatcatgtgcaggccagacgggcatgtgctcgacatcttggaggacacca

SEQ ID NO: 53707 - DNA, 647 bp, Zea mays
  Clone ID: MRT4577_148984C.1
actcctatataccatgctgtagattatatagttattcacccctgatgccatgcgatatcaggcaccagtgacagaaatggggtcacactacgaggtggaggctgatgtgtggtccgcccgggtacttctagaacgtcaactggtgcatgcgccgaactcaagccgtacgccgtctctatggatccactccaggagacgaagtgcttccatcctcaggggaacttcacaacctccagaaaaggaagggggagaaaagaatctgcggctcgctcccaaccacctcctgtcttaactacatggtactctacctggagattatggattccaaccgctgcgactctcggaagcctatggcaccgtccgcttcatttaggctaagtgactggcctatggacagctgaataacgggcgatacctcatgctgtgtgcggcgcgagccatcctcccggagatcttacgcaaaatgcgaatcatccccacgcagaccggactggcgcgggtactaagaggcgaattcctacccgggcccagctacatatactgaggcgactactacacactcctacggttcatcatggcgttcatggggttactacagcaccggaggatgctatactggtacaacccgggttccatgggaaagcagt

SEQ ID NO: 53708 - DNA, 425 bp, Zea mays
  Clone ID: MRT4577_148985C.1
ccccttggacctcctcttggaggcgccccctcgctgtttgcgcgtcgcccagcacgacctaacgaacatccatgtgtacatgcacgagatctacaccggaggacaacgacactatcgtcggcgtgctgcagacccccgtggatgccaactcgaagatcgtgagcatgatgaccgcgatacgacgagatacgccgtgcgcctgtcaccgatcgtctgagatcaacccgcgataccagtgaatcttcttcgcgacgagctgacagcctgagagactgctaccgtgctcatccatcacgctggtgaatcctaacgaggtaaacaagccgaacagcttgctcaacaagaacaaccatgatcgggatccagaggactatcaagtgcctcccgaccgcctccacaggaaactccgggatgccccccgcacc

SEQ ID NO: 53709 - DNA, 624 bp, Zea mays
  Clone ID: MRT4577_148986C.1
aatttcctcagacctcagtccctcacacactcactatacactgatactgctgcagcaagaaggaagaagctagggcctccctagctctcgatgtcagcaatggccaccaccgctgcgtgcagcctcctcaagtcgctccttcgcgggatcccggctcccttcggccacgcgcaccaccaccccgtcgtgcgtggccgggaccaccccgcgagccggcgggggccccatccgagagtccatctcctcccccaaaccggcctacgaccagacggccatacggttcagacgcatcaaggaggccatcgtgacccgcgagaggagccggagctacatgacggatatgatcacccacggcgacaacgacgagaagatcgtgacgcgccgggtccgcgtatctgatgtgcacgtacgagctgtacaaggaccccaccgagagcgtatacgtcgtgtaggaacccgtgtcctcgtccgtagatgagtggttgatagataaactgctctcgggtcatgaaggagagcagagacgaaggacctgttcctgcacgagctgccagtgttgtagacttaaccgaggactacgtggtggcttagcacaagcatgctgcatacgtgcatcgtgaggaa

SEQ ID NO: 53710 - DNA, 862 bp, Zea mays
  unsure (1)..(862): unsure at all n locations
  Clone ID: MRT4577_148987C.1
cattgggtacctcgaggccggccgggacgctctcccgctccaccattgtcaacatgcaggaggcaacgagatcagcaagcccttctcacgatttcgataaacatggacaagaccatctcgagatggtggctactcgcaccccaccgggcgagcccgagaaacagcagctggcacctgtcatgagcagaggcccagaagtgcatgagaagatgaacgcaaagctgtttatgactcttgtctgcatgtcattcctctggattggctctcagattccgctctacctcttcggctcagtccttccgctcatctatcaagatgttggtggagttgatcggtacatttggtttgtcattggatacctcattccaaacgcggcgctctgtccatttgtgggagccttgtcagacctcttcggacgtcagaaggtggctatcgtaggccaggtagcactcatcatcgggccgatcataactgcgaccgcaaacactatgaacattgccatcgccggtcaggtcttctcgggcatcggtgccggtttgaacgagcttatcgccctcgccggtacagcagaagtcgtgccgatcaaggaccgcggcaagtatgttggccttgtggtaatcaccatccttcccttctgcccatcagtgctgtgggctcagttgatcgctcaacaaagtgactggagatacaacggcatcttggttggagatggaacttcgtcggtttgatactatgtatcttctgctacaaggatccgtcccgcctgactgaggagacactgcccgncatgtcctccgncaggtcgactacattggncgtatccctagtacagttggcatcactctgntcatgatggggctac

SEQ ID NO: 53711 - DNA, 304 bp, Zea mays
  Clone ID: MRT4577_148988C.1
agaagcaagtgcaggcagagcagagagggtcctgctcgtcgctgtagtcgcctcgcatttaccactcagtcactcactcgctcgggccttcaccccctcgccttcctcctccttccatctcgatctcgtactctccttcgcacgcatcgcaccgacggacgcagagcagggtcgcccgccgtcccaccaccctcgcgcggatcttggcgccgcatgccgctctcgccctcccgcgccgccgagggcttgcctacgaggtgccctgcctccagcgtacttcccagctcaactccatcttctcttc

SEQ ID NO: 53712 - DNA, 470 bp, Zea mays
  Clone ID: MRT4577_148989C.1
gacgtgttctgtgagggccgctcagcatgcgcaagacgccgcctaagctccacaggcggaggtgctccggcaactccctggtgacggcgccgaccgcgtgctgtacctgcgcccgatgttcggctagaaccccgagctacctgaccggcaaggtccctgggacatccggtgggcacaccgggggcgctgtccgcggacccggagaccttaaccaagaaccgttagctgaaggtgatccactgacggtgggccatgctaggtgcactcgggggcgtgttcactgcagctgctcgcccgaaactgggtcaagctcagagaggcctggtggtctcaaggctgccatgcagagcttaagggagggcgggctggactacctgtgcaacccgagcctggtccacgggcagagcatcctgtccatctgtgcgtgccatgtggcgctcatgggctccgccaaggggtaccgggtttcc

SEQ ID NO: 53713 - DNA, 311 bp, Zea mays
  Clone ID: MRT4577_14898C.1
gaaacgggaactattattaaagcctgggggtattaattacacttattccagaaggccacaagggcttggtggtccttacttattccaaaagggcacgggggggaactacttattgttgggtccaaaatgtttttggaaacaactttgtaacaacattttcccccaaaaacaagcaaacaacaaaattgggatttagaatgccttgaaattgggagaaatctttttaaggccctccttgcacttttacaatggccttttctaacttggtccaagggggtgaccaaaccgagaaacccttccctttatttggg

SEQ ID NO: 53714 - DNA, 431 bp, Zea mays
  Clone ID: MRT4577_148990C.1
aaatactagttgttctttcttgagctttttttttatttttctgcaaggaccatggatattaagttcaggggcaaggacgttttttatcgccagggttcggggtgttaatgcacttgggcgcagcgcatgcatgaaaacgcaaacattgactctttgtagaaacagaaaggttcaatcctggtggtttggttaatcttgccctgctattgggaattgtgatatggattgggtatatacgaggccttactctaatcaaaaaggttgaaggaaaagcccagatctaattcactagtggggacattattttttatttccctgaggagggaccacacaagtttgatggcttccaggggggggggccctgctcattggggatcaccccccgccccaaacaagggggagggttaaagccccaaaagtgctcttttcaa

SEQ ID NO: 53715 - DNA, 2004 bp, Zea mays
  Clone ID: MRT4577_148991C.1
gccggccggtgcgagccggacgcgtggggtcggcactcggcagcaaactgaatggcgcttcgcgctgtggagctccggagattccttctccggcgcatcggcggcggcgaggcggccctgcctcctctcgcgtggcgcggccggccagcgagcacatccgccccggcggacgacgagctcgcggggaagagcgcctacgaggtcctcggggttggggagaccagttccagcgccgagatcaaggcttccttccatcgcctagccaaagagacccacccagacgtcgccgcggctgctggttcccgacggttccttcagatcctcgccgcctacgagatcctatcagattcacagagaagggctcactatgatagctacctgcgatcgcagaggcgagttgtggggaaacatcccaggccatctcagttcgtgtacccaagtggttcaggctcaggcattgtggtacctcgagagagcaatgttgttgaatggctgaaatggtacaggcttaccattgacgacatagttaccaagaagagggttgccactggctctggttattttgaaaggctcgaaagcgagctgtacacggctatccatgctgcatactatggccctgatgtcgactccatggatgtccttcctgattgctttgaagccgaggagagatctgcatatgaaacctctgagctattacaccttgtttcaggccgtgatctttttggtattgttactgtaactgatagtgtcaaagagctgtcagatgtttgtcgtgaaaaactggtaccctctggttgtagatcttcggaatttactcatgttgtttcaagaaatgcgaataagaattcaatatctatgaatcctgttgatatgaacaagcaagaaatgcgatatgaaaatgatgttccttcatcagattccttcaaggacattgagttgcaaatatgtgggaaattagttgctactgcgactaggagccccaactgcgattgcattgacaaatcggatttggaagaagatcacattcatgtgtatcttgttccaaatgcaaatatatctgatttaacacatgggaaacttctcctcggcacaattactgggttagccaccactggtgaggaaggatcttgctgtgtctacgatggtcacaacataaagacacacattattatgaagcacaggacattgatggtattggctttttgagcctcgttgttacatgcatgacactggtggatggtatatcgaaacttatgggagagacaagaaagggaggacgattccgtctcaaagacagtgggatggttccaatgaacattctgaaaagagattgcatcctgcaatgtatcttgctgctctggcttacagatctttggatcttgaagatgctggaagaagacgatggaatgtgactagcttgctgcaatggtccttatctcatcttcgtcagctgttcaaaaaaagttgctaatggagagaaaggggattgacacgagaacaccatgaaaatagttgtttggggtctcgctttaacaattagactgaacctgtggtgtcacaccctttgctggttctgttcagctgctttttagtatgctactgtatagttagaaactaatgtgctttcttgatatgatagctgataaggacatctttctgaggctgttgactaccctgcccgtttgatatacaacatgatagtaaaggtttgcagagcgtgcgataaatgatctgacactgatggtaagatagccagaatcctacatgacaatgtcttctacatcgttttatgcatatttcttagctacaagtgacatgtaacttaaaaggatggtgccatggtggtatccaccattttgcacatctgctgtatttttataagaatttaaatccaaagccgactgattgagaaaaaaaaaaaaaagaaaaagacaacaaaaacctatcggatcttagaaatgaaaaaaaaaggcttgatgggcttggcaaactgaaaaagaatat

SEQ ID NO: 53716 - DNA, 1503 bp, Zea mays
  Clone ID: MRT4577_148992C.1
atggcgcttcgcgctgtggagctccggagattccttctccggcgcatcggcggcggcgaggcggccctgcctcctctcgcgtggcgcggccgggcagcgagcacatccgccccggcggacgacgagctcgcggggaagagcgcctacgaggtcctcggggttggggagaccagttccagcgccgagatcaaggcttccttccatcgcctagccaaagagacccacccagacgtcgccgcggctgctggttcccgacggttccttcagatcctcgccgcctacgagatcctatcagattcacagagaagggctcactatgatagctacctgcgatcgcagaggcgggttgtggggaaacatcccaggccatctcagttcgtgtacccaagtggttcaggctcaggcattgtggtacctcgagagagcaatgttgttgaatggctgaaatggtacaggcttaccattgacgacatagttaccaagaagagggttgccactggctctggttattttgaaaggctcgaaagcgagctgtacacggctatccatgctgcatactatggccctgatgtcgactccatggatgtccttcctgattgctttgaagccgaggagagatctgcatatgaaacctctgagctattacaccttgtttcaggccgtgatctttttggtattgttactgtaactgatagtgtcaaagagctgtcagatgtttgtcgtgaaaaactggtaccctctggttgtagatcttcggaatttactcatgttgtttcaagaaatgcgaataagaattcaatatctatgaatcctgttgatatgaacaagcaagaaatgcgatatgaaaatgatgttccttcatcagattccttcaaggacattgagttgcaaatatgtgggaaattagttgctactgcgactaggagccccaactgcgattgcattgacaaatcggatttggaagaagatcacattcatgtgtatcttgttccaaatgcaaatatatctgatttaacacatgggaaacttctcctcggcacaattactgggttagccaccactggtgaggaaggatcttgctgtgtctacgatggtcacaacataaagacacacattattatgaagcacaggacattgatggttaaacacatgcactggtatcaggttggagatacagtttcaccctgtgagtgtcgatgtagtagggctcgattgccacctagcaggtattggctttttgagcctcgttgttacatgcatgacactggtggatggtatatcgaaacttatgggagagacaagaaagggaggacgattccgtctcaaagacagtgggatggttccaatgaacattctgaaaagagattgcatcctgcaatgtatcttgctgctctggcttacagatctttggatcttgaagatgctggaagaagacgatggaatgtgactagcttgctgcaatgctccgttcggcaggccgacatcaagccagcccaggattga

SEQ ID NO: 53717 - DNA, 707 bp, Zea mays
  Clone ID: MRT4577_148993C.1
gctctggaccggagcgctcgcctgccttccggaagggggaaagtgggactgagagagagcacaccagaaccagatggccccgctcgccgcccgtcggtagccccgggcagacattgccgtctccctcttcctcctccccggacaagaagtagaagccgccgggggcaatgaggaagcacgggtggcagctgccgtaccacccgctgcaggtggtggcgatagccgtcttcgccgcgctgggcttcgccttctacgtcttcttcctgcccttcgtcggcagccagacctcccagtacgtcgccatgggcctctacaccccgctgattacgtgcgtcgtcacgctctacatttggtgcgccgccacgaaccccggcgaccccagcatctgcaagtcggccaagctgcactcgaggatggacaaggacgggcggcagtcccactcccacatggattcggaccacggcctgaatgccgctgacaacagcgagaagctgagcagcatgctcgagaggaaggactcgccttcttggcccagatgctctcaactgctctgcttagtctgcttgcccttttcctgcctctgcaaaagatgcctccgttcagatgaccggcattctgaagagaacatgagtgaggagggcatgttcttctgcagcttatgcgaagcagaggttttgaagaacagtaagcattgcagagtgtgcgac

SEQ ID NO: 53718 - DNA, 369 bp, Zea mays
  Clone ID: MRT4577_148994C.1
atagtgcctaagtctgaatttcagtgattgtgacaaacttgggagcttccttgtgcctaatccataaggttttgaactgtggtgtatatagtggagttgaagcccatatgatgttgaacaagtttattcaagtgagtttgacatgatcgtacacagaaattggagaaaagagaattgcaaaactccgtgtcaggtttaaggtgtgctgtttcaaataactgaaaccgaaaattcagtacatagtgccaaattctgagctctgttgtggtcaatctatatggtgttggactaaaggttctatgtgtaatatagagaccaaataaagggaacgaatttcttgagaagagttggatttgctgctgtgtaaaa

SEQ ID NO: 53719 - DNA, 327 bp, Zea mays
  Clone ID: MRT4577_148995C.1
gggtaaatcttttttttttttttttttttttttttttttttttttggggaaaaaccccccccaagcaggtttttttgggttcaaaatgtccgggcctcaaaagccaactgatattttccaccccttttcttttagggggggcggaaataccacacccgggggttctgttaaaagaaaaaatcgaggaggcccaatttttccaatagccccgatttccgggggccagaagcccaatttgaccccggggaggacctccccccttttggaagttttttggggccaaaaggtttctggggtggggggggggggccttcaaaaatttttttt

SEQ ID NO: 53720 - DNA, 329 bp, Zea mays
  Clone ID: MRT4577_148996C.1
gttttattttttttttgaaaaaaaaaagatcttactgaggctcccacgttcctaccatataattttcggacatgaaatcaccctaggctaaccttgttccacatatacagagactggctgcttcgaaccccccacctgttgactcagttcaccagtccaccaggtcacacctttctctctcctatctagtatgggacagattatacggaatcggcctgtcagccctctagttgggccctttgttcctacccaaaagattgacgcccgaaattggtcatgggcggccattgttttcatcgcaggctattagataacgccttcccatgctt

SEQ ID NO: 53721 - DNA, 279 bp, Zea mays
  Clone ID: MRT4577_148997C.1
aaaggacgatatcaatctaaggcgcgtgttgaatgagatatacaaacgctcctaccaggcactggagctcatggtaagtctactacatgatatacaggggcatcacactcccgaacagacaagcgtttgcctctgacttaatgcctgcctacaacctcaggatggccagaccgctcgacgacttggatgcaaacacgtataggcccacatcgccctggttgattactcccttgacaatacttgatccgcagtacatacactttagattgacaacgacct

SEQ ID NO: 53722 - DNA, 968 bp, Zea mays
  unsure (1)..(968): unsure at all n locations
  Clone ID: MRT4577_148998C.1
ccacgccgtccgcgtaacgaaaccacgannttcagcctaattcatcaataggattgccattaaaaaatctaaaaaaggcaaaaaagcaacagatattgtagttgcggtagcaagtaagaagggatctgtaaatagcaacaataatagcagcaatagtagcaacaaccttaataagaaaaagactgatgaaaaaaagtctgaaaatggttcgcctgcgaaaaaattgttaaataagaaaaatgtaaaagagtcgacaaacgtcgtagttaaaaagtcaaaaacaaataagaacaattcatcaggcggtactgaatatggggaaaaaccagctgattttgatgatggaggttggttcactgttcaatcaaaaagcgccaaacaaaaaaataaaatagatgattcaactgcaagtcaaactgaaggttcatcaccaaagcttcaaggttcgaagaattcaaaatctccaaaaattgatagcaaggaatccattgcacaactgagttccaatgcacctaacattttgttgccagatcaacaatcaaaatcggagcaccaagcagatgttgttaaagcggaagtagttgaaccagttacagaaattgataatcatccagttgatcatgtaactaataatgtcatggtgaaagtaggagtagaaaaaagatcttccggtaatatcccacatgacgttgcagatgttactgcagttgaacagggagcaattgcatttgacgaattggaagaatggaccgacgccaaaccagataggaagcgaactaacaagaaaaaaactagaagagatatttaactaaataataaaatttcatgtacaaacattggcaataccaacgaacggaaaatatttagatataaaaatattaacgatgcaaacataaaaatatttgaaacgaagctattgatatgaaaatgaatatgagttaagttgccttaaatacagatttttttat

SEQ ID NO: 53723 - DNA, 131 bp, Zea mays
  Clone ID: MRT4577_148999C.1
cttactacataatccccatccttgtcaacatactaatcctaacattacagctttgcattctgcttattacttacctgaatttacatagcattcacatttatcttttactcataccaattttaaataattta

SEQ ID NO: 53724 - DNA, 437 bp, Zea mays
  unsure (1)..(437): unsure at all n locations
  Clone ID: MRT4577_14899C.1
gcttttcggtctgnacaacgcgccccaaccccaaccccaacccacggtcccagtcccccctccgttctgtctgcactctgcaggtgtcggtgccggccatggcgcgcgccctgagctcgtggacgccgttctttgtcatggtgctttttgttgtggccgttgtggtcgtggtcgtgttgttggaggcgggcagggtgatttgtcggcgttggtaattggtatggggaggagttgtgtggggttgtggtgaggtggggnggtcggtgtttccggtgccgtgcgttcgagaacggtcttggtcggacgccgtagatggggtggaataggtgtgaatatttttgttgtgggatcaaggtagaattttattaagtagacaggtgatgcgttggttaatagcggtttgttgaagtttggttattagtttgttaatatagatg

SEQ ID NO: 53725 - DNA, 1401 bp, Zea mays
  Clone ID: MRT4577_1489C.1
cgactcgcgcaagccgcgagcacgacactagtgacacatgagctggggacgggagcgagagattatacctaccttgtaagctccagcctattgctcgacaggcttcccagttaagagatacctttctcctgcgattaccgaaccactcgcttcttgtctaatgcccgtcgctgtcaccaattcagcataatgccagtgctgccgttgctgtccgcaaagccatcccctccctgcacgccccctcggcccggtggtgagtggtaggcggccgaagaattccagggtgggtggggagcgcccggaccggagacaaggaagatcgaggcatgaaggacctggtgtcgtgcttcagcgagcacgccgtgcggatctccgacgtggcctgctccggctccggtcccgccaatgcggcggcgggcgccccggaggccggaggaggagggcgggcgccagcggtgagcgcggtgaccaccgcgtaccggtcgcggctgtcggcgtccgggaaggagctgctcatcgacgtgacttggtcatggtctcgggcgcccgacgggcccgcgctctccgtcgccgtccacgaggcggacgccgtctcgcgccaccgcgccgccagcggcgccgcggcgccgcggcacctgcacaagaagaaggggagcgggacgttcacggcgggcagctgcgtggtgggcgtgttctgggactacgccgcggcgcggtacggcgctggctcggggcccgagccgacgtccgggttctacgtcgcgctgctggacggcgacgcggaggcgtgggtcaccgtggacggccgcaaggtcgtgcagctccggcggctgcggtggaacttccgcggctgccacaccatcttcctcgacggcggagcgccagtcgacgtgacgtgggacctgcacggctggctcttccacgcgggcgccgagtcgccccaaccgtcctccacttccccctgtgccgtgttcacgttccaggcgcgcggcgcgtcggagacaaagctgtggacggacgacgattgcttcgacgacggagaggaggcggacaagctgccggtgacgccgagcggtcggcaacagaaggcgggaggcggtggggcgtcggggtcggggcaggggttctgcctgctgatccaaggctccaggagcttttccatgagcacttaacctgtacatgccgttagagactttctatcgccattttttttcacttcttgcttggggtttgtgttgggattgattaggaatttaggatagacattcagctggttgactcttgttgattaatctgatgcatgacaaggggtgttgtgattgtgaatagttgggatagtgtcagagagagagagagagaggttgacacacagaattagaaagtgatgttgtctttccagtt

SEQ ID NO: 53726 - DNA, 467 bp, Zea mays
  Clone ID: MRT4577_148C.1
gataaaccaatgcttgtgtatgagtatctctccaaagggagcctggatgatattcttcacggaagcagtggcgttctattaactttggagcaacgtttaaatattgctgcagaatcagcggaaggtctagcttatatgcattcgaaaacaggaaaaataatattgcatggtgatgttaaaccggccaatatacttttgaacgattgcttcacaccaaagatctctgactttggcatatcaaggctaattgttatagataaagaacaaacagatcatatcattggtgacaggacttatatggatccagtatatctacgagatggcatactaactgataaaagtgatgtctacagttttggggttgtgctcttggagctcataagcaggaagaagccacgtattctgacaacaatagcttggtaaggagttttctcgatgctcacaaaaatcaaaaggaggaacagagc

SEQ ID NO: 53727 - DNA, 314 bp, Zea mays
  Clone ID: MRT4577_149000C.1
tttttttttttttttttttttttttttttaaacctgaacagaccgtcttatttagctaaggttctcgggctaacacaggcaggacagattttcatcacatgcggtgtacagaaaacaattggacatttttgggggttgatacccacatccgaaaacaacaggacatcaattattttgggggcataccttgggttctcatcataattcaaaataacattttaaatttgtgacttggacaaaaaactcttttggggacacttggaacaagtaactaaaacgttcaagcttccactgtctcggtgggaaccccgatc

SEQ ID NO: 53728 - DNA, 588 bp, Zea mays
  Clone ID: MRT4577_149001C.1
agaatacctattattttggcaaaagaacttcattatatatacatgtatatagtgtatatgcatagatagaaaatgaatcaaataaataaaggaattatgttaatttggaccaaaatatctccttcctatttctcatacctaactaacctaatagtttgtcgtggaccatgaggcccaacagagcgacaaagcccacctcagcacctcacgacaaaaaaaatccccaaaccctattgtagtcgcaccatggcagagtcattagatgggccaactaccaagtcgtggtcacgtcttacaaccccacatgccatggagacaccagcacctccgttgcgccattgtggctccgcagcacagctacgtacctagacttgaccggctaactgtcattgtgttgcatctagcctcgtttttgcatcgtctgtcgtccgtcgtccgaggcttcaatccaccatagtcaggcgtgtcaccgcgtgccaggacagacaaccaggtggcaaggtcccatcgagccgatgtccaagcccacctaacctgtggccacccgaccttacctcccctgatttgctgcttgcagtactggaatgt

SEQ ID NO: 53729 - DNA, 348 bp, Zea mays
  Clone ID: MRT4577_149002C.1
aaccggaaaaacacccctggccggtcggggaaacccgccccaaaatcaatattcaccccacaagggcatttgggggaaaaaattcgaaaaagagggggggaaggcaaaccaaaaagcgggggcacaggaaaaaaaacgacctgcccacaaaaggagtaaaaaaaaagggggggggttcccaggggccaaaataaggccaacgggggccctccagggggaaaatttctttttaccaaattcccccaagattcggggggcccttgaaagaccctaagggggtattccttggttgggggcttggggccgaaaccaaattggggggcgggctttcccacagggatcttggaa

SEQ ID NO: 53730 - DNA, 365 bp, Zea mays
  Clone ID: MRT4577_149003C.1
cccacgcgtgcgggactttccggaccccttgtcgtggctcgaagagatgatcgagacatacgtgcagactatcgccaagggcgtccgtagttatgaggaggccaagaagaggatgtatgctactagtgcgaccacttacgttggatgtcaggctgtaatgaccgaggaatatgtcacagaaattactctggtgaagcactggagtagtattcattctgcctagattcatatacatatgcagaaacaaacgagtacggaagacacatatatgactattgtgtcatcagtccatgaccaccagctgttcattataacagaccatatagaactgtcaggaaccgtgtctacccagggaactaccatta

SEQ ID NO: 53731 - DNA, 889 bp, Zea mays
  Clone ID: MRT4577_149004C.1
taccctcgaggggccggccgggggccgggcggcagagcaaagcaagcaaaaaggggaaaaactgttccgccgggccgacgacggccggggccggcgatggatcctgcgcgaggagcggaattaaatagcgcgtgacccccgaggcgggcaaatctggatgcttccttccgtttccacctcaacccgtcccaccgctcccagtcccgggacgtacggtgaccccacaccacaccaccacaacccctccgtcctcttcgcggctgcggtgcggccccgggagttccttgattcggcgggcatcgccatgggagggcgtcgctggctagctgtggtaacctgacctcgccgctgcagctctgtaggtagctagtattccagaggtgatttctcctctcctgatcgacagagggcaaatctggttcgtgaccccccagtatcatatcagagagggccacggttttgcttatcaatgtgttaggagttaggaccaagtactggagctatttcgtggttccgatggagtctaagtgtgtgaacgaccaggacgccttgatcgacctggagagtggcaacggcactgcagtgatcaaccatagcaacggcctggagagtggttgcgtgtgtgcgtgcgccaacggatgtccgagggatgacaggaacaaccagcacatggactgctcttcgccggcttcggacgccgttgctagaagtggagacgacaggaagtccgagggggaggagaagctgggcctgggccttctggacagctcgggaggggacaaggcgaagaagaagcggtcgaagaagaagccgccacggccgcggaggccgctgacgcctacgccgctggacgtctctgaccagaagctcctcaacgagctgagcgagc

SEQ ID NO: 53732 - DNA, 1165 bp, Zea mays
  Clone ID: MRT4577_149005C.1
cgagccgctcgctgactggttacttattactagtagcctctctggtcctggtgcatcctcgcggaactcatcacaaggctccacctccaccctcctgcgcgcatggtgactgcagcagcagcagcagcctcctctccccgcagcatgctccgcttcgcattgaccgcctcgtcgtccggccgccaccgaacgtgagtacgtggctctcgtccaccgtcaccgccagcggccggatcgccgcgacgtctagagcccccccgcctctgcagccagccggcgctcgcgatgcctcctctggcgccgccgcacggtgagaagggcggcaggcagcggcagggggcggcggcggccccggccccggcccagcggtcggcgtcgttccacgggcgcgggacggagcagcggcaccaccagccgcagaagcagaggcccaagacgctgcccgacctgctcgccggcgtccggggggcgagcttccgctccgggtccccgcccccggacggcgacgcggggcggaggacgccgagcaaggtcctggtcagcgtggcggtgcagcagagcatgtggccgctgcacgtcatggcgcccgccgagtggaccgtggcggacctggtggcggccgccgtcgccctctacgtcaaggaaggccgccgcccgctgctgccgtcgaccgacccggccgccttcggcctccactactcccagttcagcttggacagtctgaacccaaaggagaaaatcatggaactaggcaccaggagcttcttcctgtgcccaagatcttgggctgccggtcaggacgcttcgtcgtcctccggcacagcgaacggggtcaccagtgcggcatcagggaaaacaccggcctggcttagctacatgccgttctggccgaccatgtgatcggctagcacacgcacaccccaaactcttccaggtcctaaagaatctccaagtattgcatttgtgagacagatggctacaaggacattgtaaatgtatattttggagtttgtaagcatcttgaatggtgcacgtgcgatcctgcaaatcatctgtggcccatgttacaacccacagattcagggaaaaaatatcgaatgattatgtaattaaaaaaagtttaaaacagttttaatggcgaaaaattgctgtggtcatcttgttc

SEQ ID NO: 53733 - DNA, 516 bp, Zea mays
  Clone ID: MRT4577_149006C.1
accgcacggcctcaagcagaggaagctttccgcccgggaacgccatggggtcgcttcctctccttgctgcctgctgctccctcctgctcacggtcgcagctcctgcccgggacagcactaccagcgtctgcgcttcgcaaatcggcggtacacatatatttctgtcgttattacagcttaatgttgtttgttttgttttaactctctgctcacggttgcgcttgcacttgcatgcttgatgaatcgtagccaataattgagtggagtagaacgaactagctaggattaagttcctctcggaggatgtatctacacaagttcagacgtacaggagctgaacttttggcagtgagagcgataaattttcaataaagctatatataatttgtgaagttcacatcaaacttaaagaaaaacgtgaaatgatggtttgttatttattgggttaattatcatacgtgtgtgcgtgcctgtgtgtgcgcgtgtttatttatatattcctctgcagtcacttac

SEQ ID NO: 53734 - DNA, 474 bp, Zea mays
  unsure (1)..(474): unsure at all n locations
  Clone ID: MRT4577_149007C.1
aaatctcnccgcctcccgcatccccgccggggcccgggtgcacagcagggggggggggtcctccatgcacggggtgcagagggtggacttcgccgacttctccgggcctcaagccggggtcgtgctccgtgagcgctggggggggggatgcgtccttctccgacgtccttggcgcgcanctcgtgaccaaggccaccggggagaacgccgtgagggcgcccgccgaggcgaanctgaaggcggggatcaacggcttcggccgcatcgggcgggacttcctccggtgctggggggggggggaggactcnccgatcgacttctttgtcctgaacgacaggcgaggcgtcaggaacgcgtcccacctcctcaaggacgactcggtgctcggcaccttcaagggcgacatcaaaatcgggggccacaccgaccatcagggggcagcgggagcccatcaggggccggcgcacgacggcc

SEQ ID NO: 53735 - DNA, 325 bp, Zea mays
  Clone ID: MRT4577_149008C.1
aaaaaggggcccccctttaataaaaaacccaggggggaaatgggacaaacctggggcaaaataaacggtttattgggggatttaaattttttttttacaaaaggaaaaaacggtgggagggtccccattaaaaaagggtttttttttaaaaaaacaagcccgggaaaggggaaaaaaatttcaaaaagggggggggtatttccagggggcccagggcaacgcccagggcccgaaaataaagggggccaccttttaccggggggggaccactttaaggggcccaaaaaactttccaggggggcgggttaaatttggactttttttg

SEQ ID NO: 53736 - DNA, 2140 bp, Zea mays
  Clone ID: MRT4577_149009C.1
gatctcttccagctcccaccagcaactacaatagaacatcacatcctagctagctactagctcgagctctcatcagaagatacatactgatcatcgatcaccagtcaccaccaccacctaaggctcagtcaccaccaccacctaaggctcagacgatctcagagattgaaagccacacatcacgccaaccgcattgcagcctcctccccccgccctgccctcccaccacgccacctccctccatgtcttctccctggactgggtggaccaaccctccacaagacgctcacgaccaccacgacgacgagggctgccagccaacctacccgctccctagtgcccatccttgatcgctcacccatcgtcccgctccgcccacccaccgaccggcccctcgtcgtcgccccgcgcccgtcggggctagccgtggcagactggctgcgtggtgggcgcggggcgctcgagggcctcccccgcgccgtcctggagcgcgccgactggatcgcgtcgctgtgcgaccgcctcaagctgcacctgcccaagcagttctgcggccagctcctgcgtatgccgttcccggacggctacccggagtacccgacccgccgccagttcgtcgactacctcgagcgctacgccgccgagttcaagatcaagcccgagctcggcaccgccgtgctgtgggcgcgctactacgagatgcgcgctacgacgagacgtcgtcgggcatctggcgcgtcgtcaccaacggcggcgacatgaagtacatcttccatggggccgccgctggacatacggctggtggaagccggcgccttcgacgcgctcatggacctgttggtcagccagggcggctccatcaaccagtacgagacgccacggtgcatcgagccgggcggcgccgcgctggagctgctcgactccaaggccaccgcctcgttcatcagcccgtgccccgtgtaagctttcgggcttctggtgactgaggttgttccgagctcgatctgctactctaaagctagctaatcctctgctggatctaaataatctgagaattttcgtctgggttatcccgccccgttacattgtacttttgtgaggctttgctactatgcaaagaagcctttttcttatatgagatcgttcgtgatcatcgcggctcttcctgggtcaacctagacaagctcggcctccgccgccccgccgccggcccgcttgagctcaagaaggcacagggccgcacacccgtcctcgacaccggcgcgctcgcgaggatccgtgccggagatatcgccgtcgtccctgccgtggcacgtttccgaaagggcggtcaggttgagctcgccgacggacgcactctcgacttcgacgccgtcatcctcgccaccggataccgcagcaacgttccccagtggctcgagagcagcaacgattccttcaacaaggaaggataccccaagacggccttccctcacgggtggaagggtcaatctgggctctacgccgtgggtttcacccggcgtggtctcttgggcgcctccaccgacgccgtgcgcattgccaaggacctcggcaacgtctggagggaggagaccaagcccacgaagagggccggcgcctgccacaggcgctgcatctccgtcgtcttctaatccgacccaccagcatgacgacgacgaatgaagctaacttaattactgaagcacacacataaacagacacacagacagatacacttgttcgttcatggtgttttagttagtcagtccaatccccttggttcgttgttcattaatttgttctttgcctgccaggtacattagtagtaatacggtgagagtgagttgagtaaaaaaaaaatggagccctcccatcagtagggaagaagtgagtgagccctagaggggattttttttactgcagctatggccgctagcttggtgtatagtagcaacctgttgatggaagaagaggctctctttatttttcattgacctaccagcatgtaaattatttaatttctttgttgttgtatacacaccaccggtgtattattagttactctactgcagcttgtagcttgtagtagtagccagttttagtagtgtatggttatatttatatatagtgatgaagaggt

SEQ ID NO: 53737 - DNA, 295 bp, Zea mays
  Clone ID: MRT4577_14900C.1
cacgcgtccgcccacgctgccgcccacgcttccggtcctccgcaaaaccctcctccatgcggggcctgccgccgccgcggcggtcccctctcggatctcttccctcctccgcctcatcccctctgcatctttttctgaggtaagcggaggtggggaagaattgggcgccttctcaccctgaggctgcggcggcaggggtgggggtggagaaccaatgtatctttgactgtgattccggcctcaccaatgaccatttcgacggatcctcgccctccgtctatgcgtctgtcccttc

SEQ ID NO: 53738 - DNA, 589 bp, Zea mays
  Clone ID: MRT4577_149010C.1
tagctagcccctccttgccttgcccaggcacagccaagcggccgggagaggagatcgagcagtcatcgatctgatggggggcgaccagcagctcgttccggcggcggcccgcgtcaccccgcgtcggccgatgatgtccttccgggtgccgcggagactggtggccagcagagcggcgggtggagcgtcgccgtcgccgccggtgccggtgccggcggggctaaagacaaagaagaagaaggtggcggtggcgaggctcggtgggaagaggaggctcttcggcgcgatccggcggctccggatgcggtggctggccgtgctgtacaggcgcacgctgcggcggctgcgcgcctactacgccacggcgatcaacgacctcctcgagggcgccgccgccatcggctccctccgcgggccggccggtgccgccgactgcgccttcggcaccgcgttcgcgccggtcgtcgccgtcggcctctgatgagagctcgcactcgcacgcccgccgtctgcatgcactccatcggcgagcccgtatggtggtctgcttgtatagaggcaatctcgatcgctatcgttttctcgtcca

SEQ ID NO: 53739 - DNA, 191 bp, Zea mays
  unsure (1)..(191): unsure at all n locations
  Clone ID: MRT4577_149011C.1
nnctaacccttggcatcaatcctggaatngnnggtacacaaggattgccgaggcttgtaggtctacccaaagcaattgaaatgatgctgcaaagtaagttcattacggcnnnggaagggaaggaacggggatngatagatgaggtttgctattatgatgaattgataaagacatcacgtctcngggctctg

SEQ ID NO: 53740 - DNA, 101 bp, Zea mays
  Clone ID: MRT4577_149012C.1
cttacgcgtccgaggtgctctgtggcgtgctcacgcacgactgtagcaacctacacggtgaataccgtcttcaggtccagagcagtcctcgcagacgctcc

SEQ ID NO: 53741 - DNA, 1355 bp, Zea mays
  Clone ID: MRT4577_149013C.1
ccattttgtcgtattcggctcagctgcagtccagagttggaacccaagcgcacgcagcaccgtcggccgggaacccgacgaaaaggcccaacaaccccccgacccgtcacctgacccagccgatcgagaatacccggaaggccggaacccacctgctgcgcacctgcaagcctcgagtggagctcttcccgttgcattggcggcggagatggcggcgaatctggaggacgtgccgtcgctggatctgatgcacgagttgctccgccgcatgaagtgcagctccaagcccgacaagcgcctcatcgtcatcggcccacctggctctggaaagggaacccagtctcccattattaaggatgaatattgcttgtgccatttagccactggtgatatgctgagggctgctgtggcggccaagacacctctaggtatcaaggcaaaagaagctatggataagggagagcttgtttcagatgacatggttgtggggattattgatgaagctatgaagaaaccttcatgccagaaaggtttcattcttgatggctttcctagaactgtcactcaagcacagaagctcgatgaaatgttggcaaagcaaggtgctaatgttgacaaggtcctgaacttcgcaattgatgatgctatattggaagaacggattactggtcgttggatccattcggccagtggtaggacttaccattcaaaatttgcacctccaaagtctccgggagttgatgatgtaactggagagccattgattcaacgaagagatgacacagccgaggttttgaagtcaaggcttgaagccttccacaaacaaactgagcctgtgattgattattactctaagaagggcttggtggtaaatctgcctgcggagaaaccaccaaaggaagtgactgctgaggtgctgaaagccctctcatgatgaagtgtccactcttgaggttaaacatgacatctaccaaaacccctttgtttgggtttcttcaaaatttgcactaggccaacatcatgaggttttttattttcagtatccttattgtgcggatgcaccattttttgttatcacacctttgacaagctcggcaactgtctgaataatttctgtttctaatgatggaactgtttttccagtaacaaactgatatgattacaacaattcatctttgggagaatttccctgcaaaaaaaaaaaaaaaaagcggccagcctagttccagttattacaagactgctatgttactggctatgataatcaggaagataccttgctctgtcgagccttgagcggagagattgatgtgctgcgagctcaaataaatgttcatgttggtatggttcccaaa

SEQ ID NO: 53742 - DNA, 271 bp, Zea mays
  Clone ID: MRT4577_149014C.1
attaaataacaatgggggcccaaaaaagtttgaaatacaaaatgcccaggaaattgtcttagctcaactggtaactaaaacctaactcatccaatcctgctcttaggggaaccgttaaggcgttttaagattgccaaaaaaaatcccacagtccccaattcaaaccaaatatgatcttaagacaacattgacctacacaaagaacccaatgcagataacgccctgctgaaccaccaatgccgataaaacttttttagatcttctcataata

SEQ ID NO: 53743 - DNA, 218 bp, Zea mays
  Clone ID: MRT4577_149015C.1
ctcttatgatctgcctaatattatgccattgcgagtacacaatcacagcatattttgaaacctaaactaattacaagagaaaggaagggaagctgctcctccattagggaaaacacgactacgctgggagacagcacacatagaaaaaactcatacacggtggaaagaacaacctttgcaccaaaaaaaaaatgggtcgggcctcagacaacccccca

SEQ ID NO: 53744 - DNA, 536 bp, Zea mays
  Clone ID: MRT4577_149016C.1
cccagatctatcgtggaagtacgctctattctctgcaaagatgcaccccgccagaagaattctagtttctattattgatgatcaggcttaactgtacatagtagtcatgcgctgcgcgtgcagcttttctcttggagagaaaagctccaaagtgcccaaatagccagatctttataaagaaactagaggaggctcaatggtatctgagcgcatgcaacttttgtcttggagagaaaagctccaaagtgcccaaatagccggatctttataaagaaactagaggaggctcaatggtatctgagaagcttgccttgtgttacaccatatttttttttttgctagttaaattggctatgttcccattgcctgtgggatgtggactacattcggaaagtggattgtgctttagagtgtagtccaattgacattgtaggttagcttcattggtaacacttacctgtggttaagcagttgctctatttgttcttagggattttttgaaagggatacaaggacaaaaaagaactttctggttt

SEQ ID NO: 53745 - DNA, 698 bp, Zea mays
  Clone ID: MRT4577_149017C.1
ttaggagaagcaacagcagatcgagtaccccttcttcaccaagggttcgtaggagcttctcaaggcgcgtgtcgacattgtatagtacttgctgccctgggccaaacgacaccacgaggaccccgatgaggatacggaggtggaggccaaactcgtcgtcaagaaggctgggcagtttcgtcctttgcagatgcacatgcttatctagaagtgttgcaaggcttggttattcaggaactgctattatatcacgggtacaaccaatctcagttcaatatgggcttggcataccagagcgtgatcaggaaggcagacttattaccttggagtttgatgatttttacttggtcaatgcttatgtcccaaattctggccgtggtttacgtagactgattgaggcatcagttggtacagatgaggatgatggagaatcaaatccctaagcaaatgaactggagctatctagagtatctgaaatgcagctcatactagcggaccatggtcaatgtatctttttgaattaagtcggcccattaaaatatttccttgttcaagcatgtgtctatgccttgagcttgatgttggagtttaagtgctttctgatttagtctccttgacatgtgatctggtgaattgattcagggcgcttctcattatgttatgcaaataattctggcggggtagccgttgtggatttg

SEQ ID NO: 53746 - DNA, 383 bp, Zea mays
  unsure (1)..(383): unsure at all n locations
  Clone ID: MRT4577_149018C.1
tttttcacttcgaagcttgcgttcttgtagtagaggtcgttttcaagtaggaaaagcgagaggtcctgactatgaatagcagtactctgaaggctaccctagttctccaggcccatctggtctctacgacgatgacaaaggacctgcagtgccgaacaagcactgatggtgctgctagtgcactagctgaccggtcgtgtggacctgcgactacctcataaccatgagcctctccatctgtatgaactgcgtccccgtcttcactgacattggcgccaccaagaacacatgccgcgacttcatgcgacacaacatcagctgntatatccactaaactgatacacagcaccgcagcctatggaaccttccatgctgctaccttc

SEQ ID NO: 53747 - DNA, 288 bp, Zea mays
  unsure (1)..(288): unsure at all n locations
  Clone ID: MRT4577_149019C.1
ggttactccatttttccacgggaggaaactagtgtcgcttggaaaaatgaagatccattggcaaaaatgagtatcccaacctagccattaaaagggtagcttcctcccacctagggggaaaaaaactaggagggaaaagctggatccttggccgaaaacaaaattatggtttaattctggatcgggtggtttatcgggaccacatgttgttggcatgtggagtttgtgtgggtgataatgataaatgaagtgattcactgcgccccttgtgnaaaaaaaaaaattaat

SEQ ID NO: 53748 - DNA, 287 bp, Zea mays
  Clone ID: MRT4577_14901C.1
taagctcggaattcggctcgagcaacgttctcaccaattttttttcacccacagcgctcgacctcacagggggggtcatatgaatttttacaggggataacaaccctaccccaccagaacaatacatgcatctagccaaattcctggacactgatactaccccatcaataggcccgcgtcgaacctaatgaccatatgcaacatgttggtggtcctatccatcgcgcaggagaccattgcctacatagactcctacggaccgaccacgtccgcccggcggctagcca

SEQ ID NO: 53749 - DNA, 403 bp, Zea mays
  Clone ID: MRT4577_149020C.1
gcgagtacaatcttttttttttttttttttttttttttttttttttttttttttttttttttttttttattttttttttttatttttttttttttttttttttttatttatgatataattttttatgtctcccatcaaaatgatgttgttgggggatgacataccatttttgattgtaatgtctatgaagtgaacaatatcgatagatattattttacgaccaataatgattcaaaacatgattggtaaaatgattatgttgagtatgatgctttaaacaaacatgcctaatatgatgttactgattatgattgcaagtttgatactactgatgataatgcccataatgaattcatcaattatactgccaaacatgatgacattgccacaattttactgtgat

SEQ ID NO: 53750 - DNA, 219 bp, Zea mays
  Clone ID: MRT4577_149021C.1
cataatcagaaacaaagtacaaccgcaaagtccgcgagattagaagagcaagcgaggcagtcttctaagacaggagagagaccgctcatcgtgcccaaaagggctcaataagaatccatgtaaaaccatctcttgtgtttgaagttcgccagacctatcaaaacattgaagaactctagttctaatttgaaaatatcagaaatttagtctgattcaaaa

SEQ ID NO: 53751 - DNA, 629 bp, Zea mays
  Clone ID: MRT4577_149022C.1
gtcctttcggtgctattcttgtaaaaatggaaacagctggaatgcttgttgaccgtgcttacctttcagagattgaaaaggttgctgttgcacagcgcgaatcagctgcagataaatttcggaagtgggcatctaagtattgccctgatgcaaaatacatgaatgttaatagtgacactcagattcgacaactcttcttcggtggtatagagaacatatacaaatctggtgattttttgccgaagagtaaagctattaaagtgcctaacaatgaaactgctgtttcagaagggaaatcatatatcatgtaaggaagggcggattcactgttccttaaatatcaacacagagacaggacgtttatcggcaagggcaccaaatttacagaaccaacctgcacttgaaaaggataggtataaaatccgccaagcttttgttgcagctccagggaacactcttattgttgctgattatggtcagctggaactcaggatcttggcgcatcttgctgattgcaaaagcatgttagatgcttttaaagctggcggcgacttccattccaggacagccatgaacatgtatcagcatattcgtggagctgttgaagaagagaaagtaattcttgagtg

SEQ ID NO: 53752 - DNA, 1263 bp, Zea mays
  Clone ID: MRT4577_149023C.1
gtcccgatcaatgaaaaccatctttggtcggaaaaaaataaagaaggatgggtcagaagggaagattactgcaattgagcgtgttgaaattttacaaagagaagacagagaattgtggatctgctattcttcgttagattccatgagtaccttgaggctttatgagagcttgaaaagcaagcttgaaaggaagccctggacttttgacggttaccccagacccggaggttcattgtacgatttctacgaggagtattggtgtcctttcggtgctattcttgtaaaaatggaaacagctggaatgcttgttgaccgtgcttacctttcagagattgaaaaggttgctgttgcacagcgcgaatcagctgcagataaatttcggaagtgggcatctaagtattgccctgatgcaaaatacatgaatgttaatagtgacactcagattcgacaactcttcttcggtggtatagagaacatatatcgagcccggcagggtttgccgaagagaaagctattaaagtgcctaacaatgaaactgctgtttcagaaggcaagaaggttccaaagtatcgcacaattgaacttttcagcattgtggaagacctgaaaactgatatatttactgcaagtggttggccttcagttagtggggctgcattgagaaatttggctgggaaggttccatcagatcttgtttactcaacagatgatgtaaatgatgatgaatgtggtattcattctgaaatttcccattgtgatctagaagacacctcttcttatggtactgcatatgatgcatttgggggaggaaaggaaggaaaagaagcatgccatgccattgcagctttgtgtgagatctgttctattaactcgttaatatccaatttcattcttcctctacagggaaatcatatatcatgtaaggaagggcggattcactgttccttaaatatcaacacagagacaggacgtttatcggcaagggcaccaaatttacagaaccaacctgcacttgaaaaggataggtataaaatccgccaagcttttgttgcagctccagggaacactcttattgttgctgattatggtcagctggaactcaggatcttggcgcatcttgctgattgcaaaagcatgttagatgcttttaaagctggcggtgacttccattccaggacagccatgaacatgtatcagcatattcgtgaggctgttgaagaagagagagtaattcttgagtggcatcctcaacccgggcaagag

SEQ ID NO: 53753 - DNA, 335 bp, Zea mays
  Clone ID: MRT4577_149024C.1
atcgatcactgtgttaccactaccacacccacactcgagaagcccctgctgctcctgctcccgcggcaggtgcttgcgttgatatataccacacgcggtgggagtgggagagggagactctgacctgaccacagcaaacgacctcctctttcctttccatccgtcggaccatcgatgcacaatttgcatgcagatcacacgactgcctccgacacaagggatgggagagcgagcggcagccggtgtaccgcaggcggtgctcgccgggcgggaccctgatcctcctgcgcatcatcgtcggtctgcaggtgtgtgtgttgctgcgcccccacaag

SEQ ID NO: 53754 - DNA, 360 bp, Zea mays
  Clone ID: MRT4577_149025C.1
gttgtatatatttaatattattttttattgttggtgtcacaacacagtttgtttttttttatgttttttctctttctttatttacacaacggggcacaacacaatgattgtctccaaagggatctgagccacagaaaaagaccccatgcactgccccgtcactaggtgtcatcatcaccacacacccagataagttgcttcattgcaagaaacccatctggggccatgagaggatcaacaacgaagccccccggaaatgggcagatctttgctatggcggcagtagcttccaccaagcgtgccgaacaaaactatcgttatgtaaccatgcaaacttgcactctgcataatcgaagtgct

SEQ ID NO: 53755 - DNA, 132 bp, Zea mays
  Clone ID: MRT4577_149026C.1
ggtacaacacactcaagaataaagtaaaaggatagtcaggatccagatgtttcttttctagcatttaatgtgtgtgaactcagaacactaccatgaaagaacacttccccccaaaactggatagagaggaag

SEQ ID NO: 53756 - DNA, 1175 bp, Zea mays
  unsure (1)..(1175): unsure at all n locations
  Clone ID: MRT4577_149027C.1
ctcgaggccggccgggattcctactccgagtcgccacctgcatttgtctatcggtcaggagcatggaggggagacggctttcacgccagcagttgcgctcgctaccggacgccgcgtccttctcgccggaagtcgcggccagcccggggctcgtcggctccggccagttgggtctcggtctctcggcggcgttcgagactctgccgccctgattatgggactcttgaggtgtttcactgcttatgagaaagacgatggagttaaattgttgattatgaagggtaaaggaagagcattttgtgctggaggtgatgttgctgcagttgttcgatctatacataaagacagctggaaatatggtgctgatttcttccgaaatgaatttttgttgaattacataattgcaacttataccaaacctcaggtttctcttcttagtggaatcgtcatgggtggaggtgctggcgtttctttacatggaaggtttagagttgccaccgataacacggtttttgcaatgccagaaacagctctgggtctctttccagatataggggcctcatattttctgtctcggcttcctggattctatggagagtatgttggtcttgctggtgccagattggatggtggggaaatgcttgcatgtggtctggcaactcattttgtccagtcaaatagtctgctatcgctggaagaatcacttaaaaaggtggatacttccaatgcttttgcagtgtgtggtatcatcgatcaatttgctcaacaaccatcactgaaagaaagcagctctttgaataggttggaaatcatcaacaaatgcttttccaaaaggacagtcgaagaaattatatccgctcttgaagtagaggcctcaaattcggcagatgaatgggttgctacaacaatccagtccttgaagaaggcttctcctaccagtctgaaaatctctctgagatcgataagagaagggaggacacaaactgttggggagtgcttgcagcgggaatatagaatggtctgccatgtcatgcgtggtgacttcagcagagacttctttgagggatgcagggctatatngctggataaagaccgaaacccaaagtggatgcctccaaggttggaacaagtgcatgacgaggctgttgaacagtatttctccagaattgatgatc

SEQ ID NO: 53757 - DNA, 214 bp, Zea mays
  Clone ID: MRT4577_149028C.1
tcttctgccaccaccagcgccggtgaggacacggggcacttttaacgaaatcctggggttgttcaccaccgaccaggatgccgacccccaccacaagcacaggtcaccatcaccgtcagggctgaccagcgcacctccgtgggcgatgcaatgcccggcgcctgactggcacagtcaggataccacgaccacctgtacaaccaccaccaccggc

SEQ ID NO: 53758 - DNA, 524 bp, Zea mays
  unsure (1)..(524): unsure at all n locations
  Clone ID: MRT4577_149029C.1
ccccgcgtccggcacaatagtgattgtgngaaataaatcatataggttgtggagatataatcatatatagaaatgagagtgaccaaatgtaggttcacttatgacttatattagttgtaatgcgtgaaggcagcttcttagttgatggcaaaggtatcttaggagatactgttcactaaactgttttcatgttcttttctccaggagagtatgttggtcttgctggtgccagattggatggtggggaaatgcttgcatgtggtctggcaactcattttgtccagtcaaatgttgtgtatgtgctagtctaataactcctagtaaatactctgttcctcagagtctgctatcgctggaagaatcacttaaaaaagtggatacttccaatgcttttgcagtgtgtggtatcatcgatcaatttgctcaacaaccatcactgaaagaaagcagctctttgaataagttggaaatcatcaacaaatgctttttcaaaaagacagtcgaagaaaatatatccgctcttg

SEQ ID NO: 53759 - DNA, 1712 bp, Zea mays
  Clone ID: MRT4577_14902C.1
ggctgaacggaggatagaaggttacttcttgctaccatctcaaaaatcatggtacgcttgaacagtcgagttcgctttttttttttttaaaccaggaacaactggcagtatctgcccagttgaaacttataaagctttaaaacaacatacacatatctttgcaacaaagccaaccctgaggtttctctatttgctagcactcctattttacagctaaaccaaaacggacacacttttttgtgcccacttagctgctacttactccataagagcacaccatacaaatccataaggttttcatggatccagggccatcttcataacaagatcattccatgcatcaatggggcctggtacacaccagtgcaagcaatcattttggacgggcgtggatttactgctgccccttgcaaagggatagggtgttctgtaaggcccaacgtggccgtccggtctcaaggacgagaggctgtaggtatccatcagtctcagtctatccacgtccgctgaacccctaagcgcggctacagccttgttgaaggactcaagctcgatctgtctcatgacacgctcgatgttaccctctctgtactctcccttgttgtagggcaatttcctgcgacaagacccaccgctgaaccactctccatcctcgaagtgatcaggtgaccaggtcctgaagaaaattactggcttgtgtttcgctgagacgatgaagttgaaaacgttttgtagagttttccgatacaggtgctcaaaaccaagttcagcgacgttcttgttctgagaattatgaccaccaaccactgcaccgttctcccagtagaccgctgtcctcagaaaccattgtccgccagaaataataatatagtcaaagctctcatactgacttgtccagttagcatcgagtatatcaaggtggagctgtatttcagaggtagacacgccatcctcattctcaaaaataccagatttgatgaggaaaggagcccagacgatggacactgtgaagttgtaggattggaagtgccatctcctgtttttgaattcgttatcatggtaaacctcaacaggttcttcagccttagacagaaggcaaagcaatgactgaacttggttacgaaggatggagtcaccaattagtccccaacctttgtttctcatagaatctagaaatcttactgcatcaaatggtggaagatcacatccataaggtttccacttccaatgtagatattccttatcaggtctaccattcatcatgcagttctggtgatcgtcgataaatcgacagcttgcatttgtataggctggaccagaggggtttggtatccattccccattgaaaagactgcattttccttttgtgatctgcaacgccggcgccggagaggacggaaaggaccagagcacccggaacaagaggcccgcgagcagcaggaacccgacggccttcaccacgaatggccctaccagcgcccaccatttccctaaaccgcggctccacggcgacggtggtggtcctgaccaccacatcgggctcgaacccatactccagcgcgagcggtgtggcactgtgcagcaagtagggtactagctcgcaaggagagaccgggagggaaggatggggctccgcgagtgtgaccaacagcgtccgtgcttagggcagaaacggcgacttgtcggatcagtgctgtcgatgtcccggccgg

SEQ ID NO: 53760 - DNA, 1761 bp, Zea mays
  Clone ID: MRT4577_149030C.1
gacttatattagttgtaatgcgtgaaggcagcttcttagttgatggcaaaggtatcttaggagatactgttcactaaactgttttcatgttcttttctccattggtacctcgaggggccgggattctctgtgggtacctcgaggacggccgggactccgagtcgccacctgcatttgtctatcggtcaggagcatggaggggagacggctttcacgccagcagttgcgctcgctaccggacgccgcgtccttctcgccggaagtcgcggccagcccggggctcgtcggctccggccagttgggtctcggtctctcggcggcgttcgagactctgccgccgattttggtagaagtgaatggctttacaaggacactgattttgaataggccaaagcagttaaatgcactctcctcgaccatgattatgggactcttgaggtgtttcactgcttatgagaaagacgatggagttaaattgttgattatgaagggtaaaggaagagcattttgtgctggaggtgatgttgctgcagttgttcgatctatacataaagacagctggaaatatggtgctgatttcttccgaaatgaatttttgttgaattacataattgcaacttataccaaacctcaggtttctcttcttagtggaatcgtcatgggtggaggtgctggcgtttctttacatggaaggtttagagttgccaccgataacacggtttttgcaatgccagaaacagctctgggtctctttccagatataggggcctcatattttctgtctcggcttcctggattctatggagagtatgttggtcttgctggtgccagattggatggtggggaaatgcttgcatgtggtctggcaactcattttgtccagtcaaatagtctgctatcgctggaagttctcattttgtccagtcaaatagtctgctatcgctggaagaatcacttaaaaaggtggatacttccaatgcttttgcagtgtgtggtatcatcgatcaatttgctcaacaaccatcactgaaagaaagcagctctttgaataggttggaaatcatcaacaaatgcttttccaaaaggacagtcgaagaaattatatccgctcttgaagtagaggcctcaaattcggcagatgaatgggttgctacaacaatccagtccttgaagaaggcttctcctaccagtctgaaaatctctctgagatcgataagagaagggaggacacaaactgttggggagtgcttgcagcgggaatatagaatggtctgccatgtcatgcgtggtgacttcagcagagacttctttgagggatgcagggctatattgctggataaagaccgaaacccaaagtggatgcctccaaggttggaacaagtgcatgacgaggctgttgaacagtatttctccagaattgatgatccacagtgggaagacttgaacctacctgctagacgctcccacggaagaaatatcgagtccaagctttgatcgaaggtcatgggagaaaggtggaactctggaacggagcctcggtagtggtcagaataacacattattgcacatcatctcaagtttgaagagtctgcagactattgataaaataaacatgaatgtgccatataggtcaacttgtatcacagaaagaaactctttgctgtttatacgtggagactggagtcatatgcatttttaaataattataagtaataaaatcgaaaaagaaatcgttggaaaaaaataaaataaagaaagaaa

SEQ ID NO: 53761 - DNA, 432 bp, Zea mays
  Clone ID: MRT4577_149031C.1
gcatctcggcatgtggaagctgtgaagaggagaagacgcggggaggagatgctgcaagagaagccgaaccgaacgaaaggaaggagagagagagagagagagagaaaaaaaaaggacggctccgcccaagggtcggaagggagggagttgccgcgccgcggccggttcgatcctttgcgcgagatcgagcttctccggttggtgttggggctggcgacatctgggatccgtcgtctctcctcgtgttcttgagcagttttccacttgcctggcaaaagaacatttgacttggaagagcaaacactggaagctttgtggtttgtcctaagtgatcctatcaagttctcataggctgcatactggtacagcattttctcctgtgttttgggccacagaagaggggggagccaaggatttttctatctcgtaagc

SEQ ID NO: 53762 - DNA, 426 bp, Zea mays
  Clone ID: MRT4577_149032C.1
tgctttcctctctttcgggtctcacggcgacgactgggtgagccccgcctcccttacctggctcccagaggccctcgtcggtaacgagtgctgccgaccgcttccatgcattttccgccgcttagtgcccaccacatctagcgaaggctggtaactagacacatggtgctcaagaaatttaagccacacactctttatcattggaccaggcaatatttgtgttaatattacggacctgcatcagattgctgaaagttatccttgatccacgggaatgtagacacagaatatctcgaacattgatctgcagcctgtgatgcaatggctacaaagcttgtggacatcggtaccccctgcgatgttgacactgaagggtttccagagtacatggccaagttcggccccctaaatgattgtgttgccatg

SEQ ID NO: 53763 - DNA, 363 bp, Zea mays
  Clone ID: MRT4577_149033C.1
ataccaactatctacatgttacgcgcaatgttgcactaacaatggccgccaagagattcgggcttcttatgcttcttgatatgtgtgtacacgctgactcggtgaccatagtacagaagtgctcacaagctactataccttacatagtatcggcgtacctcttagcagcttacgcttaatggatgtgaaaacccaatgattcatacctacaagatccttcgtgcgatctcagatcataggttaactctataaatcgtgcacgtgcgacaatcattatccctgaatcatgagttaccgtcagtgcatcaatcggcacagatcattacggcgcaacaacgacaacgactcgggctagcaaacctt

SEQ ID NO: 53764 - DNA, 307 bp, Zea mays
  Clone ID: MRT4577_149034C.1
accacactgaaagaagggctacccctccacaagggtggagcatacattctacttggactgatccatccactccttcagaattaccaactacgaaacccaggacaccacccaaatccacacccacacatgctactccaacttcaacaacatcatccactcgatcataaacatgcacgcaaacttgatcaccattcataactcacatgcccacaaaaaacatctacacgtacccctcaagggcatcaagtacatcacgggcatcttccccatattctactacatacactacaccaggatcccgtcggct

SEQ ID NO: 53765 - DNA, 325 bp, Zea mays
  unsure (1)..(325): unsure at all n locations
  Clone ID: MRT4577_149035C.1
ccgctccgagccggccgggccgggatggagctgtgccagggccaaagaccgagaaacagaagccaagcgtccaagcgcaatagcgttcagtccccactccccactcctcactctcgcggtcgcggcctcaccggtcactgcttctcgaaccgccgggagctggaatcgcctccatagggaactgctctaatgcccgcggcgatctggaggcgnncgnccgnccaccnangncacgngcganggngaggncgaggccnagggnncggnnaggggcgagcngcgccgccgncccgccgcgggcccccgccccccccccccccccccc

SEQ ID NO: 53766 - DNA, 255 bp, Zea mays
  unsure (1)..(255): unsure at all n locations
  Clone ID: MRT4577_149036C.1
atggtaaagcatacatatatataaactggggcaccaacttgaaaaattgagtacaattgcctctagggatggattttaatcacatgggagtactgagacaaaaggggggggggggggcaccagtttagtccaagagataaagaacctgaaagaagtaaagaaaagggaaaataattaacttttgaatttattagcacaaaggcgatctctggggaacccccttccttttgctcntttttgggggcctgtgttttt

SEQ ID NO: 53767 - DNA, 269 bp, Zea mays
  unsure (1)..(269): unsure at all n locations
  Clone ID: MRT4577_149037C.1
gtagaacannttnggaggngctggaggttttttcggtgctggancntaanntggnggcacanggtntgntggttatggagntactagtcnttctctgnccggaactgttggtnttgtccagccactgtaacctctggcanntggattggcttacttgncntggtggnctttctgctgncccangtgtggatctgctctggggacaggccttgacagntttgcttgccacccagcaggggggtgggctgagttttnatagccatctgggg

SEQ ID NO: 53768 - DNA, 197 bp, Zea mays
  Clone ID: MRT4577_149038C.1
aacaacatagcaggtcaaaattcacacataagaaagtttaactctgtactgttcacactttttaatcctgtaaataatgctgcattttgatggttcttacttttttggtatttaatgtgggctgattttacaatgttatattcacttccagatgcatacctctgctgctttctctcctataaatagtgatgctataa

SEQ ID NO: 53769 - DNA, 1515 bp, Zea mays
  Clone ID: MRT4577_149039C.1
ggaggcaaactccacttggagtttatttaggataacatccaagtaattccagttccaaatcacttgcacttaaacaactcgtttaggtcctcaatcagcacacaggattacttggtctgttcagatgcggatgagttagaaaaatgttaaccacagttgtcatactaccaaggctaagattaggggtatagatgaaacttcctgctgtacatgtaactgtagaaatggacgaagtctgcgtataatcaaccatatctccatttgatttccaatgcggagcaccccgtcagcgtcagctattccaactctctacaacgtgaatatgtgttggcgattacgggacgtctggggacgcttgacaggtgagattatgaggtttcgcagggtgcttgatggattgttcagtgtagctccgaagactgaccgtgtctgctgtctgggcctgatatcagccggaggagccacggcatgggcaggagacccggtggacagatcaaagggaccagaggtgcagtgacgttgccttggcggtggaccccagccctcatctctctgccctggagttttaggaagatcaaccgatccttgtctcagatggtcgccaccatccatcacgttgggcatgcctgcaaataagtctggctgaggtcttgctaagtagttatttgcaggttgaagggcagaacgcttcaccgactcatattcattcctcagttggtcatacatctcatcaagcttcctcttctgcctggatttctcagcaaatttttcttgcagctcgtgcttatctctgttcaagttttcattctcttgctccaacaactgacatcttttcgccatcttctggtatgcggtatgtacttcttccagtttctcagtaaatttcgcctgcataagttcacattttgcctacattgaccaacaattctgttcatcttgtactgcatctccagttccttttgtccaatgtagaacattacgcttctgtatgcactcttcataagtatttgtggggatattccaaccattgccatatttgtccaatcatcacctggatttatatccataggtttcatatggctttttgagagcacctgatcacaaattggacatgtaccatcattattgagtattttcctagcatcatctgcacctgataaaagatgtccacaggtggttgatacagcttgcccttccaaatcccgccagcaagcattgcacttcattttgttcctacaaattattagattaaaaattttcagttccgcacgaagcctcttgctccaacttcattcctaggagagaagagaggcctccagtttggttcccatagcagcctgacatattagtctcacaaccattgactcaggtcccagaatctaatctagtaggaagacaagtgaaaaagagcatccaaggtattagagggtgccgttgaatctagtaggaagacagttgattaccagttgaatgaacatgtagacctttctatctaaacaagcgcggacgcgtggg

SEQ ID NO: 53770 - DNA, 278 bp, Zea mays
  Clone ID: MRT4577_14903C.1
cccacgcgtacggagagaagggccttcttggatcaagaatcaagatctcgtgtcctgtgtgtctccctctctcggggagggagggagggaggattggttagtcgttggatcatgtcggggagtgcactgacatcatttctgataaagaacaggagaaagaagctagctcttaagggcgttgttcaaatctctcttgaccttgccaggggattaagctatgtccattccaagaagactgcgcaccgtgatgtgaagactgaaaatatgcttcttgacaa

SEQ ID NO: 53771 - DNA, 545 bp, Zea mays
  Clone ID: MRT4577_149040C.1
ccggccgggcccgagtcactcgcagccttttcgccttttcactccgccttctcgcgatggcgccgccgcgccgcgctctactcgtcctcgccgctctcctcctctccctctcccttggggccgcctccttccattccgacgagctcctcctcaacgatgacgaagagttcgagggcgtcgtcgcccgcccctccgccccctccccgcaggcggtccctgtggtgtgctcctaccgccgcagatcagcacgacgcgcccgtgcccgggcacaggcaagcaccaacgcatggcattccacgcttcagcacgaccttggcgactgcaaggacttcgtctaaggtgaaaccttatcggcccatctgaagaccttcgaccactacacgcaaaccctcactaaacttcgttttacaaggaaagacattactgaagatgacaaatctgcgttcaaaaaagtgcttcatgaagatggattttatacaattaggctgccatcgaatgtgctggacactataaagaaacaacaagcagtatcttcaatcaaagct

SEQ ID NO: 53772 - DNA, 132 bp, Zea mays
  Clone ID: MRT4577_149041C.1
aattgtatctgctgttttggtgtgattgtatcttttatataaataagaccaaaaacccgccccacaaataatgactgcacctactgggtggggtaagtgcgactgctgccctggcgtgagccgccccctcta

SEQ ID NO: 53773 - DNA, 812 bp, Zea mays
  unsure (1)..(812): unsure at all n locations
  Clone ID: MRT4577_149042C.1
ccggccgactcctgttcgttcgttaagccctctgaccggccgaaaccccggtggcctcctggaggttccgggattgagttcgatctgagctgctgctgcctgtggaggcattcccttgtcgtttcttgcagtgtcctggtggtggtgaccggtggatatgaacactgtgtgtgaagtttgtggtgatattgcttacagacaacttctgctttgttgcagagactgcaagcgttgtgctgtgcaccaatactgtttggacaaagttgtctacgaggcatcattaataaaatggttctgttatgaatgcctactaaggcgtggtgaagttactcgcatcagttctctagagaagttgtcaagtgaaagaccactaagtcaggtccattctcgttctccagtacagtagctaattaccaatagtgtagagtcagtaagggatgcagggccttggagagatcggaaaaatgaatcaattgcgactaaatatccatctctcaacataacatatccttcaattaagaagcacactaaaaagaagccgattgtgaaaccaatggttaactgcacaaatacaaaagtgcgaatggctaaagttaccacccatacaagtgccgaagcgtcacgttcttgtgaaaccattgggacagaatcatctaagagcaaccatgtgaagaaccagcaggtggaccatgcaaaccctgtcgcattgaacactgagcagtcttgccctttgattgtgaatagcttgagtacattgngagataatcaccagtatcacctcttatacacaacagaagggttggcttgcaaat

SEQ ID NO: 53774 - DNA, 420 bp, Zea mays
  Clone ID: MRT4577_149043C.1
tccctttcgaccgatcgtactctcgattctccttgacttctacacattctcccaattcatccccactcactccgatgttagcatgtcctttaactctgctgggcaccttatccctctccaacaccttcttatcctcgctctccagctccatctgccagatcacatccatgcaaccactaacattaaggttatccccgataacgacccctccgtcctcctactagctcccatccgtaaccttgcgtcgatatctcgcctagtctatatcgccaccttctacatctgtcccattttactttacaccttacacgatcctctaatccttccatccaccatgatagctcgtagcttctctctgattatctacatctaccctatgtccaagatctgatataccttcgaatctgtctgctgcaatca

SEQ ID NO: 53775 - DNA, 566 bp, Zea mays
  Clone ID: MRT4577_149044C.1
gccggccgttccggggcccagccacctgacgtgagatgcggatcaactcccccaccactccacccgccgctgcatccgctccacgacgctcgctcgtaccgtcgcggcgaggaagcactaccacgagacgctcaacgccgccttccgcgtgctcgaggaggaggccatagacgccacgtgaggcaatgaaggatgaggggtagcgttcgtaggaagatgggtcgaccatgaggggatcccaaccagcttcacccacatgccttatgtctgcctcccctcctgcacttcgccattcttcccctcccacacctcgagaagcactacaggtctcacctgcctgttctcctgccctaggaaccgctggatctggggggtactacaacggtttggcggtggtggaggagggcgacgaccacagtatgagttgtgatgattctaattgttcctttgctggatccaaattatacactataagtatgtattgtgatgattctatgttgtcttaaagaataaacatcatatgagttgtccccaaatggcaaaaaaaaaaaaaaaaaaggccccta

SEQ ID NO: 53776 - DNA, 351 bp, Zea mays
  Clone ID: MRT4577_149045C.1
aaacccgggtcgacccgcgccttccgattgatagcagatatgacaacactgaacttggctctgaagcaacacaccccctccaatgggggcctaaatactctgcgttatgggcaatgctcagtattttatccaccaaagttactccggcctgaccaagccccttgagaaacctataacatcactcgccatggaaagaagggataagaaactcttctagaacctctcttccttccattggaaccatctatgctacattacgcaaaaatggacacctgtgtacaataaccaaattgccggtctcatctacgatctatgatacttaaaacaatatatgctcttttctacccacag

SEQ ID NO: 53777 - DNA, 442 bp, Zea mays
  Clone ID: MRT4577_149046C.1
aggaaaaacatttccggccccccggggtcataacggccctcacgatcgaaaatttcacaggttaataaggggggaaaacaaatttggtgaaaacaacccctcccccccatggttaaggccccctggcatgaacaaaaaaaattaaactttggggggaacaaaaaaaaaaacagtttccccccctgctttttatttgaggcgttctgatttggggaaaaaagggaaaatacttgcgaccatgtttatccagccccctagggaagggccctctggtttaggggaagggctcccagggactgaccctcggcgcttttctttttccccaaccccaacagggcactcaaatatccttggaagggaacctgcggggcctggaggccccccgggaggtcctggggcttcatggagagggccatggcccccttgaggccctggatgcggg

SEQ ID NO: 53778 - DNA, 455 bp, Zea mays
  Clone ID: MRT4577_149047C.1
caccactccaccccgccgctgcatccgctccacgacgctcgcccctatcgtcgcggccaggaagcactaccacgagacgctcgacgccgacttccacgtgctcgaggaggaggccacatgaggtaatgaaggatgaggggtagcgttcgtaggaagatggatcggccatgaggagatcccaaccttgcgtccgcctcccctcctgcacctcgccattcttcccctcccacaccttgagaagcactacaggtctcacctgcccgttcttctgcacccggaaccgctggatctgggggtactacaacggtttggtggtggaggaggagggcgacgaccactgtatgagttgtgatgattctaattgttcctttgctggatccaaattatacactataagtatgtattgtgatgattctgtgttgtcttaaagaataaacataatatgagttgtcccc

SEQ ID NO: 53779 - DNA, 376 bp, Zea mays
  Clone ID: MRT4577_149048C.1
acaaaatgtttcagaaaagagataaagggcatgaccggtggtgccttcactgaccaaaaaaaaaaaaaaaaaaaaaaaaaaaaaaaaaaaaaaaaaaaaaaaaaaaaaaaaaaaaaaaaaaaaaaaaaaaaaaaaaaaaaaaaaaaaaaaaaaaaaaaaaaaaaaaaaaaaaaaaaaaaaaaagggggggccccccaaaaggttcaaaccttacttacccttgaatgcaatttcaaacctcttcaaaagtgcccccaaatttcatttcaggggccttcttttaaaaacttcgtaatgggaaaacccttgggtttaccaaatttaacccctttgaaaaaaatccccttttcccaaccgggcttaaaaccaaaaaggc

SEQ ID NO: 53780 - DNA, 383 bp, Zea mays
  Clone ID: MRT4577_149049C.1
gacccacgcaaccagaaaaaaaaaaaaaaaaaaaaaaaaaaaaaaaaaaaaaaaaaaaaaaaaaaaaaaaaaaaaaaaaaaaaaaaaaaaaaaaaaaaaaaaaaaaaaaaaaaaaaaaaaaaaaaaaaaaaaaaaaaaaaaaggggggccccccaaaaggttcaaaccttacgtccccttaaatggaacttaaaaccccttcaaaagggccaccaaatttcaattaacgggccttcttttaaaaacttcggaacgggaaaaaccctgggtttaccaaattaaacccctttgaaaaaaatccccttttcccaagtggggtaaaaaccaaaaaggccccaaccattcccccttccaaaaattttccaaccctaaatggcaaatgg

SEQ ID NO: 53781 - DNA, 337 bp, Zea mays
  Clone ID: MRT4577_14904C.1
ggaataccccccgcgacccacacatccgggcacacgcactgtctcacccacatctttccactaatccgccaccgcaacactaaggtccctttcaacacttacctgccccgcaacatctcacactccttctcccaccccctcgcccccaacaaatactccacatacaacaagtcccaccctaacacgcccccctccaccatctcttcactccatcaccaccatacccctcgtcttatccacttaatccatcaccactacctccctcgctattcacggcactcgttcaccaaactccgcacttcccctcacttcacttcattcaaaacctcctctttct

SEQ ID NO: 53782 - DNA, 549 bp, Zea mays
  Clone ID: MRT4577_149050C.1
gccctcgtccggtccaggagaacccgctgacactgcaactgcagccgacacgggctgagctgacgctgtgtctatccattcgtgttgaggaaaaacaacgccaatcaatccagtccagggtaagggctatggccgaccgctaggatcgcctcctgcaccacctgcggcctcaccgacctggccattggcatactaccccgcgccggcgtcacgctggacgtggtgcgccggatgcgccagctactacgccgatccaaggccctgtgacttgcccccatcctcgaggagtccgacggtggcattcactctgccttcgacgtacactccttgggccgaagccagagccagggccagaccgtagtcacctcctcactgccagcgcgtgcctgaggatctgaaccatcaaatacgagaccttgagcttcttgccataggacatgctggggacttgttgttaaatgctaacattttagaacaaggcaacataaaaagtgctaagtgttaaagtccttgctgcttaaaaggattatataccttcgggaaataatg

SEQ ID NO: 53783 - DNA, 661 bp, Zea mays
  Clone ID: MRT4577_149051C.1
agaatctcgaaagtaatttcttatttctaggaggccacatacatcagccaaaaaacttcattagtgaattacagctaataagcaatctaaaagagggcaccaccaatgatgtgttgttggtaggaggggggtgggtttgtcaaagcaagttggacaaagggcagcaactgttgaagttataagagggttgcgtggttagccgcaaatagctggtagaatggcaacaactgttgctatgtcaagaaggaagcatggcttgctgcagctagctggataaaaggtagtagtatttgctgctgcaaataagcagcgaggttcagtgcggccaattggttaaatggaagaagttgtcgtagctgagagtaggcaatagctagctggctgaatggtaatagttgttgatgctgcaaataagcaaaagggttcagtgtaggcagttggttgaatggaagaaactgttgttgctgagagtagggagaaaggtttgccagagctacttggttgatcacaagtagcaagagttgctgcagctgttgtgccccgatggtttgtaccaatgactgcaccaaagatagggatggcgattgttgaaacaacgagggtgataaaggtaagttgcttgctgctttgcttgtggacctataggttgaaagctgggttt

SEQ ID NO: 53784 - DNA, 419 bp, Zea mays
  Clone ID: MRT4577_149052C.1
agccttccgaaacccaccaggcaccttttaaagtggattttatgttcaacaatcgagcatcaatggcgacgagagatattttccctccatatgctcctagctctctctgcatgtgttgctaacgcgacaattttccctcaatgctcacaagctcctatagcttcccttcttcccccataccttccatcaatgatagcttcagtatgtgaaaacccaactcttcaaccctataagctccaacaagcaatcgcagcaagcaacatacctttatcacccttgttataacaatcgccagccctatctgtggtgcactcattggtacataccatcagggcacagcaactgcagcaactcgtgctacctgtgatcaaccaagtagctctggcagactcttcttcctactatcagcaacaacaaat

SEQ ID NO: 53785 - DNA, 336 bp, Zea mays
  Clone ID: MRT4577_149053C.1
attgagaccaacaagcaacataggaagtggaatacagtagcaacaatagagcaacaatggcggccaagatattttccatccttatgctccttgctctttctgcatgtgttgctaacgcgaccatttatcctcaatactcacaagctcctatagctgcccttcttgccccatacctaccatcaatgaccgcttcaggttgtgaaaacccagcccttcaaccctacaggctccaacaagcaatcgcaacaagcaactgaccttaatgacccctgtgctttgaacaatcgtcagacctatgtatggtgcatacattggttcaaaccataagggaacaac

SEQ ID NO: 53786 - DNA, 1947 bp, Zea mays
  Clone ID: MRT4577_149054C.1
atgtcctcctccgtatccattgcggcagagtgggatctcctctccgatcgcttctaccgccggctcacactctactcacctctcccatggtccaccccagccgcggccggcgcgacctcgtcctcctccggcgtcagcggtgctgtgatcggtcgccttgacctgtccacccacatcgtcgccgccgcgccctttggaggcccgatcgccgccgtccgcgacgactctaagatcgtgcagctccactccgagccatcccgccgccgcgtcctcctcttctcctcctccggccacccaattgcctccgcgccctggccaccccttctcccacgcctccactcgctcggtttctccagctccctcagcctcctcgcacttctctccgacggctcgctcctccgcttccgcctccccgatctgcaacccagcccttgctccagtcccgttcccctgctcccgccggcctccggcggcgtcgccgacgctctattctggggcggcggtgtagccatcctcacggaagacaaccgcgtcgtggtggccactgacatcgaggtcgacgatcctcacccccgtcacctcgccgacccaggcatcggtgatgaggaacatgttctgtgtatggccgtggtggaggcacagtttgtcatgtcagggagcccagaagtgctgcttgctgttggcgaccgggtcattgcggttgacgaggatggcgtacaagtgcttggggaagagctggagattggacccgtgcagaagatggcagtttcacccaatggcaagctcctcgcagcatttgcacatgatggtcgccttctcgttattcccaccgatttctctaggatcatattcgagtatgagtgcgaatctgcattgccaccagagcaaatagcttggtgtggactagacagtgtactcgtctactggcctgaagtgcttttgatggttggtccaaatggagatcctgtccaatacaattatgatgaacccataaaactgattcctgagtgcgatggtgtaaggatcctatctaactcaagtatggaatttctacaccgagtctcagactctaccacgtcaatttttggcattggaagcatgtccccagcggcattactgtatgatgctcgtgatcactatgacaggcaaagtgcaaaggcttatgacaactatcaattaatatcatcttcattgcctgaggcaattgaggcttgcatcgacgctgctggccatgagtttgatgtttcacgccagcgcacattgctgagagctgctacatatggcctagctttctgcagtcgatttccacatgaacgctttcaagaaatgtgcaaaatgttgagagttctaaatgctgttcgtgatcctgagattgggatgccactgaccattcatcagtacaagctgcttactacatcggtgctcattggacgtctcattaatgctaatcagcaccttttggcccttcgcatctctgagtaccttaacctgaacccggaggttgtgataatgcattgggcatgtgagaagataacagcatcaacaactcttccagatacagtccttcttgatggtctgcttgataagctcaggctatgtaaagggatatcatatgctgcagtggcagctcatgcagataacagtggtcgacgaagcatcgatgaacaagacaaagcattatcaaaggcaattgaaagtggcgataccgatcttgtgtaccttgtgctattccatatttggcagaaggtagctgtagagaagaaagctcctttggatttttttggtgttataaatgcaaggcctgtggctagagatttgtttatggcatatgcaagacattctaagcatgaagaattgaaggacttctttttatcgactgggagacttcaagtaggttgcatacataacgatttgttggttgttatatatcatggacgctgtccttga

SEQ ID NO: 53787 - DNA, 297 bp, Zea mays
  Clone ID: MRT4577_149055C.1
cccacgcgtccgctaacgcttgaattcacacttacactgtatactacttcacaacctcatcccgctcgagaattttcatgagacagcgaggagaatctatcctatatacaccttgactaacagcaagagctataaactgtcaataacagctctacagttcaaaagctctatcaactacctgatcgactactaattaccattgatacacttatattcaagtccactgaagaccttttacaaccctacatcattactattatatgctattgcaatccatgaaactccacacacttcaat

SEQ ID NO: 53788 - DNA, 549 bp, Zea mays
  Clone ID: MRT4577_149056C.1
tacaaccctcgcttcagcatgtgaaaacgcaggtattctaccatataggcttcaacaagcaatcgcagcaagcaacatacctttatcgcccttgttgtttcaacaatcaccagccctatctttggtgcagtcattggtacaaaccatcagggcacaacagctgcagcaactcgtgctacctgtgatcaaccaacttgctttgacaaacccagcagcattctaccaacaacccatcattggtggtgccctcttttagatttcttatgagttatagttcaataataaagttttttgtcagatgttggttggttaccagactgtcggaaagtccattcttagttatcctattattaaaccctacttttttctcttaacttctcctgtttattttttgaaccacatactcttccatttaggccgctggcttgtgcctcccctcggcaatttctttcattcaaccaactgggagcattgaactttaatgcttatgtacaacaacaacaacttcttacattaagcccgtctggtgtgagagccctgttgcctctt

SEQ ID NO: 53789 - DNA, 3164 bp, Zea mays
  unsure (1)..(3164): unsure at all n locations
  Clone ID: MRT4577_149057C.1
gacctctttcgcccagcccggcgaccccgccgcgctcctgcctcgcctcgcctcgccgtcggcgaccgaccccacgtctgcccggcgatgtcctcctccgtatccattgcggcagagtgggatctcctctccgatcgcttctaccgccggctcacactctactcacctctcccatggtccaccccagccgcggccggcgcgacctcgtcctcctccggcgtcagcggtgctgtgatcggtcgccttgacctgtccacccacatcgtcgccgccgcgccctttggaggcccgatcgccgccgtccgcgacgactctaagatcgtgcagctccactccgagccatcccgccgccgcgtcctcctcttctcctcctccggccacccaattgcctccgcgccctggccaccccttctcccacgcctccactcgctcggtttctccagctccctcagcctcctcgcacttctctccgacggctcgctcctccgcttccgcctccccgatctgcaacccagcccttgctccagtcccgttcccctgctcccgccggcctccggcggcgtcgccgacgctctattctggggcggcggtgtagccatcctcacggaagacaaccgcgtcgtggtggccactgacatcgaggtcgacgatcctcacccccgtcacctcgccgacccaggcatcggtgatgaggaacatgttctgtgtatggccgtggtggaggcacagtttgtcatgtcagggagcccagaagtgctgcttgctgttggcgaccgggtcattgcggttgacgaggatggcgtacaagtgcttggggaagagctggagattggacccgtgcagaagatggcagtttcacccaatggcaagctcctcgcagcatttgcacatgatggtcgccttctcgttattcccaccgatttctctaggatcatattcgagtatgagtgcgaatctgcattgccaccagagcaaatagcttggtgtggactagacagtgtactcgtctactggcctgaagtgcttttgatggttggtccaaatggagatcctgtccaatacaattatgatgaacccataaaactgattcctgagtgcgatggtgtaaggatcctatctaactcaagtatggaatttctacaccgagtctcagactctaccacgtcaatttttggcattggaagcatgtccccagcggcattactgtatgatgctcgtgatcactatgacaggcaaagtgcaaaggcttatgacaactatcaattaatatcatcttcattgcctgaggcaattgaggcttgcatcgacgctgctggccatgagtttgatgtttcacgccagcgcacattgctgagagctgctacatatggcctagctttctgcagtcgatttccacatgaacgctttcaagaaatgtgcaaaatgttgagagttctaaatgctgttcgtgatcctgagattgggatgccactgaccattcatcagtacaagctgcttactacatcggtgctcattggacgtctcattaatgctaatcagcaccttttggcccttcgcatctctgagtaccttaacctgaacccggaggttgtgataatgcattgggcatgtgagaagataacagcatcaacaactcttccagatacagtccttcttgatggtctgcttgataagctcaggctatgtaaagggatatcatatgctgcagtggcagctcatgcagataacagtggtcgacgaaggttggctgcaatgctcgttgatcatgagtcacagtcctctaagcagatccccttgttgctcagcatcgatgaacaagacaaagcattatcaaaggcaattgaaagtggcgataccgatcttgtgtaccttgtgctattccatatttggcagaaggtagctgtagagaagaaagctcctttggatttttttggtgttataaatgcaaggcctgtggctagagatttgtttatggcatatgcaagacattctaagcatgaagaattgaaggacttctttttatcgactgggagacttcaagatgccgcctttcttttgttgaaggaatcatgggaattggagaagaaccccatggcaagcaaggggtctcctctccatggtccacaagtgaggctcattgagcaggcccatagactttttgctgaaaccaaggaacatgtttttgagtccaaagcttctgaagagcatgccaaattgctaagatcacagcatgaacttgaagtttccacaaagcagccaatatttgtgggttctagtgttagtgatacaataaaaacctgtattgcaatgggaaacgagcgtgctgcactcagagtgaagtccgaattcaaggttcctgataagaggtggtactggcttaaaacgtgcgctttagccacagttggaaactgggatggtttggaaaaattttcaagggagaaaaggccaccgggaggctataaaccttttgtggaagcatgcattgatgctggtcaaaaaaatgaagctgtcaaatatattccaaagttaacagatcctcgtgaaagatctgaggcatatgctcggatgggcatggcgaaggaggcccaagatgcagcctcacaagctaaagatagtgatgagctatttggccgcctaaagattacacttgcacagagcagtgctgccgcctccattttcgatacattgcgggatcggctatcctttcaaggagcatattgatcaacgtgattttgtcgtaggcccggatgtgcacctcgatgttttgaacagaccggcaatttatttatttatttgttttctgctctgttgtatgtatgaagaattaacctcagtgtgaatacatgtccatggaaatttacggtcacagaactgtgcagccagtgcacgtgtggttcacctgtgacattttggatttctagggtatatggggacacgaagtggagtagctctgtctgtggtgcttgagtgggaggtgcatntgaatagaacctcgtctcccatcccagaaaaaaaaaaaaaaaaaaaaaaaaaaaaaataaaaataacaaaaaaaaacttaggaccgggaaccaccgctaagggcaatattctggagatttccttcaaactgggaggccggctcgagcttgcgtctcggtagggcccattttccccctattggg

SEQ ID NO: 53790 - DNA, 732 bp, Zea mays
  unsure (1)..(732): unsure at all n locations
  Clone ID: MRT4577_149058C.1
ggcgcgggcgcggctacaaccatatgattgcgtacaaccagtacatagaagcggcatgcgcaggaacctagagcacccggcgaccaagaattgttcctccttatgctctgttgctcttttgtgcatgtcgctgttaacgcgaccatgtgccctcaatgcttacaagcccactatagctgcccttcttcccccataccttccatcaatgataccccggagcacgtgacaaccccgctcttccaccctataggctcccacaagcaatcgcagcaagcaacatacctcgtatcacctctctggttccaacactcgccagccctatctttggcgcagtcattggcacaaacaatcagggcacagcagctgcagcaactcgcgctacctgtgatcaaccaagtagctctggcaaacctttctccctactctcagcaacaacaatttcttncattcaaccaactgtctacattgaaccgcgctgcttatttgcagcaacaactattaccattcagccagctagctactgcctactctcagcaacaacaacttcttccatttaaccaattggccgcactgaaccccgctgcttatttgcagcagcaaatactactaccatttagccagctagctgcagcaagccgtgctttcttcttgaccagcaacaggtgctgcctttctaccagcagtttgcggctaaccccgcacccctcttacactacaacaattgttgccctt

SEQ ID NO: 53791 - DNA, 801 bp, Zea mays
  Clone ID: MRT4577_149059C.1
gccggccgggtttccgaaacatattattggagaccaacagagcatcatagtaaagtcgaaatacagagagcaacaatagcagcaacaatcgccgggcaagatattttccatccttatgctccttgctctttctgcatgtgttgctaacgcgaccatttttcctcaatactcacaaggtcctatagctgcccttcttcccccataccttccatcaatgaccgcttcagtatgtgaaaagccaccccttcaaccctacaggctccaacaagcaatcgcaacaaggaacttacctttatcacccctgcactttcaacaatcgccagacctatcttcggcggagtgattggaacaaaccatcagggcacaacagctgcagcaactcgtgctaccagtgatcagccaagtaggtctggtaaacctttctccctactctcagcaacaacttcttccattcaaccaactgactacactaaaccctgctgattatttgcagcaacaacaactactaccattcagccagctaggtactgcctactctcagcagtaacaatttcttccattcaaccaattgaccgcactgaacccctctgcttatttccagcagtaaatactactaccatttgggcagctagctacaacaaaccccgaattcttcttgaccaaacacaattgcttccgttctacctgcaggttgtggctaacaccgcaacctttttaaactggaacagtggctgcactttgttcactttgctttgaccaacccagcgacccttctacctgcaacaaatcctttgggggagc

SEQ ID NO: 53792 - DNA, 1019 bp, Zea mays
  Clone ID: MRT4577_14905C.1
ttagatggtgcactcccttgaagcatccttcctcccatcccgtccaagatcacaaacgaaagtagtacgtgcacaggcgctgatcagcatccgcatcctccggcgaccaacgtttttagattggatcgaagctcctttgcgattcacccacccaagatcgaaacgttctcaaatcggagaaaccacgtgcaaacccgcgacgcgatcggcagcggttgttgggtccgcgacagcgaagcttcaaatccctcgccactcgttgcaagacaccaaatcattcgaacgcccaagacaataacatttcgtgctggcgtgacggcactataacagcgacccgttcgctagccggattcaaaaccggggagaagaggaatccatcctcagctcccatcattccagaccttgcgcaaagctaaactccccctgtcgtctgattacagatccgtttctccttcccgcacaattctaattcgatcgatccccggccatccgcgccggccagatttatgcagccatgcagaacggcgggttccggaacagtttgactactgacgctgccgctgccgctgcgctgagggaccggtttcgggatccgcaatggcgagcctgtcggactcggcggtcgccgcgcccgcacgcgcccccgcccccgcccccggcagcgtcggcgttccggaggcgggaccggtggttccacctgccgctccacctgccgcccgcggcggagcacctgccggagccgtctcccgccgagccgctcgtggtggacgtgtacctggccccatcgggcggcggaccagaggaggtgctcgagaggtggaccgtggcgtgcgagccctggccctcgcccgccgccgcgggggaggggctggcggtcaaccgcgcgtacaagcgctgcatcacgctgctcaggtcactctacgccatgctccgcttcctgcccgcgtaccgcgcctttcgcgcgctctgcgcgtctggccaggtgtacaactacgagatgggccaccgcgtcggctcct

SEQ ID NO: 53793 - DNA, 222 bp, Zea mays
  Clone ID: MRT4577_149060C.1
gggcatcatcgatgtcgatcccaagggtgtacgcctgatcaccaaccagggaagtcgttatctggaccaagtggctgcaagggtcgctgttgaagcgtgagctgtgtcatctttggattcaatggtgtcatgtttgatgtttgagaagtctgcgctctatgtgctctttggggttaggattttcgagttcagaggactttaaggtttattgcatctagctat

SEQ ID NO: 53794 - DNA, 722 bp, Zea mays
  unsure (1)..(722): unsure at all n locations
  Clone ID: MRT4577_149061C.1
ggccgctttttttttttttttttttctatggaaatgtaacttcttatttctgggaggccacatacattagccaaaaaacttcattagtgaattacaactaataagcaatctaaaagagggcaccaccaatgatgtgttgttggtaagaggctgctgggtttgtcaaagcaagttggacaaagggcaacaactgttgtagttgtaagagggttgcggggttagccgcaaactgctagtagaacggcagcaactgttgttgtgtcaagaaggaagcacgacttggtgcagctagctggctaaatggtagtagtatttgatgctgcaaataagcagtggggttcagtgctgccaattggttaaatggaagaagttgttgttgctgagagtagacaatagctagctggctgaatggtaatagttgttgctgctgcaaataagtaggagggttcagtgtagacaattggttgaatggaagaaactattgttgctgagagtagggagaaaggtttgctagagctatttggctaatcacaggtagcacgagttgttgcagctgtcgtgccccgatggtttgcaccaatgagtgcaccaaagatagggctggcgattgttgaaacaagggtgataaaggtaaattgcttgctgcgattgcttgntggagcctataggggtgaagagccgagttttcacatactgaatctatcattgatggaaagaatggg

SEQ ID NO: 53795 - DNA, 231 bp, Zea mays
  Clone ID: MRT4577_149062C.1
tttttctctgcacccctggctattaaaagcagcccgaggccgccgcccgcgcgccgcatcacccaccaatccacaggggacacccggacgcccgccgttgacgatgaggcctggcactgcgtcaatgtccacggctccgagcttcctcccgccgcgaagccgccggctaccctctcctctgggccaactccggaagcgagaaggaggaccatacctggtgctcttgcgggc

SEQ ID NO: 53796 - DNA, 575 bp, Zea mays
  Clone ID: MRT4577_149063C.1
cggccgaggtacaagctttttttttttttttttttttttttgcatcatccaaaaactttattattgaattacaactaataagcaatctgaaaagagggcaccaccaatgatgtgttgttggtaggaggctgttgggtttgccaaagcaagttggacaaagggcaacaattgttgtacttgtaagagggttgcggggttagccgcaaactgttggtagaaaggcaacaactgttgctgtgtcaacaaggaagcacggcttgctgcagctagctggctaaatggtagtaatatttgctgctgcaaataagcagcggggttcagtgcggccaattggttaaatggaaaaagttgttgttgatgagagtaggcagtatctagctgactgaatggtaatatttgttgctccaaataagcagcacggttcacagtttatagttggttgaatggaagaaattgttgttgctgatagtatggagaaaggcttgccagagctacttggttgatcacaggtaacacgaagttgctgcagctgctgtgccttgatggtttgtacctgcccgggcggccgctcgaaa

SEQ ID NO: 53797 - DNA, 630 bp, Zea mays
  unsure (1)..(630): unsure at all n locations
  Clone ID: MRT4577_149064C.1
gaaacattgggcgtggcgggctgagacggtaaacggaccgcgccgggcgtagcccatcttgcctagccttctgctcaagcgctctccctgatgctaccgctgcacgcgctcataccggctccatactgcacaagttcgtgtcgctgtcatggtcctcgcacatcttgcatatatgtccgctggagtgtgtgcacacgcatgctgtgaaccgtacatgatccagccagctatgaataaccagcgctctgtacgtttatcacacctgcgctttgaacaatacgcagccgtatgttcggtgctgcacttggtacaaaccatcagggcagatacaggtgcgctactcgagctaccagtgatcagccaagtagctctggcaaacctttgggcctactctcatcaacaacaattgcttccattcaaccaactgtctatactgaaccctgctgcttatttgcagcaacaacaactactaccattcagccagatagctactgcctactctaagcagcaacaatttctttcatttaaccaattggccggactgaacccctctgctgatttncagcagcaaatactactaccatttggccagctagctacaacaagccccgctttctttttgacacaaca

SEQ ID NO: 53798 - DNA, 637 bp, Zea mays
  Clone ID: MRT4577_149065C.1
cacgcctgcgtgtaccgggcccctattacacggccgacctcagcgttcgttaccaacagcacatataagtggttttcacacctcaacgagcacagtggctaccaatatatggtcgctccttatgctccttgatatatctgcatgtgttgctaacgcgacaattctccctaaatgctgacacgctcctatagctttccttgttaccgaataccttcgcatcagtgataagcttgcaggtatcgagagaaacacacaactcgttcagaccctgataaggatggcaacaagcaatcgccgcaagctgcatacctaaatgcacccttggtggttcaacaatacgacagacctatctttggtgcagtcattggtacaaaccatcagggcacaggatgtgcaaaaactcgtgctacctgtgatcaaccaagtagctctagcaaacctttctccctactctcagaaacaacaatttcttccattcaaccaactgtctacactgaaccctgctgcttatttggagcaacaactattaccattcaaacagctaaatactgcctactctcaacaacaacaacatgtttcatttaaccaattggccgcaccgaaccccgctggttatttgcagcagcaaatactacta

SEQ ID NO: 53799 - DNA, 280 bp, Zea mays
  Clone ID: MRT4577_149066C.1
gcggacggcccgcccttttttttcttttttttttttttttttttttgggtgggttaaattttctttgggtgggccccccattcagtccaccagtttcaactctggggccgttgttttaattttttttggggaccccccaggcaaccgggaaaaagcccgagacgggaagaggccgcacacaccacaccgaaccggccccgggcgaggcccgatcccaagaataacacacgagaccataaaacccatagctgcaggataggcggaaggccctccgaaaggt

SEQ ID NO: 53800 - DNA, 849 bp, Zea mays
  Clone ID: MRT4577_149067C.1
cacccgtccgggccgggctcgagaaagaaaaacagacacacgtcactgttcgccttgtccggtcgtttctgctccattcctcctcctgcaagccgcaaaggaatcaggcggagtggcgcgatgggagagcaggtcgtgacggagcagatccagcggaagctggaggaggtcaacgctaccgtccaacagcacctcgcgggtgtccaggaccacatcaacttcaccatgcagcaagcatacttcaagtgcgcatatggttgctttgatcggcgccatactcaggaagcgatcagcaactgtgtggagaattgtagtgtgcctgtccttgctgccaacaatatttttgagagtgagatggccaagtttcagggaatgttgaaccggtcattgagggtctgtcaagataagtttgaagctgccaatctccagaagttgaaatcagatgcaactcgggaactggaatcctgtgtcaacagatctattgatgacagcctcagggtccttccgcatgtggtggatcagatcaagtccaccctcaaaatcaattagaggcactattacttttagcaaatgaaccagatatagttgagaatgtttcatattcacattcgctgcataactccacattttcagagctcttaccgatattgatagaacatgatcaccctatcgtagttttttggattctgctcttaccacctagtcctggcatgtcaacagcgtcgacattttgaactctactgagaacacagcttaggcattgaaaggctggatgaacttgttgtgctacatgtacaagaatactcttacgtcttgtgattttaaaaaaaaaaaataaacctaataaat

SEQ ID NO: 53801 - DNA, 705 bp, Zea mays
  Clone ID: MRT4577_149068C.1
gtgaggcaggaactgctccatgcaaatcaaattttcgcccaacatccaatgtggccagtcattgcggtcactggaagagctatagaggaaacagctgctgtcgttgtgaggattctccaagacaggatacagaagtactccatgccacgcatatcaaaacggtactaagggcacgtttggtttcattagtctctgtttggtttcagggactaaaagtgttaagaactcattaaattactcataagaatactaaaatgtcctttaccattcttccgccattactcttcttccactgcaatagaaataaataaggggcaaaatgtggaattaatatggtttagtcccttttagtcatcccttgagggactagatactaaagcagtttagtctctattttagtcctactgtttagcaatttggggactaaatgagactaaaatgcaggaaataatctttagtctctgaaaccaaacaaatcctaacattgtgttctatctcttctacaacttgtaatgtgtgcatgttttgttgagctctgtgtcaagcaccatagcctttatgtttttttgtcagaccaccttctaggtggcgtttgtatcttaaaggcaacttgagatttagcacaacagaaacatatgtatattgtatttacgacattctattggccttactttatttggtcgttagtgaattgtaaaaaaggtg

SEQ ID NO: 53802 - DNA, 488 bp, Zea mays
  Clone ID: MRT4577_149069C.1
cacaaccgctctgctgccacctgccttggtttcggtggacagcctgtacaggtccagctacccgagtctgaggtgcacaccacacgtgtcggaaccacggcaccattggcgacgaccaccgccccgtgataacctctattaagttcgttacgaaccttgaccagacctactggcctttcggagcgtacggggacggtgacgacacctccttcaccgtcccagttcagccgttgagtggcgctatcgccggctcttctgaccgcattggagacgtcggggactacactgcacgcacttggtgtgtaacgttcgccccctctaaaaaagacttctcttatgatgttaatcaagaagctgaatgcatgcttgacctactccacacagagcctctaactcaatactacttgaaatgcgtgcttttcttgcgattgccagtatctttattttcgtagcatggtgactgcgttgctggtgtgtttagctctatg

SEQ ID NO: 53803 - DNA, 293 bp, Zea mays
  Clone ID: MRT4577_14906C.1
cccacgcgtccggttatgtgattgtgagttagatgtgctatgtgaaaaaaactaaaaaggggaccacacaaaaagagaagcgaaaaaaagaacatgactaactacgcataaacaaaagccaagcactacaacgccagacagccccctataatgaagtgagaaatgaaacgagcaatcactagatccttacgatcccaggaaccactctaaatgtaccagccgagacctacagaactaccagccaacaagccaaccacgccctcctactaggatattatctatccctactttcc

SEQ ID NO: 53804 - DNA, 674 bp, Zea mays
  unsure (1)..(674): unsure at all n locations
  Clone ID: MRT4577_149070C.1
atcacccgacatgccgcgtgagacccttgcctacatctactgcagacgcataataacccgctcgaggccatgagggtgttgcgtatgttgccctcggtctcctgtctctagctgctagcgccaccataacgacatgacagcgtgtgagtgccgctgccatccaccgccaccacgtcatctactcggccgcagtgcatgagcctnctccggttaaactgtcaggtgggtggcagtcttcaaacgggactccaactaacgtggcactctcacatgacatggtctttccatgggacgtacacagttcatgtggatccaacgcgatgctgctaccgtaatcaaacgaaagaaggtcactgtgatcattactatcaacaatacccgtgtgaacttgattattgaagtctacgacaagtcaatgactccagggcaatgcaacatgccggtggacaggctcagcgattaccatgatctagcagggtcttctaaaagcccacgatgatgtgctactgctattctgacaccaaagcttgcgcctaatttggttctgaaatccttaagctcgtgcatgcacttgacgtattgcatgcaatgaataatttagctcgccattgcatgctgcaggcagagtcggagacggacatggattgggggctgatggtgggcactgatagcgc

SEQ ID NO: 53805 - DNA, 217 bp, Zea mays
  unsure (1)..(217): unsure at all n locations
  Clone ID: MRT4577_149071C.1
tacctcgaagccggtcgggtcgggctttcaaacaatagatctgnaagtctcgctttttcccaatgcaataaaaaaagcagtcgcaatggtcgagcagtaccatgggtcctcttctccacggccttcgccggnaaggtcgtgaacgtgccgtcgtcgtccgccttcggtgaggacccttcgacaatgcgcaagacgccagtctcaaggccaacccacc

SEQ ID NO: 53806 - DNA, 414 bp, Zea mays
  Clone ID: MRT4577_149072C.1
agaccacaattttgaatgtcacatgttcacaattcacaacatcacaagttcacaatataataatggatcacacagatcacaagttcacaatataacaaattaatcccacagatcacaggttcacaatataacaagttgatcacaagtttacaatataacaagcgaatattgaaaatgaaaaacgagcgcccactccgaacagcaaaaaccctgtatataccacacatagaagacatcaaggtcttatcgagatgtaatcagattcgcattaatcaatattaggctgatatggattagaatagaactccaagtaaattttaatatacctaatacatgatttcactgagggattcgaacaatatccaaacaaaaccccaagtgaagtgtgtggccgtgtgggggtgggggagggag

SEQ ID NO: 53807 - DNA, 231 bp, Zea mays
  Clone ID: MRT4577_149073C.1
attgatttaaggacaaaagcacgtggggtgttgcaaagggaggacgatctaagtgagggcgtgcaacttgttggtaaagatgccctggcagaatctgacaagatcacattgtggacagcaaacctactgagagatgattattaggcacagaatgcatttactgcatatgataagtatctgaccgatctacatatacgttgggatgatgcgcaagattattcacttcatcac

SEQ ID NO: 53808 - DNA, 345 bp, Zea mays
  Clone ID: MRT4577_149074C.1
aatacccgagtacccaacgcgctagctagttctattgccgcaccccagatctccaggagggactcgttctttcagctaactacactgcacgcaatggccaccacgtcgcccacaagatcgacttccgcgagggccccgcgctccccgtcctcgacgacctcatcgcggaggagaagaaccacgggtcgttcgacttcgtcttcgtggacgccgacaaggacaactacctcaactaccacgagcggctgctgaagctggtgaagctgggcggcctcatcggctacgacaacacgctgtggaacggctccgtcgtgctccccgacgacgcgcccatgcgcaagtaca

SEQ ID NO: 53809 - DNA, 786 bp, Zea mays
  unsure (1)..(786): unsure at all n locations
  Clone ID: MRT4577_149076C.1
tgggtacccctcgggccggccgggaatccgcaatacccgacgcgcaagccagtgcctcacccagatctccgcgacagatcagtcgttcgtccagctaactgcactgcactgcacgcaatggccaccacggcgaccaagacgactgcaccggcgcaggagcagcaggccaacggcaacggcaacggcaacggcaacggcaacggcgagcagaagacgcgccactccgaggtcgggcacaagagcctgctcaagagcgacgacctctaccaggtaaacaagctgagcgcaatgagtggctgaatctgaccgggatcttagtctctgaccgcggggggagaatgatccgcagtacatcctggacacgagcgtgtacccgcgggagccggagagcatgaaggagctgcgcgagatcaccgccaagcacccatggaacctgatgaccacctccgccgacgagggccagttcctcaacatgctcatcaagctcatcggcgccaagaagaccatggagantcggcgtctacaccggctactcgctcctcgccaccgcgctcgcactcccggaggacggcacgatcttggccatggacatcaaccgcgagaactacgagctaggccttccctgcatcaacaagcncggcgtgggccacaagatcgacttccgcgagggccccgcgctccccgtcctggacgacctcgtggcggacaggagcacacggggtcgttcgacttcgncttcgtggacgccgacagggacaactacctcaactaccacgagcgggctct

SEQ ID NO: 53810 - DNA, 584 bp, Zea mays
  Clone ID: MRT4577_149077C.1
cccgagtcccacgcgctactgttctttgccgcccccagactccaggaggactcgttctttcagctaactacactgcacgcaatggccaccacggcgaccgaggcggcgccggcgcaggagcagcaggccaacggcaacggcgagcagaagacgcggcactccgaggtcggccacaagagcctgctcaagagcgacgacctctaccagtacatcctggacacgagcgtgtacccgcgggagccggagagcatgaaggagctccgcgaggtcaccgccaagcacccatggaacctgatgacgacctccgccgacgaggggcagttcctgaacatgctcatcaagctcatcggcgccaagaagaccatggagatcggcgtgtacaccggctactccctcctcgccacggcgctcgccctcccggacgacggcacggtccgtcgttgttccctcccttttcccagatctgccacccacctccctgaaggcgaagcagctagcggtcctcccactgataaaccaaggattcctctctccctctctttgttgttcgtcccgccccgcagatcttggccatggacatcaac

SEQ ID NO: 53811 - DNA, 255 bp, Zea mays
  Clone ID: MRT4577_149078C.1
cccaagcgtgcgaaaactcgtactagaccttaactctgatatcttcagataaaacttatggggccttataaatctaaaggtagatccattatatgatctaaactgattatctgataattttagttgagatgatagtatagtaaatgtaccatactctggttttactataaatatacttcaatacttacatacatttaaattttcaaaacgactataacgaactacaccatccatagtgacaactcatactactac

SEQ ID NO: 53812 - DNA, 420 bp, Zea mays
  Clone ID: MRT4577_149079C.1
cggacgcgtgggcggacgcgtgggtgcgagtgaagccttccctggttaacatttgggtacgcttgcagggttgtgcagttgtattggtgcattcaacttgcaggagctacaagtccataccagaagctgaaagaagggggcaggatcaggtccctcacagccacacaggagaagacgaggatcggccatgcctcttgctgctccaggtgggcgatctcgagaagttcaagagcgtgtcactggctatggaaaagggccactctgcctccagagtcctggggactggggagggacgccgtccgtggagagagttgtgggtgatgagggaaaccgatggagaatgtgcttgtcttatgtgtgctggaagttgaaagtgtttttgaaaaaaaaaaaataaaaattaaaaaaaaaaatatataa

SEQ ID NO: 53813 - DNA, 465 bp, Zea mays
  Clone ID: MRT4577_14907C.1
ctcccacgctgacacctacctaggtgccgcgccgccaggaccccagcctcgcgtctccggcggcgtactcccagatctcgactccccagtctgtctctgctccgcgcggaatcgtctgacggaggcgggtggccagcgtcgtccgcagctgattcgggatggccggcagcagcaccagcaccttcgtcatcaggtggatcaacttcctcaccatgatactggcgatacttgtggtgggttttgggttttggatgagcacccacaatgacgagtgccggcggtcactcacaatccctgtcatgggtcttggaggagtcatttttctcatgtcgctggcgggatttgtgggtgcttggaagaacatttcttgcttgctttggacatatctaataatgctgttcgtggtcctggtggcaatcatggtcttcacagtgcttgcgtttatcattacaaatactggaactg

SEQ ID NO: 53814 - DNA, 781 bp, Zea mays
  Clone ID: MRT4577_149080C.1
aaaaaaaaaaaaaaaaaaaaaaaaaaaaaaaaaaaaaaaaaaaagcaatacccgacgcgcaagccagtgccgcgcccagatctccgcgacagatcagtcgttcgtccagctaactgcactgcacgcaatggccaccacggcgaccgaggcgaccaagacgactgcaccggcgcaggagcagcaggccaacggcaacggcaacggcaacggcgagcagaagacgcgccactccgaggtcggccacaagagcctgctcaagagcgacgacctctaccaggtaaacaagctgggcgcaatgaatggctgaatctgaccgggatccgagtctctgaccgcggggggagaatgatccgcagtacatcctggacacgagcgtgtacccgcgggagccggagagcatgaaggagctgcgcgagatcaccgccaagcacccatggaacctgatgaccacctccgccgacgagggccagttcctcaacatgctcatcaagctcatcggcgccaagaagaccatggagatcggcgtctacaccggctactcgctcctcgccaccgcgctcgcactcccggaggacggcacgatcttggccatggacatcaaccgcgagaactacgagctaggccttccctgcatcaacaaggccggcgtgggccacaaaatcgacttccgcgagggccccgcgctccccgtcctggacgacctcgtggcggacaaggagcagcacgggtcgttcgacttcgccttcgtggacgccgacagggacaactacctcaactacca

SEQ ID NO: 53815 - DNA, 1082 bp, Zea mays
  Clone ID: MRT4577_149081C.1
gccggattcctgcgcagcacgcacggacgccatcgaggaaccctaaccagagcacagcacacggagcgacggcggcacgccaccggcgactggcggctggtgccccctctcggtccccactccccagcacggcgacggcctgctgcatcagatggtaaattatttctcagactcagagtgcaaagaagttggttcgtccagggaagcggaatagaggttatgcttttgtgtgagcgtgttgctcttcagcggcggcggcggtgctggcattcttgctacctcagctctgccaggaaataaatcgcagcagcgcggaatttgtgtggagattcatgtttacgaatgcgcagcgccaggtcgagcgcaccggccgttctggcactccgcgagaccagtaccttcaggatctcgtgacccagttccagaacgccacggatgaagctgaatgttctggagttattcttggactgcattacagagcctaatgaaaggcttatcgagttcggcattggtggaatatgtaactcctgtgttgatcctgcaaatgctttaatcattactcagtgtggtggaatcccattggttatacaatgcttatcgagcccagtgcggaatactgtgacttatgcgcttggggctttgtattacctttgtaacccttcgacaaagaaggagatcctgaaaccagatgtagttagtactataagagagtatgcttcagctggaactgtgaataacaactttagcaatctggctaatgctttcttggagaaacatgttgatccatgatatgacaattttacagggtagactaaagcttacacatttcgtgtacctgtggtgttttcatattctggatatgaactaaagaaactagagcttagatctcatgctttcattgttttgggcacgatgctttgcctggaattgagcaagggctcctttttagatgagagttatgcccagtttttccgttgggaagctaatttgtcatagttcagttttttcccagttatctgttggacgatttgaacattgtaaggccctgtttggaaacaaagtttttgaaaaccacagttttt

SEQ ID NO: 53816 - DNA, 198 bp, Zea mays
  Clone ID: MRT4577_149082C.1
ttttcttcttgtcaaaccctaagcagggagttgagggagccgtttcagccatgagtcagctgcactctcagtctgtcaaggctgccatcttccatattgttggggatgccaaggtgaacaataggatgtttactgagactgtggaactttatattggcctgaagaattattatccacacaatgacaagcgtttcattt

SEQ ID NO: 53817 - DNA, 1014 bp, Zea mays
  Clone ID: MRT4577_149083C.1
cctggccgggacgcagggcccatgcacggttttgagacgagagcagctcccggccggggcgccagccgccggattcctgcgcagcacgcacggacgccatcgaggaaccctaaccagagcacagcacacggagcgacggcggcgcgccaccggcgactggcggctggtgccccctctcggtccccactccccagcacggcgacggcctgctgcatcagatggtaaattatttttcagactcagagtgcaaaaaagttggttcgtccagggaagaggaatagaggttatgcttttgtgtgagcggcggcggcggtgctggcattcttgctacctcagctctgccaggaaataaatcgcagcagcgcggaatttgtgtggagattcatgtttacgaatgcgcagcgccaggtcgagcgcaccggccgttctggcactccgcgagaccagtaccttcaggatctcgtgacccagttccagaacgccacggatgaagaatctaaggagaagatagttgctaacctggcaaattttgcttatgacccttttaattatgccttcatgcgccagctgaatgttctggagttattcttggactgcattacagagcctaatgaaaggcttatcgagttcggcattggtggaatatgtaactcctgtgttgatcctgcaaatgctttaatcattactcagtgtggtggaatcccattggttatacaatgcttatcgagcccagtgcggaatactgtgacttatgcgcttggggctttgtattacctttgtaacccttcgacaaagaaggagatcctgaaaccagatgtagttagtactataagagagtatgcttcagctggaactgtgaataacaactttagcaatctggctaatgctttcttggagaaacatgttgatccatgatatgacaattttacagggtagactaaagcttacacatttcgtgtacctgtggtgttttcatattctggatatgaactaaagaaactagagcttagatct

SEQ ID NO: 53818 - DNA, 489 bp, Zea mays
  Clone ID: MRT4577_149084C.1
cttaagccccagaaaaccccccccaaaaagtcctcgaagaaaaaggcttcggtccacatctttcaggtgaccacagtttttaaagctcaagcaaggaggcctgtcagcaaattcaattgtatttttctgctttgaatctatgagagaaatattgttattccgtttactggctatgacacaaaaacctgaatgctgttataatatatgcccatcttgtaccttttcaaaaaaaaaaaaaaaaaaaaaaaaaaaaaaaaaaaaaaaaaaaaaaaaaaaaaaaaaaaaaaaaaaaaaaaaaaaaaaagggggaaaaaaaaaaaaaaaaaaaaaaaaaaaaaaaaaaaaaaaaaaaaaaaaaaaaaggggggggcgtttttaaaaaaaaaataattaaaccccctttaaacaaaataaaaaatttttaaaaacgggcccaaaaaaaaaaaaatcggcccggttaataaaacctttggacagggaaaaaccctg

SEQ ID NO: 53819 - DNA, 272 bp, Zea mays
  Clone ID: MRT4577_149085C.1
aacaacctaacttcaatggctacaactctgcatcgggtatgatacgcatgtggtgcgggactaccaatggcttccaggaacatcttcgcgggtggcaactggaaatgcaacggtactggcgaggacgtgaagaagatcgtcaccgtgctcaaccaagccgaggtgccctctgaagacgtcgtcgaggtggtctagagtactccttaagattatctgatctaattaagaagatgttgatctttaactttgacgtctcacatcaaaactgatgg

SEQ ID NO: 53820 - DNA, 888 bp, Zea mays
  Clone ID: MRT4577_149086C.1
ttgggaccctcgaggccggccgggaaaaaaaaaaaagaatacccgacgcgcaagccagtgccgcgcccagatctccgcgacagatcagtcgttcgtccagctaactgcactgcacgcaatggccaccacggcgaccaagacgactgcaccggcgcaggagcagcaggccaacggcaacggcaacggcgagcagaagacgcgccactccgaggtcggccacaagagcctgctcaagagcgacgacctctaccagtacatcctggacacgagcgtgtacccgcgggagccggagagcatgaaggagctgcgcgagatcaccgccaagcacccatggaacctgatgaccacctccgccgacgagggccagttcctcaacatgctcatcaagctcatcggcgccaagaagaccatggagatcggcgtctacaccggctactcgctcctcgccaccgcgctcgcactcccggaggacggcacgatcttggccatggacatcaaccgcgagaactacgagctaggcctgccctgcatcaacaaggccggcgtgggccacaagatcgacttccgcgagggccccgcgctccccgtcctggacgacctcgtggcggacaaggagcagcacgggtcgttcgacttcgccttcgtggacgccgacaaggacaactacctcagctaccacgagcggctcctgaagctggtgaggcccggcggcctcatcggctacgacaacacgctgtgggaacggctccgtcgtgctccccgacgacgcgcccatgcgcaagtacatccgcttctaccgcgacttcgtgctcgccctcaacagcgcgctcgccgccgacgaccgcgtcgagatctgccagctccccgtcggcgacggcgtcacgctct

SEQ ID NO: 53821 - DNA, 1152 bp, Zea mays
  Clone ID: MRT4577_149087C.1
tctagcaacacccaaggacaaggagtagccgacgcgccagctagtgcccagtgccgcacccagatctccgggagggacttgttcagctactgcagcactgcccgcaatggccaccacggcgaccgaggcggccaaggccgcgccggcggagcaggccaacggcaacgccaacggcgagcagaagacgcgccactccgaggtcggacacaagagcctgctcaagagcgacgacctctaccagtacatcctggacacgagcgtgtacccgcgggagccggagagcatgaaggagctccgcgagatcaccgccaagcacccatggaacctgatgacgacctccgccgacgaggggcagttcctcaacatgctcatcaagctcatcggcgccaagaagaccatggagatcggcgtctacaccggctactccctcctcgccaccgcgctcgctctcccggaggacggcacgatcttggccatggacatcaaccgcgagaactacgagctgggcctgccctgcatcgagaaggccggcgtcgcccacaagatcgacttccgcgagggccccgcgctccccgtcctcgacgacctcatcgccgacgagaagaaccacgggtcgttcgacttcgtcttcgtggacgccgacaaggacaactacctcaactaccacgaccggctgctcaagctggtgaagctggggggcctcatcggctacgacaacacgctgtggaacggctctgtcgtgctccccgacgacgcccccatgcgcaagtacatccgcttctaccgcgacttcgtgctcgtcctcaacaaggcgctcgccgccgacgagcgcgtcgagatctgccagctccccgtcggcgacggcgtcaccctctgccgccgcgtcaagtgaaaaaaaacatgcctggccaccgacggcgccgccgccgccgcatcccccatcccaatcatatcgtagacgacgcgcagcattaattattcaccggcttttttttttggctctttcttggccctgtaatcttttcttgtccttctgcttcttcttgggaattgtcgccatctccatacgtaaatctaaatctcgagatggataatactagtatcaatcaattttactactatatactgctcctaccgtggatgatttcgtcc

SEQ ID NO: 53822 - DNA, 291 bp, Zea mays
  Clone ID: MRT4577_149088C.1
attcggctcgagatggttaaagcatcttacttgatggccgacgcattatatttgaagaaatgggatatgtcttacaattaaccagatcgtcttctctcgcacattcactcgaggggtcatcagaccacacaactaacctttgaatgtagctcacctcctatatactcctactgcacagatattaattatctataacagggataaagactgtcaacgctggtttggttaggatggaacttctatggggcataacgatgaacacgagcgaatcgagcctcaccctgttgcgac

SEQ ID NO: 53823 - DNA, 414 bp, Zea mays
  Clone ID: MRT4577_149089C.1
cccacgcgtgcgcccacgcgttcagccacgcgtacgatgttttgtgttcgttccacgtgtttgtgtacaggacgagctctggaaccactttcggtagccctggctgacggaaacaccgtggaggtgatgccgtcggagctcgcgccagccacttgcgcggttcttgggtacaacatacccaaggacctgtactccatggccgcgaaggtaggtgagggcggtccggaggttttggagaagcttatggaccaccgatgggacagggttctctctcctgggaatgagctatgttcgtaatgcatgagcgactttctagcggaccacgtgacgtcttgtcactctcatgctgcagcagtttgggcgccttataatggtcaagaccgacttgagccttatcccgggggcgcgtggagc

SEQ ID NO: 53824 - DNA, 694 bp, Zea mays
  unsure (1)..(694): unsure at all n locations
  Clone ID: MRT4577_14908C.1
gaggaagatcaggcaggnagctctcccattcgcatcccaggccaacctcaaccccaatccaatccgttgcaggtcgcaggatggctccgcgtgagcaccaccagccccaggaggaggaggaggaggacaccgcaggcgtcgtcaagctcatcagcgccgagggcttcgaattcgtcgtcgacaagaaggccgccatggtctccaacaccctacgcaacatgctcacatcgccaggcggtttctccgagacgcgccagggcgaggttcgcttcccggagatccccaccaatatcctcgagaagatctgccagtacttctattggtcgctccattattccagcccttggttcaacactttggatggcctattgaagagttatctggtccagaattttgatgtgatggagtctgacaaggccaataagactgtcacatgtaatgttatttgattaccaaaacatgaagagcagtcaagataggttgagatcgatcgctatatttgttggttcctaggactcttggtggaagatatgaggttgctcccaacactgaatttatgtatggctgaagtaaattcactgttctgattttggtgtccacattcttatttgtttcccagtcagcaaactgaagttcagtttgtgttccattgtatactgtgcattgctttctacaacaaaatttctatgggact

SEQ ID NO: 53825 - DNA, 1146 bp, Zea mays
  Clone ID: MRT4577_149090C.1
cctcgaggccggccgggaaccagcaatacccgacgcgcaagccagtgccgcacccagatcatatctccgcgacagatcagtcgttcgtccagctaactgcactgcacgcaatggccaccacggcgaccgaggcgaccaagacggctgcaccggcgcaggagcagcaggccaacagcaacggcaacggcaacggcgagcagaagacgcgccactccgaggtcggccacaagagcctgctcaagagcgacgacctctaccagtacatcctggacacgagcgtgtacccgcgggagccggagagcatgaaggagctgcgcgagatcaccgccaagcacccatggaacctgatgaccacctccgccgacgagggccagttcctcaacatgctcatcaagctcatcggcgccaagaagaccatggagatcggcgtctacaccggctactcgctcctcgccaccgcgctcgcactcccggaggacggcacgatcttggccatggacatcaaccgcgagaactacgagctaggccttccctgcatcaacaaggccggcgtgggccacaagatcgacttccgcgagggccccgcgctccccgtcctggacgacctcgtggcggacaaggagcagcacgggtcgttcgacttcgccttcgtggacgccgacaaggacaactacctcagctaccacgagcggctgctgaaagctggtgagggcccggcggcctcatcggctacgacaacacgctgtggaaccggctccgtcgtgctccccgacgacgcgcccatgcgcaagtacatccgcttctaccgcgacttcgtgctcgtcctcaacaaggcgctcgccgccgacgaccgcgtcgagatctgccagctccccgtcggcgacggcgtcaccctctgccgccgcgtcaagtgaaaacatgccctggcctggcctgccccagcaccgccaccgacggcgccgccggccgcatccttattccaatcataatagacgacgcgcagcattaattatccaccggcttttttttggctctttcttgcccctgtaatctttctcctcctcttccttcttgggaattgtcgccgccgtttcgatacgtaaatcacgagatcggtaatacagtaatgctcctcaattttacaat

SEQ ID NO: 53826 - DNA, 489 bp, Zea mays
  Clone ID: MRT4577_149091C.1
ttttcctggtagtccccgacgaccaggctcccgacaggcgttcgttccgcgtgggctcctcctgccacgacaggtaccgggtgcgcgtcgccgacttctcgtctgccaccaggaagtggcagattctcccctggtcggagcctgtgccgacacagccggcgagcggtaagtactggcttctctcggggaggcaggtgagtgggttcctgtgctggtcacaccataagaatgcctacaaggtgttgctggacactgcgaccctgcaattctccgtcatcgatctgccgtatggcttgagtgggcaaggtcacctctacaggactggggataccaaggatgggaagctctgcatcgttgccgcaatcgatttctcgctgttcgtttggttccggacaccagacgccggtggcattgacaggtgggtgctccgacatgtattgcagctggaggatgaggttcttgaggccaccgagggctcacggaatgaac

SEQ ID NO: 53827 - DNA, 991 bp, Zea mays
  Clone ID: MRT4577_149092C.1
ttgggtacctcgaggccggccgggctggcccggcagtggcagccaagctgtcacacgcctcgcctagtcgccttgccgccgcgcgttatataagccgccccggcaggcacggtcggtcaatccagcaatacccgacgcgaaagccagtgccgcgcccaggtctcagcgacaagtcgttcgtccagctaactgcactgcactgcacgcaatggccaccacggcgaccgaggctgcaccggcgcaggagcagcaggccaacggcaacggcaacggcgagcagaagacgcgccactccgaggtcggccacaagagcctgctcaagagcgacgacctctaccagtacatcctggacacgagcgtgtacccgcgggagccggagagcatgaaggagctgcgcgagatcaccgccaagcacccatggaacctgatgaccacctccgccgacgagggccagttcctcaacatgctcatcaagctcatcggcgccaagaagaccatggagatcggcgtctacaccggctactcgctcctcgccaccgcgctcgcactcccggaggacggcacgatcttggccatggacatcaaccgcgagaactacgagctaggccttccctgcatcgacaaggccggcgtggcccacaagatcgacttccgcgagggccccgcgctccccgtcctggacgacctcgtggcggacaaggagcagcacgggtcgttcgacttcgccttcgtggacgccgacaaggacaactacctcagctaccacgagcggctcctgaagctggtgaggcccggcggcctcatcggctacgacaacacgctgtggaacggctccgtcgtgctccccgacgacgcgcccatgcgcaagtacatccgcttctaccgcgacttcgtcctcgccctcacagcgcgctcgccgccgacgaccgcgtcgagatctgcagctccccgtcggcgacggcgtcacgctctgcccgcgcgtcagtgaaaa

SEQ ID NO: 53828 - DNA, 1159 bp, Zea mays
  unsure (1)..(1159): unsure at all n locations
  Clone ID: MRT4577_149093C.1
aatccagcaatacccgacgcgcaagccagtgccgcacccagaccagatctccgcgacatatcagtcgttcgtccagctaactgcactgcactgcactgcacgcaatggccaccacggcgaccgaggcggccaaggctgcaccggcgcaggagcagcaggccaacggcaacggcaacggcgagcagaagacgcgccactccgaggtcggccacaagagcctgctcaagagcgacgacctgtaccaggtaaacaagctgagcgcaatgagtggctgaatctgaccgggatctgagtctctgaccgcgggggaagaatgatccgcagtacatcctggacacgagcgtgtacccgcgggagccggagagcatgaaggagctgcgcgagatcaccgccaagcacccatgatcttggccatggacatcaaccgcgagaactacgagctaggccttccctgcnatcaacaaggccggcgtgggccacaagatcgaccttccgcgagggccccgcgctccccgtcctggacgacctcgtggcggacaaggagcagcacgggtcgttcgacttcgccttcgtggacgccgacaaggacaactacctcagctatcacgagcggctcctgaagctggtgaggcccggcggcctcatcggctacgacaacacgctgtggaacggctccgtcgtgctccccgacgacgcgcccatgcgcaagtacatccgcttctaccgcgacttcgtcctcgccctcaacagcgcgctcgccgccgacgaccgcgtcgagatctgccagctccccgtcggcgacggcgtcacgctctgccgccgcgtcaagtgaaaaaaagaagaagaagaaaaaaaacataataccctgcgttcctgctgccccggctgtctggcccccactactgccaccgacggcggcgccgaacccccgttccaatcatcatatcgtagacgacgcgcagcattaaactatcaatcaccggatctggctctttcttggccctgtactgtactattaatgttccgttcttgtttttttattcggaattgtcgccgtttcagtatacgtaaatctcgaggtcgataatacagtaatactaccaatttaactaaaaaaaaaaaaaaaaaaaaaaagtcgacgcggccgcgaattcggatc

SEQ ID NO: 53829 - DNA, 249 bp, Zea mays
  Clone ID: MRT4577_149094C.1
gcaaggatggcatctcttctgttagataatcaggagtatactgaagcccttaccctgggtacttgtcttatcaaggaagtccggatactagatgacttgctacttcttgtggacattgaccttatggaaagcaaacttcactccttccttaaaaatctgtcaaaggccaaagcctcttttaacactgctagaactgcagcaaatgccattaatgattccatctgctcaactaggcactattgacctcca

SEQ ID NO: 53830 - DNA, 856 bp, Zea mays
  unsure (1)..(856): unsure at all n locations
  Clone ID: MRT4577_149095C.1
ccnggccggggcccgggtctccatccaccgctcgcctccccttgcccctcctctcgtctactcgtcaccctacgctcggctccatcctccccgcctccccacgtgtcctcccgctacatgggagcgcgggctccctagggtgcctcgaccaccgccgccgccatgttcgagggggtggtgagccaggtgctctatggcctcctccgccgctacgtcaagggcatccagaaggagcagcttaagatcggcatctggaaggaagaaatactgcttgaaaatgtagagctgattctggaagcctttgactacctgcagctgccattcgcgctgaaaaatggacgaattgggaagctaagcatccggattccttggaaaaagctaggatgggaccctatcattattgtcatagaagatgtctatgtttgcgcatgcccaagggaggactctgagtggagctcagattctctggacaagagggaaatagctggaaagttggctaaacttaatgccattgagcttgctaaattttctagaagagttacagataatcaaacgggacaatcgtttttgtcctacatatcagcaaagatactggatagtatccaagtttctatgcgaaatgttcatattgtatacatggatacccacaacggtcaagggaactttgtatttggtttggaattcacaagtctctcaatacaaacagatacccagaagcaaagttttacaatttcattgatgactaggtncagacnagatgaagtanataagataattgagatatcanatgttggaatttactgtcatcagctggaagaagagcangatctatgccatggtggtgctcttgaaatga

SEQ ID NO: 53831 - DNA, 473 bp, Zea mays
  Clone ID: MRT4577_149096C.1
attgagaccaacaagcaacatagaaagtggaatccagtagcaacaacagagcaacaatggcgaccaagatattttccctccttatgctccttgctctttctgcatgtgttgctaacgcgacaattttccctcaatgctcacaagctcctatagctttccttctttccccatacctttcatcaatgatagctttagtatgtgaaaacccagctttttagcccttttgggttcaacaaggaattgcaggaaggaacatacctttattacccttgttggtttaacaattgccagccctatttttgggggagtcattggttcaaaccattaagggacaacagctggaggaactcgtgcttcctgtgatcaaacaaatagctcttggaaaactttcttccttcttttaagaacaacaatttctttcatttaaacaactgtctatactgaaccctgctgcttatttgcagcaacaacta

SEQ ID NO: 53832 - DNA, 449 bp, Zea mays
  Clone ID: MRT4577_149097C.1
aacgagtacaagcctgctgggtttgtcaaagcaagttggacaaagggcagcaacagttgcagttgtaagagggttgcggggttagccacaaactgctggtagaacggaagcacttgttgttgtgtcaagaaggaagcggggcttgttgtagctagctggccaaatggtagtagtatttgctgctgcaaataagcagcggggttcagtgcggtcaattggttaaatggaagaaattgttgctgctgatagttggtagtagctagctggctgaatggtagtagttgttgttgctgcaaataatcagcaagggtcaaggtagacagatgggtgaatggaagaaatttgtgatagctgagagtagggagaaaggtttgacaaagctacttgtatgatcactggtatcataagatggtgaatgtggtttgcctttatggattgtaccttggccg

SEQ ID NO: 53833 - DNA, 551 bp, Zea mays
  Clone ID: MRT4577_149098C.1
aaaccagtcagggcacaacagctgcagcaactcgagctacctctgataaccaagagctctggacaaacctttctccctactctacagcaacaacaaaccacttccattcaaccagctggctacactgaaccctgccgcttattggcagcaacgactatcaccatttatccacctagctactgcctactctcaacaacaacaacttgttacattgaaacaagtggccgcactgaaccccgctgcttatttgcagcaacaaatactactaccatttagccagctagctgcagcaaaccgggctcccttcttgacacagcaacaggtgctgcctttctaccagcaggttgcggctaaccgccgcaacgcctcttacaactacaacaattgtggccctttgcccaacttgctttgacagacccagcggactgctaccaacaacacatcattggcggtgccctctgttagatagcttattagttggaattcaataataaagttttttggatgatgtatgtggccaaccagaaataagacgttacatttccagattc

SEQ ID NO: 53834 - DNA, 602 bp, Zea mays
  Clone ID: MRT4577_149099C.1
gactgggaatagttgattgattaattggaggagcccaaggctcatacatataggcaaggatatccctaataaaggaaagatctaatctatcaataggaaaggtctaatctaggggatccttgccaaacatagccaactaaccaaaatacagagggggaggcagccgctgcaccctgttagggcagctgagccacctgggccctatttccctatacatcacgctaacactgatgggaacctccgactctacagcttgaatggttcagatggcaggtggtcggtttcctggatcgcactgtctcagccttgcaacattcatggcctgtgtggtccaaatggaatctgccactacttccctacgcctacatgctcttgcccgccaggttacgtgatgagccacccgggtaactggagccaaggctgtagacctgtagtcgacattgtctgtactgctgggcaggcgcaacctgtcaagttcttgcggcttccaggcacagacttctggggatccgaccagcagcatgctgatcaggtatccttgcaggcctgcaagaacatgtgtaggagggactgcacctgtaaaggcttttcggacgcgtggg

SEQ ID NO: 53835 - DNA, 786 bp, Zea mays
  Clone ID: MRT4577_14909C.1
gaaatcaacaacacacactcccactcccacgctgacacctacctaggtgccgcgccgccgggaccccagcctcgccgtctccggcggcgtgctcccagatctcgactcgacggtccgtctctgctccgcgcggaatcgactgacgggggcgggaggccagcgtcgtccgtagctgattcgtgatgggcggcagcagcaccagcaccttcgtcatcaggtggatcaacttcctcaccatggtgtggtgggaagtttagtcccaccccggaagtggaaggagagttggagtggtttataagggtttctcttctacatgctattggagcttgagaagagaagaggccctcgcgcactcctcctccgccgcccgccacgacgcggcgcgggttgcgggattggagagcaggtctccgaaaccacgcccttctggtttctgtacggggtgaggggcgaataggtttttgggcagcgattacgcgactgctcgcttccgatcgtctacttcctctacgtccgcgtctccaccgccgccgagaaagctgaagccgacaagaaggtcgccgaggacgccgctgctgccaccaaagccgcggcctctgcgtggcctactggaggatactggcgatacttgtggtggggttttgggttctggatgagcacccacaatgacgagtgccgacggtcactgacgatccctgtcatgggtcttggaggagtcatttttctcatgtcgctggcgggaatcgtgggggcttggaagaacatttcctgcttgctttggacata

SEQ ID NO: 53836 - DNA, 424 bp, Zea mays
  Clone ID: MRT4577_1490C.1
cctcgaagccgggcgggctcctttccttacctccccccgcctcctctgctggactactccaggtcattagcggattcgtaattttggatcgcctcggccgccgaccagaaagatggcgacccgtggcaaagagaatgaacgccagtagagctctcggtacacgtcacactggccaagacctcgacccgccgtgctgccgcctgcaaggcaatgacttcttccacgagcacattcacacggcatccccccatgatgaatatcttgtgcggaccccctcatgtgcataaagacgcattagctgatcctatggcatcccttattgtgaatagatcaatgcagctcatgaacttccatttggtatgggagcagcactaagatgctgtgcagacatcctactgacagtgtctgctaccaatataccata

SEQ ID NO: 53837 - DNA, 549 bp, Zea mays
  Clone ID: MRT4577_149100C.1
aagacatcactgcatcacaaagtgcaagaacttgcggtaactgcaaggaatcaaccccatgggcatgaccatggtgcctacatatgacggacatcgggtggatctcttccagacacacacgtgcctacatggccaccctgctgaccatccgcgggggcgactatcactcatcatagccagctagttccggtctacgataagcggcaacaacttctttatatcataaccaattgtccgtactggacttcgtggattatgagcacacacattatctagtgccgtttgaccagttagctgtgccaaaccgtgcagccttggttgcacagcaacagttgctgcctttctaccagcagtttgcggctaaccccgcaaccctcttacaactacaacaattgttgccctttgtccaacttgctttgacagacccagcggcctcctaccaacaacacataattggtggtgccctcttttagattgcttattagttgtaattcaataataaagttttttggatgatgtatgtggccaaccagaaataagaagttacgt

SEQ ID NO: 53838 - DNA, 328 bp, Zea mays
  Clone ID: MRT4577_149101C.1
acggagaaccatattatggggaccaacaagcaacgtataaagtggactccagtaacaacaatggagcaacagtggagaccaagatattttaccttcttatgctccttgctctttctacatgtgttgctaacgcgacaattttccctcaatgctaacaagctcctatttttctttttttcctacataccttccatgacttatagcttcagcttgtgaaaacccagctcttgaaccatgtaggcttcaacaagcaatcgcagcaagcaacatacctttatcgcccttgttgtgtcaacaatcgccagccccatctttggtgcagtcattg

SEQ ID NO: 53839 - DNA, 164 bp, Zea mays
  Clone ID: MRT4577_149102C.1
gggattaaatcttttttggaaactggccaccggatccaaaacgtgccccgggccacaagcaacacacatccttttttatttatgaacaagaggccccggcgggttaagttttacaactggcgccaataaatggtgctcaagtctgctgagttctcaaatgcggg

SEQ ID NO: 53840 - DNA, 559 bp, Zea mays
  Clone ID: MRT4577_149103C.1
tcgagcggccgcccgggcaggtgctttttttttttttttttttttttttttttttttttttttttttttttttttttttttttttttttttttttttttttggattaaaagctgggtccccccaaccttaggaaaaggaattatcgaacaccctgggggaccaatatcacattaaaatcgggaaagggaactttttattttgggggggccccatacatcatccaaaaaactttattattgaattacaactaaaaatcaatctaaaaaagggcccccccaatgatgtgttgttggtaggaggctgctgggtttgtcaaagcaagttggacaaagggcaacaattgttgtatttgaaaaagggggggggggttagccccaaactgcttgtaaaaaggcagcaactgttgctgggtcaaaaaggaagcacgacttgctgcagctagctcgctaaagggcaggagtatttgctggtgcaaataagcaggggggttcagggcggccaattggttaaatggaaaaaattgttgttgctgaaagtaggcaaaacctagctggctaa

SEQ ID NO: 53841 - DNA, 320 bp, Zea mays
  Clone ID: MRT4577_149104C.1
agaaagtggtatacagctgcaacattatatcatcaatggcggccaagatatgttccatgcttatgctccttgctctttctgcatgtagcgctaacgcgaccatttttcctcaatactcacaagctcctatagctgcccttcttcccccatacctttcatcaatgaccgcttcagtatgtgaaaacccagcccttcaaccctacaggctccaacaagcaattcgcacaagcaacttacctttattacccctgttttttcaaccaatggcagccctatctttggtgcattcattggtaccaaccattagggcacaacaggtg

SEQ ID NO: 53842 - DNA, 485 bp, Zea mays
  Clone ID: MRT4577_149105C.1
gccggccgggccggggtgtgaataggaattcgtacttgcatatctcgctatccactggaacactagctgactgcaaagctgattacgaggacgccgctatatatggcttcaaaacaggaaaatcgaattcatctccaattgacaggcttatttgcttcacgactgactgcccgctgctgtagaggacgatatgatgtccttcacctctatcactgaatctccgcataagcttattaagtgtccggagtaaggttggaaacctacgcccctctttgcaactgctccatacagatctaggtcctctttgactatgaggggaccttcaccggatgtacgcttcgctgtcttcctagagtgacttatgaatatactgctggcattacagcttacaacaagaatgatgacagccccgaccgacacggccattctataactaacgtcaacctcgctgtgaacgaattcgatatcaaacttatcaatgccct

SEQ ID NO: 53843 - DNA, 999 bp, Zea mays
  Clone ID: MRT4577_149106C.1
ggagactataccatcctcatcatgaatcggttatcacactgtaaggatgatttaaagcttgttactcccaatcttagcaaaagtaattatcgaacacccttggagaccaatatcacattagaatctggaaatgtaacttcttatttctggttggccacatacatcatccaaaaaactttattattgaattacaactaataagcaatctaaaagagggcaccaccaatgatgtgttgttggtaggaggctgctgggtttgtcaaagcaagttggacaaagggcaacaattgttgtagttgtaagagggttgcggggttagccgcaaactgctggtagaaaggcagcaactgttgctgtgtcaagaaggaagcacggcttgctgcagctagctggctaaatggtagtaatatttgctgctgcaaataagcagcgaggttcagtgcggccaattggttaaatggaagaagttgttgttgatgagagtaggcagtagctagctggctgaatggtaatagttgttgctgcaaataagcagcagggttcagtgtagatagttggttgaatggaagaaattgttgttgctgatagtagggagaaaggtttgccagagctacttggttgatcacaggtagcacgagttgctgcagctgctgtgccttgatggtttgtaccaatgactgcaccaaagatagggctggcgattgttgaaacaagggtgataaaggtatgttgcttgctgcgattgcttgttggagcctatagggttgaagagctgggttttcacatactgaagctatcattgatggaaggtatgggggaaggagggaagctataggagcttgtgagcattgagggaaaattgtcgcgttagcaacacatgcagaaagagcaaggagcataaggagggaaaatatcttggtcgccattgttgctctattgttgctactggattccactttctatgttgcttgttggtctcaataatatggttccccgcgt

SEQ ID NO: 53844 - DNA, 546 bp, Zea mays
  Clone ID: MRT4577_149107C.1
tcgagcggccgcccgggcaggtacaagcttttttttttttttttttttttttttttttttttcttttaaaatctggaaaggtaactgtttatttctggttggccacatacatcatccaaaaaacttttttattgaatcacaactaataagcaatctaaaagagggcaccaccaatgatgtgttgttggtaggaggctgttgggtttgtcaaagcaagttggacaaagggcaacaattgttcgtacttgtaagtagggttgcggggttagccgcaaactgctggcagaaaggcatcaactgttgctgtgtcaataaggaagcacgggttgctgcgaatagctggctaaatggttgtaatatctgctgctgcaaataaccagcggggttcagtgcggccaattggttaaatggaagaaactgctgctgctgagagtaggctttagctaactgactgaatggaaatagagcgttgctgcaaataaacacacaggttcagtggtgatagctggtagaatggaaaatattggtgatgctgtaataaaggag

SEQ ID NO: 53845 - DNA, 839 bp, Zea mays
  Clone ID: MRT4577_149108C.1
tacctcgaggccggccgggacaacacgcaggacaagccatcgccccgatggacaccgccgcctcatgccgcctcctctcgccggcctcgtcctctccgcccccctgtccgaagcagctacccaagcggcgaccgaccttcgcggcctcgccgcagcagtcgtcgcccagctccagcgctaagtccgcggcgccaacgtcgtcggtgcagatgcagagctcgcacttgcagaggctggcgacggtgttgcagtgcggagccgtctgggcagctgttgaggcgccggcggcgctggcggtgaccggcgaggaggacatcgacctgctagggatcctgccgccgctcgcggtgttcgccttcttctacttcctcgtcgctcctccggtgatcatgaactggatgaggctgaggtggtacaagcgcgaattcgtggagacgtacctgcagttcatgttcacctacctcttctacccagcgatgatgttctgggcgccattcgtcaacttcaggaagttcccgagggatcccaccatgaagtacccttggtccaagccgaaggagggcacgccgctgttcaaagacagatacccgcctatagactcctagatacagccttgatacttgtactcggctcgtcgcgcgccacgggcatgcaggcagcgaaaaggccggtttcttcccctaaaaatctgtgtaaaacattactatatatcacacagtctaataatacccgtgctagtacatgggaaaggttactatccctaagattttaaaaaaaaaaaaaaaaaaaaaaaaaaaaaaaaaaaaaaaaaaaataaaaaaaaaaaaaaaaaagcggcc

SEQ ID NO: 53846 - DNA, 407 bp, Zea mays
  Clone ID: MRT4577_149109C.1
tattgagaccaattttcccatagaaagtggaatacagtagcaacaatagagcaacaatggcgaccaagatattttccatccttatgctccttgctctttctgcatgggttgctaacgcgaccatttttcctcaatactcacaagctcctataacttcccttcttcccccataccttccatcaatgaccgcttcaggatgtgaaaacccagtccttcaatcctacagggtccaacaagcaatcgcaacaagcaacttacctttatcacccctgtgctttcaacaatcgacaggcctatctttggggcacgaattaccacaaaccatcaaggcacaacagatggaacaaatcaggctaccagggattaagcaatgaagtctaaaaaacctttctccctactctcaagaa

SEQ ID NO: 53847 - DNA, 678 bp, Zea mays
  Clone ID: MRT4577_14910C.1
gccccgccaaaactagccataaataaaataaatatttttattccacaagcaatcacccataacatagaactacatttatacctaattctacagaacacaccatatgatacaatggatccatcagaattctacacttttgcagcacagacgaaggatcctcctgaaattgtaattccatcattgagtttcacggctgatcctcctggtaggatgggaatatctggagaatatggagagaacctgggaacatcaccgcatttgagaggggtaagatatataccttcattccaattactcatttcactcgtattatttctcaatggctaatgattcacactaaaattaggatgctggaaatacttcaacatataaaaataacacttgtccagaagacatgatacctaaaattggaatgagatttatctctgagcaagaagcatatggattttataatgcttatgctggcgagataggatttagtgttcgaaagagtggatgtcattatgtgggagattctttaataataaagacaagaacattttgttgctttcgtcaaggtaatgaatttcactttcactacaacagtttcagtacaacatttatctttcagtatttatggcaatttaaattgactttttacactaccaacaggtaagaagggctcctaaaaaaaaatca

SEQ ID NO: 53848 - DNA, 440 bp, Zea mays
  unsure (1)..(440): unsure at all n locations
  Clone ID: MRT4577_149110C.1
ggatgacgtacgtatgagggaataacagtccacctctccaagtaagaataagtgactttgcttctttcatggcattcacctgcagctttctccattgctgtgtgagttgtgttgatttagatcatgcgaacagtctttgggaacaaatgttgccttgtcatggtagttatagctgtagggaaaccttgacattctgatgttagaatcgttattcctactttcctcctctgcatgtangtcttaattgtgtgttttagatttttactttattggagctgtgattgtgtcatgccattcagttttattctgctgaggccagtgtcatgccattcaatttatttcttttactgaggcctgagcactcaagcctggattgtatgtgatgctatgtctgttactgagaaggttgagccaggccaaaattgtatttgatgagttgc

SEQ ID NO: 53849 - DNA, 706 bp, Zea mays
  unsure (1)..(706): unsure at all n locations
  Clone ID: MRT4577_149111C.1
cattgggtacctcgaggccggccgggctcgcctgactngacctctccgccctcctgtccgaagtgcagtcgtcgcccagctccagcgctaagttcaggctcccctgcctcctccatgacaagtccgcggcgccaacgtcgtcggtgcagatgcagagctcgcacttgcagaggctggcgacggtgttgcagtgcggagccgtctgggcagctgttgaggcgccggcggcgctggcggtgaccggcgaggaggacatcgacctgctagggatcctgccgccgctcgcggtgttcgccttcttctacttcctcgtcgctcctccggtgatcatgaactggatgaggctgaggtggtacaagcgcgaattcgtggagacgtacctgcagttcatgttcacctacctcttctacccagcgatgatgttctgggcgccattcgtcaacttcaggaagttcccgagggatcccaccatgaagtacccttggtccaagccgaaggagggcacgccgctgttcaaagacagatacccgcctatagactcctagatacagccttgatacttgtactcggctcgtcgcgcgccacgggcatgcaggcagcgaaaaggccggtttcttcacctaaaaatctgtgtaaaacattactatatatcacacagtctaataatacccgtgctagtatgaaanaaaaaaaaaaaaaagcggcc

SEQ ID NO: 53850 - DNA, 756 bp, Zea mays
  Clone ID: MRT4577_149112C.1
gtgcggccgctcgattggccggccgcgagccgggccgggaaaccataccacagggaagccgggaagccttcgccgcctgcgcgcgtgtccggcgatggacaccgtcgcctcatggcgcctcctctccccgcctccctgcccgcagcagctacccaagcggcaagcgaccttcgcggcctcgccacagcagcattcggccagctccagcagcgccaagttcaggctcctctgccacctccacctccatgacaagccagcggcgtcggtgcagcagagctcgcagctgcagaggctggcaacggtgctacggtgcggcgccgtctgggcagctgttgaggcgccggcggcgctggcggtgaccggggaggaggatatcgacctcctagcgatcctgccgccgatcgcggtgttcgccttcttctacttcctcgtcgctcctccgctgatcatgaactggatgaggctgaggtggtacaagcgtgaattcgtggagacatacctgcaattcatgttcacctacctcttctacccagcgatgatgttctgggcgccattcgtcaacttcaggaagttcccgagggatcccaccatgcggtacccttggtccaagccaaaggagggcacgccgctgttcaaagatagatacccgcctatagactcctactaggcagcaaaagatttctttacctgaatctgtgtaaaaacaatatcacagtcaaataataccccgtgctagtacatgggaaaagtactcta

SEQ ID NO: 53851 - DNA, 1475 bp, Zea mays
  Clone ID: MRT4577_149113C.1
aattaattaagctcaaaattcatgtcatcttcatgcaatttgttaaaactcatgacctgtatactattaactgaatttcgtgtggcactattatatataactcatgacctacatactactaactgaatttggtttggtttttcctcaaaagcaaaaacaaaagatcggtttcagtttcgttttgatgtctgtgtgtttgcagctcgagggggccgggcagagacaggcgtcttcgtactcgcctatctccgcgacccaaagcgttcccccttctcccattcttctctcatttctcaccaccgccgccgctaccccctttcgacaacaccatgagggagtgcatctcgatccacatcggccaggccggtatccaggtcggaaacgcgtgctgggagctgtactgcctcgagcatggcattcaggctgatgaatgcccggtgaagcattgggggaggtgatgcagattgggaccctcgaggccggccggggggaccagataagacgcgcggcacggcggccgggggggaaaccacaacgcaggacaagccatcgccccgatggacaccgccgcctcatgccgcctcctctcgccggcctcctcctctccgcccccctgtccgaagcagctacccaagcggcgaccgaccttcgcggcctcgcagcagcagtcgcccagctccagcgccaagttcaggctcctctgcctcctccatgacaagtccgcgtcgccaacgacgtcggtgcagatgcagagctcacagtcacagttgcagaggctggcgacggtgttgcagtgcggagccgtctgggcagctgttgaggcgccggcggcgctggcggtgaccggcgaggaggacatcgacctgctagggatcctgccgccgctcgcggtgttcgccttcttctacttcctcgtcgctcctccggtgatcatgaactggatgaggctgaggtggtacaagcgcgaattcgtggagacgtacctgcagttcatgttcacctacctcttctacccagcgatgatgttctgggcgccattcgtcaacttcaggaagttcccgagggatcccaccatgaagtacccttggtccaagccgaaggagggcacgccgctgttcaaagacagatacccgcctatagactcctagatacagccttgatgcttgtactcggctcgtcgcgcgccacgggcatgcaggcagcagcgaaaaggccggtttcttcacctaaaaatctgtgtaaaacattactatatatcacacagtctaataatacccgtgctagtacatgggaaaggttactatcactaagattttaccatgatctatagttctatacctcacaacattcatgtaatcatgtccgttaaaaactatgttcaccagtacaaagaagctctataatgacggtcgtgaacatattttaaaagaaaaaaaaaaaaaaaaaaagcggccaagaaaaaaaaaaaaaaataa

SEQ ID NO: 53852 - DNA, 173 bp, Zea mays
  Clone ID: MRT4577_149114C.1
aaaaccaactgaaaaaaccattaaatacctttgggtttcacggttcatgggaaagggtttaaattggccccctttttgaaagggttgttcccaaaataaaagcgcgggacatttgtttaaatagatcaggaacattttcccaaatggccccatttacccattttttttccccc

SEQ ID NO: 53853 - DNA, 588 bp, Zea mays
  Clone ID: MRT4577_149115C.1
ccttgaatggatgaggttcaagcaaaccctcttatagaaacagtggtcatctagaattaggaaaagagattagccctgtcaagaatgctatcagcttctactttctagtctgaccactgctgtctgtacgaggggctcttcgaatgtgatctggctcaagcaggctgcttccgatctgttatcttcattctacagtactaaggacttctgttggtattatgcagctgccaagacttatgttacattatgtatggatagcagccttatatttactatggttttctgggagatatctccctgccatagaatgtttatggggcatcttgtaacactgagtatgataaaggcttgggtgatatgctgcttgaacatagggtcatcccatagtttaaaagtcaaaatggctggtactgcttatggatgggacagtataactaaccatgtcaatgagaggtattctgtcgcccattactactgactgctgatgcaggactgagataagggcctcttgtccatttacacggccctaagagattcagggaaagaaagtggactggtttggaatgattccctatgtctgacagtggc

SEQ ID NO: 53854 - DNA, 363 bp, Zea mays
  Clone ID: MRT4577_149116C.1
gtccagcgctgcgtcaaccagcgccccaggttgcccccgaaggcgtccagcgcgcggccgaggcgctcgccccggtccatcgccgggcagcccacagcagagaactcctcacgactgctctgcacagacgccgggcggggcgtcggatcgccggagagacgaagcggaggcggtggcgggcgtgtcgggccctgcaagcgagcgggaggcggagcgacagcgacggacccagctaaggctgcggcggtggatccagaatgagggagaggagagagagagagaggaagacgggcagacgcagacggtagaattcttggcgatattcctatcgctggctggatttggctgcgctcagcgtcaatc

SEQ ID NO: 53855 - DNA, 273 bp, Zea mays
  Clone ID: MRT4577_149117C.1
cccacgcgtccgcccacgcgtccgttctcttccttcctcttcctctgcaagaagcgaaggacaatttagaagcgcccttcctcctctcccccatccgtacccaatctaatcgacacccggccgagatgggccgcaagttcttcgttggtggcaactggaaatgcaatggaaccacagatcaggttgagaagattgtcaaaaccctgaatgaaggaaatgttccctcttaaaatgtggttgaggccgtggccagtcctcctaaggggtccctcc

SEQ ID NO: 53856 - DNA, 1439 bp, Zea mays
  Clone ID: MRT4577_149118C.1
aggagtcacagtgacagtggcggcaatggaggcagtcacagaaagagaagagaggagaggcgagccagcggctgcagctcttcctcctcctgccggcctgagctgcttagatgcccgccatctcatctccaattctccatctccgtctacatccccatgaccatgagcatgagctgatgaagtgaagtgagttggctgccagcgcgtgctgtatcttgtatggctgtactgtatcccctcctctcgcccacaaaattttgtctccttccctccccacgtttccacccctcctcccaccactacttctgagctccctgcggctgcggctgcggcttggtgcttgcttccctcatctctagcctgtacactggttgcggttggagtggttgccagtgtcctcaccacttgctcctctcgatccactcccccacggacatgagcgtgcaaccatacatctaccggtgattgcttccttcttctgccctgaagctgaaaactcggcctgccgcgcctagcctgaccttgccttgcctgggggaaaaacttatgttttgctgctaccgctgctgtggacctgtggtataaaagtggagtcccagcggagggaagattgctccgtcgccgcggtttcgcttcgcggcgggaaggggccgtgaaggaatcttgcaccgagattaatccctcctctgcccctccatttccggccggctgtcggtgctgccttccgcagcaaaaggtgggatctcgcgtccgccggcggtggcattgccggatcgagatatctccagcggcggcctgcgtatctccgtggccgatctgcgctgcggcttccccgggcggtgcggactgctgcggtgaggagcgttgctctgcgctgtggtccaagcgagggggcgggggggactgcacgccaggtgttcgacgaagaacccggcccgaggcagccatgagggacttcccttcctgcttcggcgagagcggcgtccagatcgcggacgcgtcgtcttcgtcgtcgtccagcgccggcaagggcgcggcgcagaacctggtgacctgcctctaccagacgcacttctcaggcaggccctgcgtgatctcgctcacgtggagcaagagcctgatggggcagggcctcagcgtcggcgtcgacgacctgtcgtccggccactgcctgtgcaaggcggacatcaagccgtggctcttctccaagaagaaggggtccaggagcctcgacgtcgaggacggcaaggtcgagatcttctgggacctgtcgggcgccaggttcggcgccgggccagagcccgtggaggggttctatgtcgcagtggtgttcgacctcgagctcgcgctcctgctcggcgacatgaagaaggatgcctacaggaagaccggagccagccagtcgacactgaatgcccggccggcctcgagggtcccaa

SEQ ID NO: 53857 - DNA, 632 bp, Zea mays
  Clone ID: MRT4577_149119C.1
cctcgaggccggccgggccgggctgaccattgaaatgttaaattggctgagatcatcatgggcggtaaaaaaaaaaaaaaaaaaaaaaaaaggaccctaaaaaaaataaaaaataaaaataaaaaaaaaaaaaaaaaaaaaaaaaaaagaaaaaaagaaaaaaaaaatgaaaaaaaaaagaaaaaagaaaaaaatctgggtaagcctttttatcccccaaaatctccgggttcggcaagggtagggcgaaaatcccgcgggggctggggaggggggtaaatctcattaataaaaaaaaactcggtgtgttttttgggcccaacaagggtgactttttactgggggggtgcagcggggaaccctcccccaaaggttcccccccctatttgaacgcccctccggtttttcgtttactgagtggctgagatttttcgttcatctggggcgagggggagaggtcactcccaggccccaatacacctattcttggaaaaaaaatataccccccgaaaaaacatgtgtgggaaaggccattaacacgccaggaagcgcaaccccggcgcgatggtggaatttatccggaggctccccccccctgaattgggttacaaaaatcaaaggttttgttttat

SEQ ID NO: 53858 - DNA, 156 bp, Zea mays
  Clone ID: MRT4577_14911C.1
cctccttttttcttggggggtgtttttaacaaaagcaggggtttccacaaaagcgagatggttcgggaaaaagaagaagagggggcctacagtcacggaaggaccccgcagacgattcacagtgcagggaacataaccaggggggataccccgtgt

SEQ ID NO: 53859 - DNA, 697 bp, Zea mays
  Clone ID: MRT4577_149120C.1
ccggccgggaaaactttgattcctcaactacatacttacatttactttcaaaatggccactcctccgattcccgccaaccgtctcaagcagatcgccaccgatgcctgcaacagcgccatcggcaatgctgagttctacgaccacgctaagaccgagcaatggaactcgacaatcattagctccgtgctgaaggctgtcatctccgagtcgacccccgaaggtgcttccgctccttcattcaagtttgcctgcaacagcaccatcgtgcagcacctcctcccaacatccgctctgaacaagccccgtggcggcaccgagacacaggctcaggagcctcacatctccaccagctccgaagctaccgctaccgacggcaagcctcacgtcggccgacgaggaatgcacagcgctaccggtgcctactgggacgagaagaaggacggcatgtggaccttcaagtacgacggcggcgagggcaagggcctggacgttgttgtcatgctcatctgggttgccatttgagctgcaaacaaaaagatgagcactcggggactttcaccctgttctgaaccgagttagtttgcttctgacgtgcgcgacccctgattcagctatggcgttgagggacttgggaagcgtgacattaggactacgaagtgtacgatcgagcttccggttagctatctgccgacgact

SEQ ID NO: 53860 - DNA, 239 bp, Zea mays
  unsure (1)..(239): unsure at all n locations
  Clone ID: MRT4577_149121C.1
gggttttgttttttttttttttttttttttttttttttttttttttttttttttttttattggggaacagacgaagagggtcacacgctggtgacttgttacacggaggaaccctacactgggtaaataggaactaggactttttactgggaaagtaggggacaaaatantgttttaaaacttatataattctacacccccnnnnnnnnnnaatcccacnnncnccnaccaaaaataaa

SEQ ID NO: 53861 - DNA, 2898 bp, Zea mays
  Clone ID: MRT4577_149122C.1
ttcataccctcgcgaagacactagggccgccgccggcgaatctcaagttcttaacacctggcagaagcaaatcggcgtggcactcgccgggcaccgctcccttctccctcctcccacttcccagttctcaatcgtctcaactttgcgggctgcggttccgcctccgcctccgcctcctgacaaccgctgcccgcttcgctcgtagcccacaccgccgttctctcccccagggacgaggaggagcaagcaaacaggaagcagccgagcatcttgccagtatattatatgcgttgaggtggcattgctgatgaaagtgaagacatgaggcttgaatgaaccctaagctgcccccgccaaccgccgccgccgcagcagtcaccgactcctccagtcaaatcagccatgtcgccgccgccctgtgacgccctgcccaccgctgccaacaacatccagccatttcttgtccttcacaaggctgctgcctcctcggtgccatcttcccggtctcagcgccagattcagacctcacagccatcctcacccaaccgcaaatcagcaaacagatgtcgtcaaccagcgggtgaggagtgtgaggacgaaggggattcggagctatatgagcagctgcgtgctgaggccttccaccgaacttggtccaagatccagtccaccatcgacgaggtcctcagggccatcaacctcaagctgttcgaccaggtgctgcagtgggcgaaggagtccttcgcttcggcccatgccatcacgaaaaagcaccacactgaagtccagcagccataccctctcctgactgatgtgatctgcagaaggatcccgacggtattcgtcctcaccaagaatgcagagtttgttgatgatatcacaacgtttcatgaccttgcagggcatatgaagtccaatggatgtcacatagtcaagctgtcagcggctgagttatcagcaaaacatggagttggtggttgcttcaggagcctgctgggacagctattatccgatgttccagatgtcgctgatgtatctgcgctagcatcatggtattgtgaagctgagaactttgatcagcctatcattgtcataattgatgatttggagcaatgttctggcgatgtgcttggagagtttgtgatgatgctgagtgagtgggtgtttaaaattccagtcttctttgtaatggggatagcaactacccttgatgctccaaagaagcttctctcgtcagaggctcttcaacgattagagccctgcaaacttaccttggggtctccctcagatagattgaatgcacttgttgaggctgtccttgttaaaccatgcactggattttgcatcagtcatgaagtcgcactgttcctcagaaattacttttttaggcacgatgggacaataacttcttttattactgctctcaagcttgcatgcagtaagcacttctccatggaacctctaagctttttgtgcataggaatggtggaggaagattctgaggaattttggcacgataagtttgaatcgctccctcaaacaatacggaaacatgctttcgatctaccctcatccaaaaatgcaaggaattcttgcaacatggtagaaggattgtctaggctgctgaaatcgcaaaaggattggagttctgttctcttgtgcctgtatgaagctggaaggcatgacaaagtgcagcttttggatatcttctgtgaggcagccagcccagattggcaaactgaaaatgcaccagataattacctatttgcttctaaagtggctttattaggagtaaagtcagggtctgctaaaagatttatagcccaagtaatgaatacaataaggtacttgcctacagaaattttgttacacatcctcgaggtttggagcatccatttaaaaggaatgagtgagatcaacgacagagtgaaggagcttctgtcaaaaggttgtggtgcagatagtgttagggccaaaaggaaatcaaccgccaatactggaaatggagtggttctaataaacgaggaagcggctgcgctgttacaggatgttatcaggaaatatttggtacctgctgaatgcttacctttccatgaaatagtctgcttcaagaatgttgacatcctccgatctgcgctgattggaaacccaagaagaatgattcaactcgatcttctgaggtcacagagccatctgaaatgctcttgttgcagtaggagtggtgctgccgtgtcaggatcgttgcacgacacatcaatcctgtgcagtctagcccaagagtatggtgacatgattaacctccatgactggtacacggcctttgaagggattataaagagcacaaactcaaaagccaaagggaaatcttgcagctctccctcgaagaagaagaagaaatcgaaccccacgcctctggagggtgatggcatgatccaagcaaggttctgcagcgccgttactgagatgcaggtcactggccttgttcggatgccgagcaagagaaggcccgatcttgtgcagagaatcgcgttcggtccttaacagctcggtgattacatgcatgctatacagacgaaacgttttgtgcacgctgacgataatcccaccatgtggtaaattgggcagccgtggaaggaaggtttggttacttgtatcggtgcttcgaagagagctgtgagatggagcagcagccgccgcttcagatatgcagtgctggtgttgcgtctgatggctaagctatgtcgttatttttttcctcttaagagccgtactaaacatgttttagctattgattcggctctctgtagagctgacatgggctcatgtagcccaaggggtacatttgagaaatttttatccttgaaacaaagggcatttcgaattaaaaaaaaaaaaaaa

SEQ ID NO: 53862 - DNA, 740 bp, Zea mays
  Clone ID: MRT4577_149123C.1
cggccgctcgagccggccggcccaagcccagcccataccggcagccacctccgtcgtcgtcggtactgacgcggcacgagccggcgaatccgacaggccccctacctctcgctcgccgcgagatcccgcgtccatggcggtcggcatcgcgctcctgctcgaccttgcggcccgcgcgccccgctcctccgcctcgctccactcgcacgccgccttctccgccgccgccgccgccgccgccgcggcagccctgtccgcctccggcgtacccctctccgcgcggccattcttcggttttccaggattcactgttgctcattgtgatgctggtgcaacttatggatcgattgatagtcctgatcttgccaatgatcttaatgagaagatacatgactcgattcatgatctccaattaccgataaaagaatacccgttggagctgaagccgcttttgtatgcatttggctttaagcatttgagtatgacgactattagggcctttttattatactatttaccacttctggagcctcgtccgcccactgatgacgatgacgatgacgatctgcttcaagatgattcagagagaccgccggtcgacctggttactccctttcataattcattgaagcaaatcgctcgcgagatttctgttgtaacaacaagaagagcattcgaaaggattgcggttcgtcgtgtttcacaaagaacagcatggaagcttctcaaagatgctgcaa

SEQ ID NO: 53863 - DNA, 600 bp, Zea mays
  Clone ID: MRT4577_149124C.1
ccaatacccaagtttttttttaaccagtttgtttcagtagcaaccaggacacagcagcaaacaactgaacagcagggtaaaagtccaggagttttccgcctgttgttgcatcaaggacaagagcatcaggcagacccccccgcgcgcgcttccgatccttctagtgagaagctctccatctcctctccttctatgtgcaaggtagtaaacaaaagggccctaggacacctctagtgcatcagctggcgaggcgcacggggacgcacgggagtcttcgaggggctcacccttattggcaaggatcccagtatcacgccactgcagttcagggcagcggtagcactttctgccatcacaaattccacaaaagcgatgcgagtagaatgatggtagtcaccaagcaacctcagccgaaagacctctccacatatagactcaaagaacaatttcagatctgcctgagtgaccttcttgtcaatgtttgtgcagtaaatagtcctcgcacacatttcccgttcatcgtcagacctgggtaggaatgttggattgactggtgcaatggcagtttttgatggcagaaccctgcaggataatatccaa

SEQ ID NO: 53864 - DNA, 453 bp, Zea mays
  unsure (1)..(453): unsure at all n locations
  Clone ID: MRT4577_149125C.1
acggcgtatacactcctatagggcgattggngatcccaaggagggccgggcctcctcccgtcatctccaccttcgatccccctgctcggcatctactatgcgcctatgtgccgcacgcccactttacgggccatggtgcctgttcccataaccagatagcagaaacgttaggaggaagatgaagtatttgcaaattggcctctgctccctgctgttgtgtccagtgcctgttccctcgtgccgtgcacagctcgtcgtcgtggagctcgtgctcaccgtccgcgtttccccgccagagttccatccgcgcagcacgacgatcgagcccgttcgccgtcgtccgttcacccaaggttgataacaaccgttaatgtattttctaaatcatgtttgaattattttattgatcttatgaattattgttgcaaaaaaaaaaaaaaaaaaggggcggcc

SEQ ID NO: 53865 - DNA, 1164 bp, Zea mays
  unsure (1)..(1164): unsure at all n locations
  Clone ID: MRT4577_149126C.1
cctgcgccgatccacctccgctgctgcctgcctcaatatattcgcccgcctcgtcgcctccgaccccgccacagaaggccttccagaaccctccgacccctcacctccgccccgccccgctccactctgttgctgctgggccggccgactccgatggccgtcgtcgaggccgacgtcagctaccacgccgcgccgccgttccaggaggaggcaccgggcgcgggcgctggcgctggcgccgacgccggggagcgcgagatgcgggatctggaggacccgctctccaagctcaaccccatggccgtggagatgtgcccggccctccctcaggagccggggcccgccaagccccggtcgtgcggcacggtggtgcgcaacgcggagctcaaggtggtggacccggacacgggcctctccctcggccgcaacctccccggcgagatctgcatccggggctcccagatcatgaaagggtacctgaacgacccggaggccaccgcgaggacgacgacgtccacggctggctccacaccggcgacatcggctacgtcgacgacgacgacgaggtcttcatcgtcgaccgcgtcaaggagctcatcaagttcaagggcttccaggttccgccggccgagctcgaggctctgctcgtcgcccacccgtccatcgccgacgcggccgtcgtcccgcaaaaggacgaagccgccggcgaggtccccgtcgccttcgtggttcgcgccgccgacgccgacatcgcggaggacgccatcaaggatttcatctccaagcaggtggtattctacaagaggctacacaaggtgtacttcaccccctccatccccaagtcggcgtccgggaagatcctgaggagggacctgcgcgccaagctcgcggcagcctgaggagcttgacgctcaggttccatgccttgctacgtgcaactcatttggtagtggtgtttactgccaatccagtgtatgggtacaggcatgaaacatgaggtaccgacaatgtactatcaatatatgctttgtatgcgagtgcttcgtcagttaaggaccaccatttatttccgtcatgattttatttccccccgttggtgcataatccaccatccancaaaaaaaaaaaaaaaaaaaaaaaaaaactcgagagggggccggtacc

SEQ ID NO: 53866 - DNA, 3287 bp, Zea mays
  Clone ID: MRT4577_149127C.1
ctccgtgctgctctgctccatgcgtgcctgcgcggtggtcatgctcatgcccaagttcgagatgggcgccatgctggagggcatccagcggtggcgcgtcacagtggcagccgtcgtgccgccgctggtgctcgccctggccaagaaccccgcgctcgagaagtacgacctcagctccatccggatcgtgctctccggcgccgcgccgcttggcaaggacctcgtcgacgcactccgcgcccgcgtgccacaggccgtcttcggacagggatacgggatgacggaggccgggcccgtgctgtcctaccaactggcggcggcggttcataccctcgcgaagaccactagggccgccgccggcgaatctcaagttctcaacacctggcagaagcaaatcggcgtggcactcgccgggcaccgctcccttctctctcctcccacttcccagttctcgatcgtctcaactctgcggcccgcggctccgccccctcctccggacgacctcacccacacgactgctggccgctgcggtcgtcgcccacaccgccgttctctcccccgggtgcccataaacccccttctccgcgccatcgttggcccggcgtaaccatctccgctgcggggacgaggaggagcaagcaaacaggaagcagccgagtatcttgccagtatattatatgcgttgaggtggcattgctgatgaaagtgaagacatgaggcttgaatgaaccctaactgcccccgccaaccgccgccgccgcagcagtcaccgactcctccagtcaaatcagccatgtcgccgccgccctgtgacgccctgcccaccgctgccaacaacatccagccatttcttgtccttcacaaggctgctgcctcctcggtgccatcttcccggtctcagcgccagattcagacctcacagccatcctcacccaaccgcaaatcagcaaacagatgtcgtcaaccagcgggtgaggagtgtgaggacgaaggggattcggagctatatgagcagctgcgtgctgaggccttccaccgaacttggtccaagatccagtccaccatcgacgaggtcctcagggccatcaacctcaagctgttcgaccaggtgctgcagtgggcgaaggagtccttcgcttcggcccatgccatcacgaaaaagcaccacactgaagtccagcagccataccctctcctgactgatgtgatctgcagaaggatcccgacggtattcgtcctcaccaagaatgcagagtttgttgatgatatcacaacgtttcatgaccttgcagggcatatgaagtccaatggatgtcacatagtcaagctgtcagcggctgagttatcagcaaaacatggagttggtggttgcttcaggagcctgttgggacagctattatccgatgttccagatgttgctgatgtatctgcgctagcatcatggtattgtgaagctgagaactttgatcagcctatcattgtcataattgatgatttggagcaatgttctggcgatgtgcttggagagtttgtgatgatgctgagtgagtgggtgtttaaaattccagtcttctttgtaatggggatagcaactacccttgatgctccaaagaagcttctctcgtcagaggctcttcaacgattagagccctgcaaacttaccttggggtctccctcagatagattgaatgcacttgttgaggctgtccttgttaaaccatgcgctggattttgcatcagtcatgaagtcgcactgttcgtcagaaattacttttttaggcatgatgggacaataacttcttttattactgctctcaagcttgcatgcagtaagcacttctccatggaacctctaagctttttgtgcttaggaatggtggaggaagattctgaggaattttggcatgataagcttgaatcgctccctcaaacaatatggaaacatgctttcgatctaccctcaaacaaaaatgcaaggaattcttgcaacatggtagaaggattgtctaggctgctgaaatcgcaaaaggattggagttctgttctcttgtgcctgtatgaagctggaaggcatgacaaagtgcagcttttggatatcttctgtgaggcagccagcccagattggcaaactgaaaatgcaccagataattacctatttgcttctaaagtggctttattaggagtaaagtcagggtctgctaaaagatttatagcccaagtaatgaatacaataaggtacttgcctacagaaattttgttacacatccttgaggtttggagcatccatttaaaaggaatgagtgagatcaacgacagagtgaaggagcttcggtcaaaaggttgtggtgcagatagtgttagggccaaaaggaaatcaaccgccaatactggaaatggagtggttctaataaacgaggaagcggctgcgctgttacaggatgttatcaggaaatatttggtacctgctgaatgcttacctttccatgaaatagtctgcttcaagaatgttgacatcctccgatctgcgctgattggaaacccaagaagaatgattcaactcgatcttctgaggtcacagagccatctgaaatgctcttgttgcagtaggagtggtgctgccgtgtcaggatcgttgcacgacacatcaatcctgtgcagtctagcccaagagtatggtgacatgattaacctccatgactggtacacggcctttgaagggattataaagagcacaaactcaaaagccaaagggaaatcttgcagctctccctcgaagaagaagaagaaatcaaaccccacgcctctggagggtgatggcatgatccaagcaaggttctgcagcgccgttactgagatgcaggtcactggccttgttcggatgccgagcaagagaaggcccgatcttgtgcagagaatcgcgttcggtccttaacagctcggtgattacatgcatgctatacagacgaaacgttttgtgcacgctgacgataatcccaccatgtggtaaattgggcagccgtggaaggaaggtttggttacttgtatcggtgcttcgaagagagctgtgagatggagcagcagccgccgcttcagatatgcagtgctgatgttgcgtctgatggctaagctatgtcgttatttttttcctcttaagagcagtattaaacatgttttagctattgattcggctctctgtagagctgacatgggctcatgtagcccaaggggtacatttgagaaatttttatccttgaaacaaagggcatttcgaattatttccccttttt

SEQ ID NO: 53867 - DNA, 333 bp, Zea mays
  Clone ID: MRT4577_149128C.1
cctactcttccggtcaaggatgccatctaccagggggtgtgtggatgccaaggagaggtataggaagaccactgtgactgtggaacttcagattgggctgaagaatcatgatccacagaaggacaagcgtttcagtggctgtgttaagtcgccccatatccctcgtcccacgaggaaggtgtgcatgctagctaatgacgagcatgttgagggggccgagaagatgggactagactacatggctgctgacgttctcaagaaaatgatcaacaacaggacgcttgtctagaggcttgccaagaagtgccatgctgttttggcctcagtggccat

SEQ ID NO: 53868 - DNA, 362 bp, Zea mays
  Clone ID: MRT4577_149129C.1
tcttaaaaaaaaaaaaaaaaaaaaaaaaaaaaaaaaaaaaaaaaaaaaaaaaaaaaaaaaaataaaaaaaaaaaaaaaaaaaaaaaaaaaaaaaaaaaaaaaaaaaaaaaaggggcgggccggttttagaagttcccaattttacgtaccctgaacttgacaacgtttatactttttttttagagccacctaaatttaaataaattggcgcgttgtttaacaaagtcgggtttggaaaaaaccctggttttaccaaatttaatcgctttgaagaacatccccttttccccatttggcaaaatagcaaaaaggcccataccaattgcctttcccaatatttgcccaccttaaatgggaaatgg

SEQ ID NO: 53869 - DNA, 358 bp, Zea mays
  unsure (1)..(358): unsure at all n locations
  Clone ID: MRT4577_14912C.1
gagcttatctgtcggcggccgccctgcttgggcttctagggaggcctcacactgcacatgctatcattgaagccggaggaacatgaccaccgggccaccgattggtacaatcaaggcacacaacggctcgactcaagncaaacgacacaggactgcacaaacagatgctgacctagatcgcaaggcaacaccaaccaatgaagcacatccaagtctccaatgcaggcaggatagtcaactgaccaggaagcgaacacacgctttctatgtataggtagctggacttccgggactaggaacggccaactactgataccatggagctgggggaaaccacgatccacccatgcatgaagac

SEQ ID NO: 53870 - DNA, 1967 bp, Zea mays
  Clone ID: MRT4577_149130C.1
caggcaccagtgcatcgccaccgtaccggagggggcagcgcccaaaaaaggcaaacgggagggtgggcgagcctgctcttcctgtctgggagagagaccgaagaagaggagagagaggcgcagcgcagcgcagcgcaggcgcgcatctcccccctccccttgccggctggcccctgctgcagctctgctccggtcggctctgcccccccgctctgctgactgctctgccgctgctgctgtcgcaggcgcgccaccaacccgccgatgcgcgcgtagcggcgtaggtacgatcctcagccatccccgagacgacccaccacccacccctgcagtctgcagcatccccttccccactcccggctggtctgctgcggccacccctgcgccgatccacctccgctgcatcatgaacgagaaatgtgtgcgaggactatttactgcacaaacattgacaagaaggtcactcaggcagatctgaaattgttctttgagtctatatgtggagaggtctttcggctgaggttgcttggtgactaccatcattctactcgcatcgcttttgtggaatttgtgatggcagaaagtgctaccgctgccctgaactgcagtggcgtgatactgggatccttgccaataagggtgagcccctcgaagactcccgtgcgtccccgtgcgcctcgccagctgatgcactagaggtgtcctaggtacaggaggtgcggaaggcactgcttatatatcatcatcatatatatataatagagaatagacatatatgaaagaggggaggggaaaagtggcgtcacttgttctaagttatgggctcggcctttttgttttgggttcttgcttcaccaccgtgtgactgagtactaaagtgcctacgtacgccccgggtcgacgccggctggcagggcccttttgtttactaccttgcacatagaaggagaggagatggagagcttctcactagaaggatcggaagcgcgcgcgggggggtctgcctgatgctcttgtccttgatgcaacaacaggcggaaaactcctggacttttaccctgctgttcagttgtttgctgctgtgtcctggttgctactgaaacaaactggttaaaaaaaacttgggtattggagactaaaaccaataaaaataaaataccaaaaaaggtctgaggatgaacgggaaatgtgtgcgtagcctggtctgacgatgaacgggaaatgtgtgcgaggactatttactgcacaaacattgacaagaaggtcactcaggcagatctgaaattgttctttgagtctatatgtggagaggtctttcggctgaggttgcttggtgactaccatcattctactcgcatcgcttttgtggaatttgtgatggcggaaagtgctaccgctgccctgaactgcagtggcgtgatactgggatccttgccaataagggtgagcccctcgaagactcccgtgcgtccccgtgcgcctcgccagctgatgcactagaggtgtcctaggtacaggaggtgcggaaggcactgcttatatatcatcatcatcatcatcatcatcatcatatatatatatatataatagagaatagacatatatgaaagaggggaggggaaaagtgtcgtcacttgttctaagttatgggctcggcctttttgttttgggttcttgcttcaccaccgtgtgactgagtactaaagtgcctacgtacgccccgggtcgacgccggctggcagggcccttttgtttactaccttgcacatagaaggagaggagatggagagcttctcactagaaggatcggaagcgcgcgcgggggggtctgcctgatgctcttgtccttaaagcaacaacaggcggaaaactcctggacttttaccctgctgttcagttgtttgctgctgtgtcctggttgctactgaaacaaactggttaaaaaaaaacttgggtattggagactt

SEQ ID NO: 53871 - DNA, 248 bp, Zea mays
  Clone ID: MRT4577_149131C.1
ctatgggtaaacacaaatttcaatcccaaagaaaagggaataaccctccgcaaaattgccaaaaaccccaagcctctgaaattttaaaacctctaccccctaaacaaaaaaccccactttttccacccaaagggcgacacaaaccgaaaacaaaccgccgtccaccccccttggcaaactggcccccccctgtctcacacccccccttttttcctctgaatccctgcccgctaccgaaaagctgcccc

SEQ ID NO: 53872 - DNA, 2133 bp, Zea mays
  Clone ID: MRT4577_149132C.1
tggtacctcgagccgccggcccatccacgctgccctcggcgctgcgtctggcccggcacctacctccggtccccgcccacctgttgctgtatttatttccgcctcgtctcttctgggtacctcgaggccggccgggagcatcactgccgtgtagtgtagctagagcccgtgcactggtccggattcgcagagcaaaacggaaatgatcacggtggcagcaccggaggcgcagccgcaggtggcggcagcggcggcggcggttgcggcgccggaggagaccgtgttccggtcgaagctgccggacatcgacatccccacccacctgccgctccacgactactgcttctcgagggcggcggaggcggcgggcgcgccgtgcctcatcgcggcggccacggggaggacctacacgtacgccgagacgcgcctcctgtgccgcaaggccgcggcgtgcctccacgggctcggcgtcgcccagggcgaccgcgtcatgctcctgctccagaactccgtcgagttcgtgctcgccttcttcggcgcgtccttcctcggcgccgtcaccacggccgccaacccgttctgcacgccgcaggagatccacaagcagttcagcgcctccggcgcgaaggtcgtcgtcacccactccgcctacgtcgccaagctccggcacgacgccttcccgaggatcggcacggcgagcggcggcggcggcgtggacggcaatgccctcctcaccgtcctcaccatcgacggcgacgcggccgacaccccggaaggctgcctggcgttctgggagctgctcacgtccggcgacggcgacgccctcccggaggtgtccatctccccggacgaccccgtggcgctgccgttctcgtcgggcaccacggggctgcccaagggcgtcgtgctgacccacggcggccaggtcacgaacgtggcgcagcaggtggacggcgcgaaccccaacttgtacatgcgggagggcgacgtcgcgctctgcgtgctgcctctgttccacatcttctccctcaactccgtgctgctctgcgccatgcgggccggcgcggcggtcatgctcatgcccaagttcgagatgggcgccatgctggagggcatccagcggtggcgcgtcacagtggcagccgtcgtgccgccgctggtgctcgccctggccaagaaccccgcgctcgagaagtacgacctcagctccatccggatcgtgctctccggcgctgcgccgcttggcaaggacctcgtcgacgcactccgcgcccgcgtgccacaggccgtcttcggacagggatacgggatgacggaggccgggcccgtgctgtccatgtgcccggcgttcgccaaggagccggcgcccgccaagccggggtcgtgcggcacagtggtgcgcaacgcggagctcaaggtggtggacccggacacgggcctctccctcggccgcaacctccccggcgagatctgcatccggggcccgcagatcatgaaagggtacctgaacgacccggaggccaccgcgaggacgatcgacgtccacggctggctccacaccggcgacatcggctacgtcgacgacgacgacgaggtcttcatcgtcgaccgcgtcaaggagctcatcaagttcaagggcttccaggtgccgccggccgagctcgaggctctgctcgtcgcccacccgtccatcgccgacgcggccgtcgtcccgcaaaaggacgaagccgccggcgaggtccccgtcgccttcgtggtccgcgccgccgacgccgacatcgcggaggacgccatcaaggagttcatctccaagcaggtggtattctacaagaggctacacaaggtgtacttcaccccctccatccccaagtcggcgtccgggaagatcctgaggagggagctgcgcgccaagctcgcggcagccgcgaccgcctgaggagcttgacgctcaggttccatgccttgctacgtgcaactcgtttggtagtggcgtttactgccaatccagtgtatgggtacaggcgtgaaacatgaggtaccgagaatgtactatcaatatatgctttgtatgcgagtccagcgcttcgtcaattaaggaccaccatttattcccgcaaaaaaaaaaaaaaaaaa

SEQ ID NO: 53873 - DNA, 405 bp, Zea mays
  unsure (1)..(405): unsure at all n locations
  Clone ID: MRT4577_149133C.1
aaaaaaaatataacttgttatttntaggaggccacatacatnnagcccaaaaacttcattattgaattacaactaataagcaatctaaaagaggcaccgccaatgatgtgttgttggtaaaaggctgctgggtttggggggggggggtgnacaaagggcaacaactgttggagttgtaaaagggaagaggggttagccacaaactggtggtagaacggaagcaattgttgttgttttaaaaaggaagtggggcttgttgaagctagctggccaaatggtagtaatatttgatgatggaaataagcagaggggttaaatgcggacaattggttaaatggaagaaattgttggtagtgagagtaagcaaaaaataaatagctaaaagggaaaaattaatgttgatga

SEQ ID NO: 53874 - DNA, 1941 bp, Zea mays
  Clone ID: MRT4577_149134C.1
agcgcccaaaaaaggcaaacgggagggtgggcgagcctgctcttcctgtctgggagagagaccgaagaagaggagagagaggcgcagcgcagcgcagcgcaggcgcgcatctcccccctccccttgccggctggcccctgctgcagctctgctccggtcggctctgcccccccgctctgctgactgctctgccgctgctgctgtcgcaggcgcgccaccaacccgccgatgcgcgcgtagcggcgtaggtaccatcatcatccatccccgcgacgacccaccacccacccctgcagtctgcagcatccccttccccactcccggctggtctgctgcggccacccctgcgccgatccacctccgctgcttcctgcctcaatatattcgcccgcctcgtcgcgtccgaccccgccacagaaggccttccagaaccctccgacccctcacctccgccccgctccactctcctcctcctcccgggccggccgactccgatggccgtcgtcgaggccgccgccgccgaccacgccgcgccgccgctccaggaggaggcaccgggcgcgggcgcgggcgctggcgccgacgccggggagcgcgagatgcgggatctggaggacctgctctccaagctcaaccccatggccgaggagttcgtcccgccgtccctcgcctcccccgccgccctcacgcccgcgccgctctcccccgccgcctacggcttctacccggccggcgccggcttcgcggtcgcctcgccgggccacggcggcgtcgtcggcttcccggccgtcgcggacgcccacgccgcacgaggcaggaagaagggcggagccggaggagggttcagcggccacggtcaccccgccaggaggcggaccaacagccgcaccagcatggcgcagcgcgacgagatcatccgccgcaccgtctacgtctccgacatcgatcaccaggttactgaagaaaacctggcagcactatttataaattgtggacaggttgtggactgtcgcatgtgtggagacccaaactcagtccttcggttcgccttcatagagttcactgatgaggagggtgcaagggctgctctgaatctgtcaggaactgtgctcggatattatcctgtcagggttctgccatcgaaaactgccattgcaccagtcaatccaacattcctacccaggtctgatgatgaacgggaaatgtgtgcgaggactatttactgcacaaacattgacaagaaggtcactcaggcagatctgaaattgttctttgagtctatatgtggagaggtctttcggctgaggttgcttggtgactaccatcattctactcgcatcgcttttgtggaatttgtgatggcagaaagtgctaccgctgccctgaactgcagtggcgtgatactgggatccttgccaataagggtgagcccctcgaagactcccgtgcgtccccgtgcgcctcgccagctgatgcactagaggtgtcctaggtacaggaggtgcggaaggcactgcttatatatcatcatcatatatatataatagagaatagacatatatgaaagaggggaggggaaaagtggcgtcacttgttctaagttatgggctcggcctttttgttttgggttcttgcttcaccaccgtgtgactgagtactaaagtgcctacgtacgccccgggtcgacgccggctggcagggcccttttgtttactaccttgcacatagaaggagaggagatggagagcttctcactagaaggatcggaagcgcgcgcgggggggtctgcctgatgctcttgtccttgatgcaacaacaggcggaaaactcctggacttttaccctgctgttcagttgtttgctgctgtgtcctggttgctactgaaacaaactggttaaaaaaaacttgggtattggagactaaaaaaaaaaaaaaaaaaa

SEQ ID NO: 53875 - DNA, 518 bp, Zea mays
  unsure (1)..(518): unsure at all n locations
  Clone ID: MRT4577_149135C.1
ggcggggactcgnngncgncccacggccagatattttggaacaacgatctatattatagcatgctggttatttgcaaaagcgtctattaccatataggcaactggatactgtactactttcattaacaacaacttgttctattgaaccaattgaatcgcactggggggcgctgattatttgcataatctaatactactaccatttagccagctagctgcagcaatgtgagcttccttcttgacacagcaacaggtgctgcctttctaccagcagtttgcgactaaccccgcaaccctcttacaactacgacaattgttgccctttgtccaacttgctttgacaaacccagcangctgctaccaacaacacatcattggtggtgccctcttttagattgcttattagttgtagttcaatagtaaagttttttggatgatgtatgtggccaaccagaaatagaaagttacatttccagattcttgtgtgggggggaaaagggtggagttgggtaggggga

SEQ ID NO: 53876 - DNA, 434 bp, Zea mays
  Clone ID: MRT4577_149136C.1
agaatctggaaatgtaacttcttatttctggttggccacatacatcatccaaaaaactttattattgaattacaactaataagcagtctaaaagagggcaccaccaatgatgggccgttggtaggaggctgctgggtttgccaaagcaagctggacaaagggcaacaattgctgtacttgtaagagggttgcggcgctagccgcacactgctggtacaaaggcaccaactgttgctgcgtcaagaaggaagcacggcttgctgcaactagctggctaaatggtagcattatttgctgctgcaaataaacagcgggggtcaccgcggccaattggttaaatggaagaagtcgttcctgctgagagtacgcagtaactacctggctgaacgggaacagttggtgctccatataagcaccacggttcaatgcggaca

SEQ ID NO: 53877 - DNA, 575 bp, Zea mays
  unsure (1)..(575): unsure at all n locations
  Clone ID: MRT4577_149137C.1
tcgnacggccgcccgggcgaggggcgtgttttttttttttttttttttttttttctttttttttttttttttttttttttttttttttttttttttttttttttttttggattaaaagcggggtccccccaatcttaggaaaaggaattatcgaaccccctggggggcggggggacattaaaatctggaaaggtaactttttatttggggggggccccatacatcatccaaaaaactttttttttgaattacaactaataatcaatctaaaagggggcccccccaatgatgggttgttggaaggaggctgctgggtttgacaaagcaaggtggacaaagggcaacaattgttgtaattgaaaaagggggggggggttagccccaaactgcttgaaaaaaggcgacaactgttgctgggtcaaaaaggaagcacaacttgctgcagctagctccctaaagggcaggagaatttgctgctgaaaaaaaacagggggggtcaggggggccaattggttaaatggaaaaagttgttgttgctgaaagaaggcaaaacctagccggctaaaagggaaaag

SEQ ID NO: 53878 - DNA, 185 bp, Zea mays
  Clone ID: MRT4577_149138C.1
acttaccacactttatcattctcctgccatatttataacttttaaaacccaatccaacatttccaattccctaccgatttcaacattcccatctacactactaatcattctatcattcactctacacctccttcacacttccacataaccttccccattaacacatcttctcttaacttcccaac

SEQ ID NO: 53879 - DNA, 503 bp, Zea mays
  Clone ID: MRT4577_149139C.1
ttgggggtgttttttttttttttttttttttttttttttttttaaagctggcttcccaatcttaggggaaaataattatcgaacacccttgcaggccaatagcacattaaaatttggaaatggaacttcttatttttaggaggccacatgggggggccaaaaaacttcattattgaattacaactaataagcaatctaaaagatggcaccgccaatgatgtgttgttggtaaaaggctgctgggtttgtcaaagcaagttggacaaagggcaacaactgttgcagttgtaaaaggggtgcggggttagccacaaactggtggtaaaacggaagcaattggtgttgtttcaaaaaggaaggggggcttgttgtagctagctggccaaaggggagaagtatttgctgctggaaataagcaggaggggttcagggcggccaattggttaaatggaaaaaattgttgctgctgaaaataggcagtacctacctggctgaaggggaaa

SEQ ID NO: 53880 - DNA, 509 bp, Zea mays
  Clone ID: MRT4577_14913C.1
taggggccttttttttttttttttttctttttttttttttttttttttttttttttttttttttttttttttttttttttttttttttaaacaaaaacccccactattgcacaaacagggttcatcttaggggaaaacgccaactcatcatcccgacttgcctatgcaaggcaacgggaaaaaaaaaacacacatgcttctcgcagaatcaatcaatccacggacgaaccccctctccgatccaaaaaaaaaggaagttgcataacaaacccgttgaacttaattgccgggaacaaaattgggggcgaaagcccatgcgttgttgttgactgggccaacgatggggccagcgaggttctcaaggggccccttgccggggacaatggcctggacaaaaaacccaaacatggaaaacatggggagggggccgttcttgagctccttcaccttgagctcggaaaaggccccggggtcctcggccaggccaagggggtcaaaactgcccccag

SEQ ID NO: 53881 - DNA, 315 bp, Zea mays
  unsure (1)..(315): unsure at all n locations
  Clone ID: MRT4577_149140C.1
caacccttccctttttacccttggcgggtttttttaaaagaccgtgcgcctcctacaaacaaaaaaaaagaagatgagctactacggacaccaaaccaaatcggcttcccccctaacaaacctacccaaaaaaggactgctacccgccatcaaaaacccaacaaccggctaccccccgccggcgcagggctaaccaaacacaaggctacccggaacagggttacccacatcatgtctaccccccgcattacgcgcagccccctncacagcagcagcagaagcaacggccttccttcatggaaagatgcttggctg

SEQ ID NO: 53882 - DNA, 867 bp, Zea mays
  Clone ID: MRT4577_149141C.1
aagttaggggtacaatccagaattgagatgcccatggaaggatggggtgagatccgggtcatcaatgagcatgtccctcagtctgttcttccaagtctgtacaaagctgcaaatgcatttgtgctgccaacccgtggtgagggctggggcagaccggtggttgaagcaatggccatggaactgcctgtgattgtgactaattggtcaggtccaacagagtacctgactgaggagaatgggtatccattggatgtagacaggctgactgaggtgacggaagggccattcaagggccacctatgtgctgagccatcagttgctcggctgagggatttaatgagacatgtcgttgatgatagagatgaggcaaggaataaggggaagaaggcaagggaggacatgataaagaggttctctccagaagttgttgccaggattgttgctgaaaagatacaacaagtgcttatccacactcagttgacaaatgagtagatacaatgtgaaactagaaagttcatgcaccatggaattccacatatgacataagtcttgctgcgttgtggaggactgcaggtgtggaggatagcagctaggacatcaacaccttgtgctgtagtttttgactgcactatagcatctagaggacaacattgtgctttagtatgtagtatgacatttgagtagtgtgtgagaaataaacgaaaaattgtcccaactcgtagtatcatcctctcgatgagagtaggagtcttgttgcttacaacaacaatgttgattcttgttagagtacccatcaaggttttggggttagccccttgtaactaaaaaaaaaaaaaaaaaaaaaagggcggccgccaccgcggtgga

SEQ ID NO: 53883 - DNA, 406 bp, Zea mays
  Clone ID: MRT4577_149142C.1
ctattattgtagaccaacaagcatcatagaaagtggaatacagtagctgcggtggagcgacaatgaacagccaagatattgtccatccttatgctccttgctctttctgcatgtgttgctaacgcgaccatttttcctcaatactcacaagctcctatagctgcccttcttcccccataccttccatcaatgaccgcttgagggtgggaaaacccagcccttcaaccctacaggctccaacaagcaatcgcaacaagcaacttacctttatcacccctgttctttcaacaatcgccagccctatctttggggcagggattgggtcaaaccattagggcacaacagctgcagcaactagtgcgtccagtgatcaggcaagtagctctgtggaacctttctccctact

SEQ ID NO: 53884 - DNA, 344 bp, Zea mays
  Clone ID: MRT4577_149143C.1
tatttcagatgatataagcacaatggtgattgtcagcgtaatagtcagtgactccagcgtcctagcagaaattaagcaagtgggcttggcatcccaacccccggcccgtgcacctgctgtcctgttatttcctgaacagtgtcctcaccatctgcaaaatttgcaacttcagggagctccatagctgccggcgttttgctcttgcttcttgtggtcatgacgtgcttgtacatccgcaagagaaggcagtacaagatgacctcgtcctccaggttcctcgagcccactgcatccggcgggacgccgcgttccagaggtagcactgccatggagtccggcagcgt

SEQ ID NO: 53885 - DNA, 455 bp, Zea mays
  Clone ID: MRT4577_149144C.1
tattgagaccagatttcccatacaaagtagaatccattagcaacaatagagcaacaatggcgaccaagatattttccctccttatgctccttgctctttctacatgtgttgctaacgcgacaattttccctcaatgctcacaagctcctatagcttcccttcttcccccataccttccatcaattatagcttcagaatgtgaaaacccagctcttcaaccatatatgcttcaacaagcaatcgcagcaagcaacatacctttatcccccttgttgtttcaacaatcaaccagacctatctttggcgcagcaattggtacaaaccatcagggcacaacagctgcaacaactcgcgataactgtgatcaaacaagaaaatatgaacaaaactttctccatactctcagcatcaactattagcttccattaaaccaactgaaatacaatgaaacgatg

SEQ ID NO: 53886 - DNA, 425 bp, Zea mays
  unsure (1)..(425): unsure at all n locations
  Clone ID: MRT4577_149145C.1
accaccagtggggacaagganaacaacanggnngaccacagggggaangagaagaacaangccanngncngcaacaaaggccacnnngacaangaaannganangcncggccccgagacccacccnggcgncaagcgcancaccancaaaccccagacgaagcngggggngnnccccgagaccaacacnggcaacaaagnccnngcngaggggcgccngangaaccnngggggngcnacnggccancccagcnnngncangnccngcncaaacacnaaccagggcanngcccaacnngaaccgnggaaggagaagagcncnggcaagnnngagaagaaggggnnngngcnccccaagcacccngangagaaaggggcngnnnnncacnngggcaagcngggngccaagcngaccaagcnaaccaa

SEQ ID NO: 53887 - DNA, 369 bp, Zea mays
  Clone ID: MRT4577_149146C.1
ccacccgtccgattgagaccaacaagcatcattcaaagtgttttttagtaccaacaatcgagcatcagtggcgggcaatatattttcccttcttatgctccacgctctttccgcatgtgttgctaacgcgacaattttccctcaatgctcacaagctcctatagcttcccttcttcccacataccttccatcaatgatagcttcagtatgtgaaaacccagctcttcaaccctataggcttcaacaagcaattgcagcatgcaacatacctttatcacccttggttgaacaatctgcagccctatctttggtgcagtcattggtacaaaccatcacgtcacagtagctgcagcaactcttgctacctgt

SEQ ID NO: 53888 - DNA, 263 bp, Zea mays
  Clone ID: MRT4577_149147C.1
cacgggcattgcgagacgttcgtaggcaacggttacgtgaagcgagcatacttcgtcgggcccctatcgttgtcgccgtcaccatcatcgccggtggcagccggcggcggcgcctacggctcacggtgcatcgactggctggacaataaaccgccccagtccgtggtgtacttgtgcttcggtagcttgactcacgtctcagcggctcagtcacgtgagctagctcttgggctagacgcctccgagaagccattcctttgggt

SEQ ID NO: 53889 - DNA, 552 bp, Zea mays
  Clone ID: MRT4577_149148C.1
atggcgctccttggactccgagtctttcggctggctacccaccccattggcttgttccccgctgagaaggaggacgacccaatgtggaaggatcgggtggagcacgccaaggatatctgggccatctacccaggtcagactgcgcacttgacagtgatgcgcggtgaggcaatgtcccatctgatggcactactggaggcaacaaagatcacgctggataacagagaggagctcgtggttgatttatctcaagaaatggtggagaaggacttgcaggtggagcagctatccactgatattcaggaattggaggagctggtgggcaccagggagaacaccatcgaggtcctagaggatcagctcattaacactcagcggcagcttgttgaggctaacgagcacctggacatgcatcaccaggagatccaggaccaagaggccaacgaggacgtcgacatcgagggaggagatgagcctgcctccagtgtggacactgccggctcgggaagaccaccttcccctgagtcgagtgttgcttcgttcgctcactag

SEQ ID NO: 53890 - DNA, 375 bp, Zea mays
  Clone ID: MRT4577_149149C.1
cccactcgtacggaaagttttattttttatcaacaatagatcaacagtggcgggcaagatattttccatccttatgctccttgctctttctgcatgtgttgctaacgcgaccattttttctcaatactcacaagctcctatagctgcccttctttccccatacctaccatcaatgaccgctttagtatgtgaaaacccagccctttcaaccctacaggctccaacaagcaattgcaacatgcaacttacctttatcacccctgatctttcaacaatcgccagccctatctttggtgcagtcattggtacaaaccatcattgcacaacagcttcagctactcgtgcttccagtgatcagcccagttgcttcttgca

SEQ ID NO: 53891 - DNA, 862 bp, Zea mays
  unsure (1)..(862): unsure at all n locations
  Clone ID: MRT4577_14914C.1
gccggcccgggccggcatacccacacccacccacaaggagcagcaaacattgaccccgcaaactgtctgtagctagccacaacaggaacaaccttcatggcttctgctgctcctaaacctcatgtcatggtgctacccttgcccgcacaaggtcatgtcattccactcatggagttgtcccataggctagttgactatggattcaagattgacttcataaacaccgagttcaaccatgatcgtatcttcaagtccatgcaaaacaaaggagcaatcgtccctgagggcatacacatgatctccattccagatggtatggactctgctgatgatcgcacagacattggcaagatggtcgggggcttgtcggctgccatgctcggcccccttgaggagatgatcagaaccaggaagacaaaatgggtgatagcggacgtgtctatgagctgggtgctagaactgaccaacacagtgggagttcgtattgctctgttctcagcttactcagcatctgtgtttgcactaagaatgagactgcccaaactgatcgaggatggcgttattgacgaaagcgggaatgtgaaagtgcatgagatgatccaactgacgccacccattgattcaactgagatcccctgngtcagtctgggcagcaccgcagaaagacgcaaagtgaacatacagagggtcattaggactaaccgattgatagcgcttgctgaggccatcatctgcaacacgttcagagaagtagaacctgaagcgctgttggctctcctacccaacgcattacctgtaggtccactggtagtgccgatgtcaaagccgactactggtcatttttctcttgaagatctgacct

SEQ ID NO: 53892 - DNA, 326 bp, Zea mays
  unsure (1)..(326): unsure at all n locations
  Clone ID: MRT4577_149150C.1
tgattaagcgtagntagctcggcattacgctcgagatcgctcgctcggcagcagttgcctcgcagtntggatcatctcatacctcggcgtagatgagagagactctgcacatccagggagggcatgtggcaccagattggcgccagttctgggaggtggtgtgcgatgaacatggcattgacactaccgagcggtacactggcaattacgaccttcagtaggagcgtgttaatgtctactacaatgaagcatcctgcggacgctntgttcgacgcgctgttctcatggatcttgagcatgggacaatggacagtgtcgggaccgga

SEQ ID NO: 53893 - DNA, 2751 bp, Zea mays
  Clone ID: MRT4577_149151C.1
atgccacctgaccgagatattgagttcgccatcgaattgcaacccggggctgctcctatctccaagagaccctataggatgcctcccgcggaattggcagaattgaagaaacaattgcaagagttgttggacaaggggtttattcgcccaagcacttcaccatggggatgtccagcactatttgtgaagaaaaaggatgagagtttgaggatgtgtgttgactaccgtcctcttaatgcggtgactatcaagaacaaatacccgctgccccgtattgatgttctgttcgatcaattggttggagccaaggtattctccaagatagaccttcgctcaggataccatcagatcaagatccgtgccagtgacattcccaagacagctttctctaccagatatgggctggagatcaaattcttgggtcacacaatttctcaagatgggatatcagttgatcctgaaaaggtacaagaggtaatggattggaaacccccgactacagtgaagcagattcggagttttctgggactggcagggtattatcgacgatttattccggatttctccagaattgccaaaccaatgactgaactgttaaagaagggagtcaaatttgagtggagtcaaaagtgtgaagatgccttccataccttgaggcagcatttgacaacagccccagtgctagctcaacctgacaacaccaagccatttgaagtttattgtgatgcttctggtactggattgggatgtgtcttgatgcaagagagcagagtgattgcttatgcttctcgggcactcaggccccatgagcagaactaccctacacatgatctagaattggcagctgtagttcatgctcttaagatatggagacactacctgatgggagctcactgtaacatctacactgatcacaagagtctcaaatacatcttcactcaggcagatctaaacatgaggcaaaggaggtggttagagttgatcaaggattatgatttggaagtgcattaccatccagggaaggccaatgttgtggcagatgccttgagcagaaagacccagtgtaattgtatgggcatggatgtgggagtgaccaccctgtgtgatgagttgtgcaagctgaacttggaagttgtttcttcgggtaacctaagctatatctcggtggaacccacattgcaagagcagataatcagggcacaagttgaggataagggtgttcaggaccctgagctcagaaagaagatactagatgaagctcacctttccaaattctctatgcaccctggtagcaccaagatgtaccatgacctcagatctttatattggtggactagaatgaaaagagaaattgccaagtacatatctgaatgtgatacttgccagaggataaaggctagtcacttgaaggcagcaggccctttgcaaccccttcccataccatcttggaaatgggaggacatttgcatggactttatagtgggattacccaatacttctaggcaccatgattctatttgggttatcgtggacagattgaccaagactgctcatttcttgccagtgcataccacccacagggcagaaaagtacgctgaaatttacgttgatcagatagtaaggttgcatggtattcccaagaccattatatctgacaggggagcaccatttgtggcacgattttgggagcaattgcaagagtcacttgggacccatgtcatccgaagctcagcatatcacccccaaacagatggccagacagaaagggtgaatcaaattttggaagacatgttgcgagcatgtgcactacattatggaaaggattgggacaagtgtctgtctttggcggagttttcttacaataacagctatcagtccagtttgaagatggcaccttttgaggctttgtatgggagaaggtgcaggacaccactaaactggtctcaagcaggagaaagggaaatttttgggccagacttggtactcgaggcagaggcaaaggtatcacccaccaagggtgttcagagattcgggatcaagggcaagttagctcctcgctatattggaccctacgagatcaaggaggcttgtggacccgtggcctatcaagtggaattgccacctcacatgtcggcagttcataatgtgttccatgtatctcagctgtggaaatgtgttcgtctacccactgaagaactcccagaaccagaccttgagatagaaccagatttatcctaccaagagtaccccgtcaaggtgctagatcaaaaggaaagatcaactcgggcaaggtcaatccaaatgtataaggttcagtggagtcaccattcagcagaggaagctacatgggagactgaggattttctacgctctcgcttccccgactttctgcccaaaagagtctgtacgtaaccccaaaaccccacccccacctgccctttgaatacaattaaaagaaaaacttagataacaaggatagtctaagttgtggatttaacttaaaaaggacttccttctgaagttgcaaagagaatgacattcgaagagcagttaacgagagaaacttgagtataagaaggagtagcccatcaacgtgccttcgtagcaccctctagaggactctgcctaaaatctcgggacgagattcctttaaggggggagggctgtaacaccccaggtgttactcagggtgtccacccaggactaccccatttaacctattatcacatgtggattggtttgggcaaagtc

SEQ ID NO: 53894 - DNA, 622 bp, Zea mays
  Clone ID: MRT4577_149152C.1
tcgagcggccgcccgggcaggtacaagcttttttttttttttttttttttttttttgctttataaaatctggaaatgtaactctttatttctggttggccacatacatcatccaaaaaactttattattgaattacaactaataagcaatctaaaagagggcaccaccaatgatgtgttgttggtaggaggctgctgggtttgtcaaagcaagtcggacaaagggcaacatttgttgtagttgtaagagggttgcggggttagccgcaaactgctggtaaaaaggcagcaactgttgctgagtcaagaaggaaacacggcttgctgcatctagctggctaaatgggcttaatatttgctgctgcaaataagcatcggggttcaccgcggccaattggttaaatggaaaaacttgttgctgatgaaactaggcaggagctagctggctgaatggtaatacatgctgctgcaaataagcaccacggttcagtgtagatagtggcctgaatggaagaaattgttgttgctgatagaatggagaaaggtttgccatgactacttgggtgatccaggtagcacaagttgctgcacctgctgtgccttgatggtttgtacctcggccg

SEQ ID NO: 53895 - DNA, 244 bp, Zea mays
  Clone ID: MRT4577_149153C.1
cgctgctgctggtgtgaaatttgtgaccagggatctccggtgcctcctcggcttctcgctgctggtctggttctggatgcactggaaacatcaacgagaccgagagctgtttaactagggatgtgcattctcgaagtgcttgtattcgttggaaacctctagagctgctgttgtttatttggattcacatcttttgtcctaaaaaaaaaaagatgtgataggtggttggagaaaaaaagggcgg

SEQ ID NO: 53896 - DNA, 4788 bp, Zea mays
  Clone ID: MRT4577_149154C.1
atggctatctcccaagaggactgcattacagctagacaggcagagaagaagaggaagacccccgtggcaggaccctcagctcagccacagcgcttcaggattgtatccgacacccagggcaggggaccccagcagcaacaagggcgatgggtaatccgacctcagcagcagcagcaggcacccaaccgcaaccaatttccagcacagcggaataatcagcagcagcagtaccgccaagccaatgacaacaggtgcttcacttgtggcaacactgggcattatgccaagaattgccccagaaaccagcagaggcaggggcagaatgctaatcagaaccaaggcaagaggcagaaggtgcaagtgaggcaaggcaggctgaacttcaccaccatggctgatattccagagggagcacccgtcatgactggtatctttacagtattaaattttcctgctattgttctttttgattccggtgcttcacatagttttatcagtgccaagtttagtgccaaatgccagttgccctttcaccacaccgatgggggcattacaatttcaacaccaggaggcagggttgccacctatcaaatcaacagacacgtgcccataaagtttggtagtctaataattaaaaccaccctcctcattttggggttggatagtgtggatattatattgggaactgactggttaaccaggcatcgagcagttattgatattgcagccagggccattgaggtgcactcaccaacctgtggtgaaactacattatatttgcccgatcagggatgcacccgttcttgtgctttcgttatgatagattccccagtggaaaggatcccagtggtctgtgactacccagatgttttcccagatgaattgccaggaatgccacctgaccgagatattgagttcgccatcgaattgcaacccggggctgctcctatctccaagagaccctataggatgcctcccgcggaattggcagaattgaagaaacaattgcaagagttgttggacaaggggtttattcgcccaagcacttcaccatggggatgtccagcactatttgtgaagaaaaaggatgagagtttgaggatgtgtgttgactaccgtcctcttaatgcggtgactatcaagaacaaatacccgctgccccgtattgatgttctgttcgatcaattggttggagccaaggtattctccaagatagaccttcgctcaggataccatcagatcaagatccgtgccagtgacattcccaagacagctttctctaccagatatgggctgtatgagtttttggtgatgtctttcgggctgaccaatgccccggcttattttatgtacttgatgaactcagtattcatgccagagttagacaagttcgtggttgtttttattgatgatattttggtctattccaagaatgaagatgagcatactgagcacctgcacatcgtacttcaacgactgcgcgatcatcatctttatgctaagttgtccaaatgtgagttttggctgaaggagatcaaattcttgggtcacacaatttctcaagatgggatatcagttgatcctgaaaaggtacaagaggtaatggattggaaacccccgactacagtgaagcagattcggagttttctgggactggcagggtattatcgacgatttattccggatttctccagaattgccaaaccaatgactgaactgttaaagaagggagtcaaatttgagtggagtcaaaagtgtgaagatgccttccataccttgaggcagcatttgacaacagccccagtgctagctcaacctgacaacaccaagccatttgaagtttattgtgatgcttctggtactggattgggatgtgtcttgatgcaagagagcagagtgattgcttatgcttctcgggcactcaggccccatgagcagaactaccctacacatgatctagaattggcagctgtagttcatgctcttaagatatggagacactacctgatgggagctcactgtaacatctacactgatcacaagagtctcaaatacatcttcactcaggcagatctaaacatgaggcaaaggaggtggttagagttgatcaaggattatgatttggaagtgcattaccatccagggaaggccaatgttgtggcagatgccttgagcagaaagacccagtgtaattgtatgggcatggatgtgggagtgaccaccctgtgtgatgagttgtgcaagctgaacttggaagttgtttcttcgggtaacctaagctatatctcggtggaacccacattgcaagagcagataatcagggcacaagttgaggataagggtgttcaggttatcaaggatatgatcaagcaaaaggcagagaaatacaagtgtttccgacaggacagcaagggaattctatggtttggagatcgattggttgttcctaaggaccctgagctcagaaagaagatactagatgaagctcacctttccaaattctctatgcaccctggtagcaccaagatgtaccatgacctcagatctttatattggtggactagaatgaaaagagaaattgccaagtacatatctgaatgtgatacttgccagaggataaaggctagtcacttgaaggcagcaggccctttgcaaccccttcccataccatcttggaaatgggaggacatttgcatggactttatagtgggattacccaatacttctaggcaccatgattctatttgggttatcgtggacagattgaccaagactgctcatttcttgccagtgcataccacccacagggcagaaaagtacgctgaaatttacgttgatcagatagtaaggttgcatggtattcccaagaccattatatctgacaggggagcaccatttgtggcacgattttgggagcaattgcaagagtcacttgggacccatgtcatccgaagctcagcatatcacccccaaacagatggccagacagaaagggtgaatcaaattttggaagacatgttgcgagcatgtgcactacattatggaaaggattgggacaagtgtctgtctttggcggagttttcttacaataacagctatcagtccagtttgaagatggcaccttttgaggctttgtatgggagaaggtgcaggacaccactaaactggtctcaagcaggagaaagggaaatttttgggccagacttggtactcgaggcagaggcaaaggtcagggtgattaccaagaacttggaagctgctcaggctaggcaaaggagctatcatgataagaggcggaagcctctacagtttgaggtgggagatcatgtctatcttaaggtatcacccaccaagggtgttcagagattcgggatcaagggcaagttagctcctcgctatattggaccctacgagatcaaggaggcttgtggacccgtagcctatcaagtggaattgccacctcacatgtcggcagttcataatgtgttccatgtatctcagctgcggaaatgcgttcgtctacccactgaagaactcccagaaccagaccttgagatagaaccagatttatcctaccaagagtaccccgtcaaggtgctagatcaaaaggaaagatcaactcgggcaaggtcggtcaggatgtataaggttcaatggggtcaccattcagcagaagaagctacatgggagactgaggattttctacgctctcgcttccccgactttctacccaaaggagtcgactgtaatcttgctgacggagagtacatcctcgtgccggagcaaggagctgctcaggagtggactttacccctcacgcgacctgagacgaggtctctcattccggttatggtgggtacaagtgcggtcactgcacgacggccagtcggggtcagtgaggcattgtacgccaaggcgatgacttcccacggatcctccgatgatggaaatgcactgacccacactgacgggcttgcacgagagggctttccccgcattttgtgggaagtacttcagggggctggatacacgacaccccctcagtacgcggtgcagcagttcgagaagcaccgggtgccccgctgtagggtgaggatgaccttggagcctcatcccctgcagccaggctggcgctccttggactcagagtctttcgggtaccgggcagaggacacgatcgaggcgatcgctctgcatggattgactaccttctgcggattccatcccttggagctggctacccaccccattggcctgttccccgctgagaaggaggacgacccaatgtggaaggatcgggtggagcatgccaaggatatctgggccatctacccaggtcagactgcgcatttgacagtgcggtgcatgaatgctctgtaccgtctgcaggtgatgcgcggtgaggcaatgtcccacctgatggcactgctggaggcaaccaagatcatgctggataacagagaggagctcgtggttgacctatctcaggaaatggtggagaaggacttgcaagtggagcagctatccactgacattcaggagttggaggagctggtaggtaccagggagaacaccattgaggtccttgaggatcagctccttaacactcagcagcagcttgctgaggctaacgagcacctggacatgcaccaccaggagatccaggaccaggaggacaacgaggacgttgacattgagggaggggatgagcctgcctccagtgtggacactgctggctcgggaagaccaccttcccccgagtcaagtgttgcttcgttcgctcactag

SEQ ID NO: 53897 - DNA, 2226 bp, Zea mays
  Clone ID: MRT4577_149155C.1
ctcagcacccagcctccactattcacaagggcggaggacccacttgacgcagatgtatggctgcgagtggtggaatccaaatttccactgctccatggagtttgctcagaggtcaccaaagtcaggttcgccacccagcagcttcgcggacctgcaaggacttggtgggatcactttcttgctatgcagccagaggaccgagaggtggagtggagggagtttaaggcagcttttagaggacaccatatacccgccgggatcatggacaggaagctcaatgagtttttggcactcactcagggcaacaggacagtgttgcagtatgctcaggcctttaatgacttgtgccagtatgcgggatatcatgctgatacagatgagaagaagagggacagattcagaagggggctcagcactaagctccgggatcgtctcaacaccgtcagggccaacagctacaatgagttggtcaacatggctatctcccaagaggactgcattaaagctagacaagcagagaagaagaggaagacccccgtggtaggaccctcagctcagccacagcgcttcaggattgtatccgacacccagggcaggggaccccagcagcaacaagggcgatgggtaatccgacctcagcagcagcagcaggcacccaaccgcaaccaatttccagcacagcggaataatcagcagcagcagtaccgccaagccaatgacaacaggtgcttcacttgtggcaacactgggcattatgccaagaattgccccagaaaccagcagaggcaggggcagaatgctaatcagaaccaaggcaagaggcagaaggtgcaagtgaggcaaggcaggctgaacttcaccaccatggctgatattccagagggagcacccgtcatgactggtatctttacagtattaaattttcctgctattgttctttttgattccggtgcttcacatagttttatcagtgccaagtttagtgccaaatgccagttgccctttcaccacaccgatgggggcattacaatttcaacaccaggaggcagggttgccacctatcaaatcaacagacacgtgcccataaagtttggtagtctaataattaaaaccaccctcctcattttggggttggatagtgtggatattatattgggaactgactggttaaccaggcatcgagcagttattgatattgcagccagggccattgaggtgcactcaccaacctgtggtgaaactacattatatttgcccgatcagggatgcacccgttcttgtgctttcgttatgatagattccccagtggaaaggatcctagtggtctgtgactacccagatgttttcctagatgaattgccaggaatgccacctgaccgagatattgagttcgccatcgaattgcaacccggggctgctcctatctccaagagaccctataggatgcctcccgcggaattggcagaattgaagaaacaattgcaagagttgttggacaaggcactatttgtgaagaaaaaggatgagagtttgaggatgtgtgttgactaccgtcctcttaatgctgtgactatcaagaacaaatacccgctgccccgtattgatgttctgttcgatcaattggttggagccaaggtattctccaagatagaccttcgctcaggataccatcagatcaagatccgtgccagtgacattcccaagacagctttctctaccagatatgggctgtatgagtttttggtgatgtctttcgggctgaccaatgccccggcttattttatgtacttgatgaactcagtattcatgccagagttagacaagttcgtggttgtttttattgatgatattttggtctattccaagaatgaagatgagcatactgagcacctgcacatcgtacttcaacgactgcgcgatcatcatctttatgctaagttgtccaaatgtgagttttggctgaaggagatcaaattcttgggtcacacaatttctcaagatgggatatcagttgatcctgaaaaggtacaagaggtaatggattggaaacccccgactacagtgaagcagattcggagttttctgggactggcagggtattatcgacgatttattccggatttctccagaattgccaaaccaatgactgaactgttaaagaagggagtcaaatttgagttgagtcaaaagtgtgttaaagacttccatagtagaggcagcctctga

SEQ ID NO: 53898 - DNA, 1014 bp, Zea mays
  Clone ID: MRT4577_149156C.1
gcgaccgcgcggcgccggtccctgtcccggtcccggccctggcgcccgccgtgtccgtgcagagctgggccgagcgcgggtactccgttgtcaccgtgcagtgcggcgaccggcccaagctgctgttcgacgtggcgtgcacgctccacgacatggactacgtcgtgttccacggcaccgtggacaccgcggccggccgcgcgcgccaggagttctacatccggcgcgccgacggcagccccatccggtccgaggccgagcgcgaggttctcacccaccgcctccaggcagccatcgagcggaggtcgctggagggcgtgaggctggagctgtgcgcgccggaccgggcgggcctgctgtcggaggtgacgcggacgttccgcgagaacgggctgctggtggcgcaggcggaggtgtcgacgaagggcgaccaggcgtgcaacgtgttctacgtgacggacgccgccggcaaggcgccggaccggggcgccatcgacgccgtcagggagagggttggcgcggaccgcctcgtggtgagcgaggagccccgcccgccgcagcagcagctgtacccggacgcctccgggccaggcagcggcggcggcggtggcctcgggctggtatacctcggcaacctcgtgaggaggaacctgtacaacctcggcctcatcaaatcgtgctcgtgaaggccggccgggtgctcgggtcgagacccgcgtcgtggaggggacggacggacacgcgccattgctctgtgtacgtactgtattgtacatacagggcaccgacgtcggtcgtcagatccagtgaccggcaccgacgccgtggcgtggagcaggatggctagccgtacgtagagaaactctgtagccgtgtactgtactgtagatagacaaaaccgtcgctggcagtggtagggggttgcattcatcgtgcgtgggacgattcgttatttattactgtacctgttattctttccgttcgttgggtaaccacacctctctctctttgctc

SEQ ID NO: 53899 - DNA, 5417 bp, Zea mays
  Clone ID: MRT4577_149157C.1
caaatacaataaagcataaaaccatacatgccataatgttaaattattacaccaccatcatcatcatcggagtttttgcaaaagtatccatcattgttcgaagtgcagcggaataaaactaacggtaaataaacggagagatggggaagcctgtcccatcactcctcatgctcctcctcagccgaggcaggatcccactcgacagtccaacccggtggcagggtggtcggccaagtaatcccagcaaccatctcctccagagaaccttccaaagcagtggcaggcaggtcctctggtgcaggctcgggtgctggatctggggctacctcctgagcagctccttgctccggcacgaggatgtactctctgtcagcaagattacagtcgactcttttgggcagaaagtcggggaagcgagagcgtagaaaatcctcagtctcccatgtagcttcttctgctgaatggtgactccactgaaccttgtacattctgaccgaccttgcccgagttgatctctccttttgatctaataccttgacggggtactcttggtatgacaagtctggttctatctcaatatctggttccggtagcacttcagtgggtaggcgaacacatttccgcagctgagatacatggaacacattatgaactgctgacatgtgaggtggtaattccaattggtaggctacgggtccacagcttgccttgatcttatagggtccaatgtagcgaggagctaacttgcccttgatcccgaatctctggacacccttggtgggtgataccttaagatagacatgatctcccgcctcaaactgtagaggcttccgcctcttatcatgatagctcctttgcctggcctgagcaacttccaagttcttggtaataactctgacttttgcctctgcctcgagtactaaatccggcccaaaaatttccctttctcctgcttgagaccagtttagtggggtcctacaccttctcccatataatgcctcaaaaggtgccatcttcagactggactgatagctgttattgtaagaaaactcctttctgtctggccatctgtttgtgggtgatatgctgagcttcggatgatttgggtcccaagtgattcttgcagcttctctcaaaagcgtgccacgaatagtgctccttatctgatcaacataaatttcagcgtacttctctgtcttgtgggtggtgtgcactggcaagaaatgagcagtcttggtcaacctgtccacaataacccaaatagaatcatggtgcctggaggtattgggtaatcccactatgaagtccatgcaaatgtcctcccatttccaagatggtatgggaaggggttgcaaagggcctgctgccttcaagtgactagctttaattctctggcaggtgtcacactcggatatgtacttggcaatttctcttttcattctagtccaccaatatagagatctgagatcatggtacatcttgttgctaccagggtgcatggagaatttggagaggtgagcttcatctagtatcttctttctgagctcagggtccttgggaacaaccaatcgatctccaaaccatagaattcccttgctgtcctgtcggaaacacttgtatttttctgccttttgcttaatcatatccttgataacctgaacacccttatcctcaacctgtgccctgactatccgttcttgcaacgtgggctccaccgagatatagcttaggttacccgaagaaacaacttccaggttcagcttgcacaactcatcacacagggtggtgactcttgcatccatactcatacaattgcactgggcctttctgctcaaggcatctgccacaacattggccttaccagggtggtaatgcacttccaaatcatagtccttgatcaactctaaccatctcctttgcctcatgttcagatctgcctgagtgaagatgtatttgagactcttgtgatccgtatagatgttacagcgagctcccatcaagtagtgtctccatattttaagagcatccactacagctgccaattctagatcatgtgtagggtaattctgctcatggggcctgagtgctcgggaagcataagcaatcactctattctcttgcatcaagacacatcccaatccggtaccggaagcatcacaataaacttcaaatggcttggtgttgtcaggttgggccagcactggggctgtcgtcaaatgctgcctcaaggtatgaaaggcatcttcacacttttggctccactcaaatttgactcccttcttcaacagtttagtcattggtttggcaatccctgccaaacccagaaaacttcgaatctgccttactgtagccgggggtttccaatccattacctcttgcaccttctcaggatcaactgatatcccatcctgagaaattgtgtgacccaagaatttgatttccttcagccagaactcacacttagacaacttagcatacaactgatggtcacgcagtctctgaagtacagtatgcaaatgtttggtgtgctcggcttcattcttggaataaaccagaatgtcatcaatgaaaacgaccacgaacttgtctaactctggcataaatattgagttcatcaagtacatgaaataagccggggcattggtcagcccgaaagacatcaccaaaaactcatacagcccatatctggtagaaaaggtcgtcttgggaatatcgctggcacggatcttgatttgatggtaacctgagcgaaggtctatcttggagaataccttggctcctaccaactgatcaaacagaacatcaatacggggcagtgggtatttgttcttgatagtcaccgcattgagagggcggtagtcaacacacattctcaaactctcatcctttttcttcacaaataaagctggacatccccatggtgaagtacttgggcgaataaaccccttgtccaacaactcttgcaattgcttcttcaattctgccaattccacgggaggcatcctatagggtctcttggagataggagcgatctcgggttgcaattcgatggcgaactcaatatctcggtcaggtggcatccctggcaattcatccggaaaaacatccgggtagtcacggaccactgggatcttttccactggggactctatcataacaaaggcacaagaacgggtgcatccctggccaggtaaatacaaaacagtctcgccataagcaggggaatgaatttcaatggccctggctgcaatatccaatactgcctgatgcctggtcaaccagtcagctcccaatataatatccacgctatccaatcctaagatgagaagggtggttctaatcacaaggctaccgaattttataggcacttgcctgttgatttgataagtggcaaccctgcctcctggggttgaaattgtaatgcccccatcggtgtggtgaaagggcaactggcacttggcactaaatttggcactgataaaactatgtgatgcaccagaatcaaatagaataatagcaggataattcaaaactgtaaagataccagtcatgacgggtgctccctcgggaatatcagccatggtggtgaagttcagcctgccctgcctcacttgcaccttctgcctcttgccttggttctgattgacattctgcccctgcctctgctggttctgctgctgctgctggttggtcctctgagctggaaactgggtacggttgggtgcctgctgctgttgctgctgtggtcggatcacccatctcccttgctgttgttggggtcccctgttctgagtgtcggacacaatcctgaagcgttgtggctgagctgaaggtcctgccacaggggtcttcctcttcttttctgcctgtcgagctgtaatgcagtcctcctgggagatagccatgttgaccaactcattgtagctgttggccctgacggtgttgagacggtcacggagcttagtgctgagccccctcctgaacctgtctctcttcttctcatctgtatctgcgtggtatcccgcatactggcacaagtcattaaaagcctgggcatactgcaacactgtcctgttgccctgagtgagtgccaaaaactcattgagcttccggtccataatcccggctggtatatggtgtcccctgaaagctgccttgaactccctccattccacctctcgatcctctggctgcatggcaagaaaatggtcccaccaagtccttgtgggtccgcgaagctgctgggtgacgaacctgactttggtaacctctgagcaagctccatggagtagcgggaatttggattccaccactcgcaaccacacatctgcatcaagtgggtcctctgccctggtgaacaatggaggctgggtactaaggaactcctggtaggtagctgccgcggggtgacgctgatggtctccaccaccatagtgctgaggtggtggctgacgctgagctagctgcctcaaaatctcattctgctgagccatgagctcctgcagagtgggaggtggtggcggcggtggaggaacgcgctcgttctggcccgacgctgcctcccggccatttgactcgggggaaggtggtctccctgagccagcagtgtccacactagaggcaggctcctctcctccctcgatgtcgacgtcctcgttggcctccatgtcctggatctcctgatgatgcatgtccaagtgctcattagcctcggcaagctgctgctgggtgttaatgagctgatcctcgagaacttctatggtgttctccctggtgcccactagctcctccaactcttggatatcagtggatagctgctccacctgcaagtccttctccaccatttcagtggacaaatcaaccacgagctcctctctgttgtccaacgtaatctttgttgcctccagcagtgccatcagatgggacatcgcctcaccgcgcatcacctgcagacggtacagagcattcatgcaccgtacggtcaagtgcgcagtctgtcctgggtagatggcccagatatccttggcatgctccacccgatccttccacattgggtcgtcctccctctcggtggggaacaagccaatggggtgggtagccagctccaaaggatggaatccgcagaaagtggtcaacccatgcagagcgattgcctcgatcgtgtcctcagctcggtatccaaaagactcggagtccaaggagcgccagcctgactgcaggggatgaggctccaaggtcatcctcaccctacagcgaggtactcggtgcttctcgaactgctgcaccgcgtactgagggggtgtcatgtatccggccccctgaagtacctcccacaaaatgcggggaaagccctctcgtgcaagtccgtcagtgtgagacagtgcattcccgtcgtctgaggatccgtgggaagtcat

SEQ ID NO: 53900 - DNA, 284 bp, Zea mays
  Clone ID: MRT4577_149158C.1
ctgacgggtctccaccaccctgttggtcaagctacctgctccagccccgcactccggttaaagctagctaaggaaacagggcctaagtcagctccagaaaaaaaaaaggaaccgcatgtaggagggggacgctcgagcatacctatgacaagacgcccatcaagcgccttgaggccatttaggagacttgccaccagcactacccatctgacactagcaacgatgagcaatgactcgcgggcatacgccggattgacttctcctcggtcatagagaaggatgca

SEQ ID NO: 53901 - DNA, 3435 bp, Zea mays
  Clone ID: MRT4577_149159C.1
atgacttcccacggatcctccgatgaaggaaatgcactgacccacactgacggacttgcacgagagggctttccccgcattttgtgggaggtacttcagggggctggatacacgacaccccctcagtacgcggtgcagcagttcgagaagcaccgggtgccccgctgtagggtgaggatgactctggagcctcatcccctgcagccaggctggcgctccttggactcagagtctttcgggtaccgggcagaggacacgatcgaggcgatcgctctgcatggattgactaccttctgcgggttccatcccttggagctggctacccatcccattggcttgttccccgctgaaaaggaggacgacccaatgtggaaggatcgggtggagcatgctaaggacatctgggccatctacccaggtcagactgcgcacttgacagtacggtgcatgaatgctctgtaccgtctgcaggtgatgcgcggtgaggctatgtcccatctgatggcactgctggaggccaccaagatcacgttggataaccgagaggagcttgtggtcgacttgtctcaagaaatggtagagaaagatttgcaagtggagcagctgtctggtgagattcatgagttggaggagctagtgggcacccgggagaacaccattgaggtcctagaggatcagctcctcaacactcagcagcagctggcagaagcaaatgagcacctggacatgcaccaccaggagatccaggaccaggaggccaacgaggacgtcgacatcgagggaggagacgagtctgcttccattggagtctatgcggtaactataaagaacaaatacccgctgccccgcattgatgttctgtttgatcaattggttggagccaaggtattctccaagatagaccttcgctcgggatatcatcagatcaagatccgtgccagcgatattcccaagacagctttctctaccagatatggactgtatgagtttctggtgatgtcttttgggctgaccaatgccccggcttatttcatgtacttgatgaactcagtgtttatgccagaattggataagttcgtggtcgtcttcattgatgatattctggtctattccaagaatgaagacgaacatactgagcacctacacattgtgcttcaacggctgcgcgatcatcatctttatgctaagttgtctaagtgtgagttctggctgacggagattaaattcttgggtcacacaatctcacaggatgggatatcagttgatcctgaaaaggtacaagaggtaatggattggaaacccccgactacagtgaagcagattcggagttttctgggactggcagggtattatcgacgatttattccggatttctccagaattgccaagccaatgactgaactgttgaagaagggagtcaaatttgagtggagccaaaagtgtgaagatgccttccataccttgaggcagcatttgacaacggccccagtgctagctcaacctgacaacaccaagccatttgaagtttattgtgatgcttctggtactggtttgggatgtgtcttgatgcaagagaacagagtgattgcttatgcttcccgagcactcaggccccatgagcagaactaccctacacatgatctagaattggcagctgtagttcatgctcttaagatatggagacactacctgatgggagctcactgtaacatctacactgatcacaaaagtctcaaatacatcttcactcaggcagatctgaacatgaggcaaaggaggtggttagagttgatcaaggattatgatttagaggtgcattaccatccagggaaggccaatgttgtggcagatgccttgagcagaaaggcccagtgtaattgtatgagcatggatgtgggaatgaccaccctatgtgatgagttgtgtaagctgaacctggaagttgtttcttcgggtaacctaagctatatctcggtggagcccacattgcaagaacaaatagtcagggcacaggttgaggataagggtgttcaggttatcaaggatatgatcaagcaaaaggcagaaaaatacaaatgtttccgacaggacagtaagggaattctatggtttggagatcgattggttgttcccaaggaccctgagcttagaaagaagatactggacgaagctcacctttccaaattctccatgcaccctggtagcaacaagatgtatcatgatctcagatctctatattggtggactagaatgaaaagggaaattgccaagtacatatccgagtgtgatacttgtcagaggataaaggctagtcacttgaaggcagcaggccctctgcaaccccttcccataccatcttggaaatgggaggacatttgcatggactttatagtgggattacccaatacctccaggcaccatgattctatttgggttatcgtggacagattgaccaagacggcccatttcttgccagtacacaccacccacaagaccgagaagtatgctgaaatttatgttgatcagatagtgagattgcatggtattcccaaaaccattatatctgacagaggagcactgtttgtggcacgcttttgggaaaaactgcaagaatcgcttgggacccatgtcatccgaagctcagcataccacccacaaacagatggccagaccgaaagggtgaatcagattttggaagacatgttgcgagcatgtgcactacattacgggaaggattgggacaagtgtctgtctttggcagagttttcgtacaataacagctaccagtccagtctgaaggtggcaccttttgaggcattatatgggagaaggtgtaggaccccactgaattggtctcaagcaggagaaagggaaatttttgggccagacttagtactcgaggcagaggcaaaggtcagggtcattaccaagaacttggaagctgctcaggccaggcaaaggagctatcatgataagaggcggaagcctctacaatttgaggtgggagatcctgtctatcttaaggtatcacccaccaagggtgttcagatattcgggatcaagggcaagttagctcctcgctacattggaccctatgagatcaaggcaagttgtggacccgtagcttaccaattggaattgccacctcacatgtcagcagttcataatgtgttccatgtatctcagctgcggaaatgcgttcgtctacccactgaagtactcccggaaccagacattgagatagaaccagatttatcctaccaagagtaccccgtcaaggtattagatcaaaaggagagatcaactcgggcaaggacagtaagaatgtataaggttcagtggagtcaccattcaacagaagaagctacatgggagactgaggattttctacgctctcgcttccccgactttctacccaaaggagtcggtatgtaa

SEQ ID NO: 53902 - DNA, 427 bp, Zea mays
  Clone ID: MRT4577_14915C.1
ctgacattgccatctactgatctgaaacctccgaatttcgaaggacaccaggggagctggaggtgccacagcaacgcgctcatgcttggctgagggaacatgcgcggtgcgcatgatgaaggacaaggggcgatcgccgtggtgcgattggtgctgctggctgctggacggactctgtgaggctggaggcagctgtctgcctgtggaccggcgtcatggccaacttcctttgctacacaccttagccatggctatcgagctctgcctcatcttctgcaactgcggcaggagcttgaccaacgacttccactgcacgtagatgagcagtcacgcatgtatttgtctgagacatcgccggccggccgagggtgatcgacattattccgttctgcttaattgttgatcgatggggttcttgctgtcagta

SEQ ID NO: 53903 - DNA, 987 bp, Zea mays
  Clone ID: MRT4577_149160C.1
atggccgggaggcagcgtcgtggccagaacgaacgcgttcctccaccgccgccaccacctcccactctgcaggagctcatggctcagcagaatgagatcctgaggcagctggctcagcgtcagccaccaccccagcattatggtggtggagaccaccagcgtcaccccgcggtggccacctatcaggaattcctcagcacccagcctccactattcacaagggcggaggacccacttgacgcagatgtatggctgcgagtggtggaatccaaatttccactgctccatggagtttgctcagaggtcaccaaagtcaggttcgccacccagcagcttcgcggacctgcaaggacttggtgggatcactttcttgctatgcagccagaggaccgagaggtggagtggagggagtttaaggcagcttttagaggacaccatatacccgccgggatcatggacaggaagctcaatgagtttttggcactcactcagggcaacaggacaatgttgcagtatgctcaggcctttaatgacttgtgccagtatgcgggatatcatgctgatacagatgagaagaagagggacagattcagaagggggctcagcactaagctccgggatcgtctcaacaccgtcagggccaacagctacaatgagttggtcaacatggcttttttccccaagaggactgcattaaagctagacaagcagagaagaagaggaagacccccgtggggaccccagcagcaacaagggcgatgggtaatccgacctcagcagcagcagcaggcacccaaccgcaaccaatttccagcacagcggaataatcagcagcagcagtaccgccaagccaatgacaacaggtgcttcacttgtggcaacactgggcattatgccaagaattgccccagaaaccagcagaggcaggggcagaatgctaatcagaaccaaggcaagaggcagaaggtgcaagtgaggcaaatttaa

SEQ ID NO: 53904 - DNA, 355 bp, Zea mays
  Clone ID: MRT4577_149161C.1
gggacaagggacaaactgacatcgactttggcaacagccttttagctgggggttcaccatgaacttaaacgggcgggccgggttctgcaaccttgggttcgcagtttccccacaacaaaactgaaatgcttgggggggagacacaacacaaccccccaagagcgggcaagccgcacatttttttaagctttgctttggggggccattttccccaaaacataagtaccaccaaaaatcctggggggggggacccaggaacccaacagcccccgtttttattcaaaagaagaaaaccccccggttttaagctgaaccatcaccggtttaaaagcaaagttaccgccccatccttttt

SEQ ID NO: 53905 - DNA, 316 bp, Zea mays
  Clone ID: MRT4577_149162C.1
agcacaccgtgtggcggcacggcgcgccgccctcgtacgacgccgtgaacgcgctcttcgaggccgagcgcacgcaggagtggccggcggggtcgctggaggagatcgtgcagaacgcgatcaagacgtgggagatggagctgtcgcacaaggcgcggctgtcggacttcaagtccgtgagccccggcaggttcaggctgtccgtgaacggcgggcgggcccggagcggggaggagacgctggccgtgggcagctacaacgcgctgctggacagcccgctcctggcgcgcgcgggcgcgtacgacgcctccgccga

SEQ ID NO: 53906 - DNA, 5034 bp, Zea mays
  Clone ID: MRT4577_149163C.1
ttacataccgactcctttgggtagaaagtcggggaagtgagagcgtagaaaatccttagtctcccatgtagcttcttctgctgaatggtgactccactgaactttatacattctgaccgaccttgcccgagttgatctctccttttgatctaataccttgtcggggtactcttgataggataagtctggttctatctcaaggtctggttccggtagcacttcagtgggtaggcgaacacatttccgcagctgagatacatggaacacattgtgaactgctgacatgtgaggtggcaattccaattggtaggccacgggtccacaacttgctttgatctcatagggcccgatgtagcgaggagctaacttgcccttgatcccgaatctctggacacccttggtgggtgataccttaagataaacatggtctcccacctcaaactgtagaggcttccgcctcttgtcatgatagctcttttgcctagcctgagcagcttctaagttctttgtaataactctgaccttttcctctgcttcaagtaccaaatctggcccaaaaatttccctctctcctgcttgagaccaattcagtggggtcctacaccttctcccatataatgcctcaaaaggtgccatcttcagactagactgatagctgttattgtaagaaaactctgccaaagacagacacttgtcccaatcctttccgtagtgtagtgcacatgctcgcaacatgtcttccaaaatctgattcaccctttctgtctggccatctgtttgtggatggtatgctgagcttcggattacttgtgtcccaagtgattcttgtagcttctcacaaaagcgtgccacaaacagtgctcctctgtcggatataatggtctttggaataccatgcaatcttactatctgatcaatgtaaatttccgcatacttttctgtcttgtgggtggtgtgtactggcaagaaatgagcggtcttggtcaacctgtccacaataacccaaatagaatcatggtgcctggaggtattgggtaatcctacgataaaatccatgcaaatgtcctcccatttccaagatggtatgggaaggggttgcaaagggcctgctacctttaagtgactggccttgattctctggcaggtgtcacactcggatatgtactcggcaatttccctcttcattctggtccaccaatatagagatctgagatcatggtacatcttgttgctaccagggtgcatggagaatttggaaaggtgagcttcatccagtatcttctttctgagctcagggtccttgggaacaaccaatcgatctccaaaccatagaattcccttgctgtcctgtcggaaacacttgtatttttctgccttttgcttgatcatatctttgataacctgaacacccttatcctcaacctgtgccctgactatagggtggtaactcccacatccatgttcatacaattgcactgggcctttctgctcaaagcatttgagactcttgtgatcagtgtagatgttacagtgagctcccatcaagtagtgtctccatatcttaagagcatgaactacagctgccaattctagatcatgtgtagggtagttctgctcatggggcctgagtgctcgggaagcataagcaatgactctgttctcttgcatcaagacacaccccaatcctgtaccagaagcatcacaataaacttcaaatggcttggtgttgtcaggttgagccagcactggggctgttgtcaaatgctgcctcaaggtatgaaaagcatcttcacacttttggctccactcatacttgactcctttcttcaatagttcagtcattggtttggcaatccctgccaaacccagaaaacttcgaatctgccttactgtagccgggggtttccaatccattacctcttgcaccttctcaggatcaactgatatcccatcctgagaaattgtgtgacccaagaatttgatttccttcagccagaactcacacttagacaacttagcatacaactgatggtcacgcagtctctgaagtacagtatgcaaatgtttggtgtgctcggcttcattcttggaataaaccagaatgtcatcaatgaaaacgaccacgaacttgtctaactctggcataaatactgagttcatcaagtacatgaaataagccggggcattggtcagcccgaaagacatcaccaaaaactcatacagcccatatctggtagaaaaggtcgtcttgggaatatcgctggcacggatcttgatttgatggtaacctgagcgaaggtctatcttggagaataccttggctcctaccaactgatcaaacagaacatcaatacggggcagtgggtatttgttcttgatagtcaccgcattgagagggcggtagtcaacacacattctcaaactctcatcctttttcttcacaaataaagctggacatccccatggtgaagtacttgggcgaataaaccccttgtccaacaactcttgcaattgcttcttcaattctgccaattccacgggaggcatcctatagggtctcttggagataggagcgatctcgggttgcaattcgatggcgaactcaatatctcggtcaggtggcatccctggcaattcatccggaaaaacatccgggtagtcacggaccactgggatcttttccactggggactctatcataacaaaggcacaagaacgggtgcatccctggccaggtaaatacaaaacagtctcgccataagcaggggaatgaatttcaatggccctggctgcaatatccaatactgcctgatgcctggtcaaccagtcagctcccaatataatatccacgttatccaatcctaagatgagaagggtggttctaatcacaaggctaccgaattttataggcacttgcctgttgatttgataagtggcaaccctgcctcctggggttgaaattgtaatgcccccatcggtgtggtgaaagggcaactggcacttggcactaaatttggcactgataaaactatgcgatgcaccagaatcaaatagaataatagcaggataattcaaaactgtaaagataccagtcatgacgggtgctccctcgggaatatcagccatggtggtgaagttcagcctgccctgcctcacttgcaccttctgcctcttgccttggttctgattgacattctgcccctgcctctgctggttcctggggcaatttttggcataatgcccggtgttgccacaggtgaaacacctgttatcatttgcctggcggtactgctgctgctgctggttggtcctctgagctggaaactgggtacggttgggtgcctgctgctgttgctgctgtggtcggatcacccatctcccttgctgttgttggggtcccctgttctgagtgtcggacacaatcctgaagcgttgtggctgagcggaaggtcctgccacaggggtcttcctcttcttttctgcctgtcgagctgtaatgcagtcctcctggaagatagccatgttgaccaactcattgtagctgttggccctgacggtgttgagacggtcatggagcttagtgctgagccccctcctgaacctgtctctcttcttctcatctgtatccgcgtggtatcccgcatactggcacaagtcattaaaagcctgggcatactgcaacactgtcctgttgccctgagtgagtgccaaaaactcattgagcttccggtccataatcccggctggtatatggtgtcccctgaaagctgccttgaactccctccattccacctctcgatcctctggctgcatggcaagaaaatggtcccaccaagtccttgtgggtccgcgaagctgctgggtgacgaacctgactttggtaacctctgagcaagctccatggagtagcgggaatttggattccaccactcgcaaccacacatctgcatcaagtgggtcctctgccctggtgaacaatggaggctgggtactaaggaactcctggtaggtagctgccgcggggtgacgctgatggtctccaccaccatagtgctgaggtggtggctgacgctgagctagctgcctcaaaatctcattctgctgagccatgagctcctgcagagtgggaggtggtggcggcggtggaggaacgcgctcgttctggcccgacgctgcctcccggccatttgactcgggggaaggtggtctccctgaaccagcagtgtccacactagaggcaggctcctctcctccctcgatgtcgacgtcctcgttggcctccatgtcctggatctcctgatgatgcatgtccaagtgctcattagcctcggcaagctgctgctgggtgttaatgagctgatcctcgagaacttctatggtgttctccctggtgcccactagctcctccaactcttggatatcagtggatagctgctccacctgcaagtccttctccaccatttcagtggacaaatcaaccacgagctcctctctgttgtccaacgtaatctttgttgcctccagcagtgccatcagatgggacatcgcctcaccgcgcatcacctgcagacggtacagagcattcatgcaccgtacggtcaagtgcgcagtctgtcctgggtagatggcccagatatccttggcatgctccacccgatccttccacattgggtcgtcctccctctcggtggggaacaagccaatggggtgggtagccagctccaaaggatggaatccgcagaaagtggtcaacccatgcagagcgattgcctcgatcgtgtcctcagctcggtatccaaaagactcggagtccaaggagcgccagcctgactgcaggggatgaggctccaaggtcatcctcaccctacagcgaggtactcggtgcttctcgaactgctgcaccgcgtactgagggggtgtcatgtatccggccccctgaagtacctcccacaaaatgcggggaaagccctctcgtgcaagtccgtcagtgtgagacagtgcattcccgtcgtctgaggatccgtgggaagtcat

SEQ ID NO: 53907 - DNA, 594 bp, Zea mays
  Clone ID: MRT4577_149164C.1
atgaccttggagcctcatcccctgcagccaggatggtgctccttggactccgagtctttcgggtaccgagcagaggacacgatcgaggcgatcgctctgcatggattgactactttctgcggattccatcccttggagctggctacccaccccattggcttgttccctgctgagaaggaggacgacccaatgtggaaggatcgggtggagcatgccaaggacatttgggccatctacccaggacagactgcgcacttgacagtacggtgcatgaatgctctataccgtctgcagccagaggaccgtgaggtggagtggagggagttcaaggcagcctttagaggacaccatataccagccgggatcatggataggaagctcaatgagtttttggcactcactcagggcaacaggacagtgttgcagtatgcccaggcctttaatgacttgtgccagtacgcgggatatcatgcagatacagatgagaagaagagggacagattcaggagggggctcagcactaagctccgggatcgtctcaacaccgtcagggccaacagctacaatgagttggtcaacatggctatctcctag

SEQ ID NO: 53908 - DNA, 698 bp, Zea mays
  Clone ID: MRT4577_149165C.1
cattgggacctcgagccggccgggatagcctttggatagttgaatccatcagcatccgaccttattttatctctgcgcacagtttgctcattcgtcgcactgggagggcgagagcaatctcggatctcctccactgctcaccatctaggtagcacttgcactcgcaacatgtgctcccagtcactgcaagcgcgagacaggtgcgcacgagaggagccccaatagaccagcggtccctctcttctcctgctctctcgtttctgttcgaatagacgattgctgcattgggtcgggtgccttgtgacacgaggatcatcatggtcctccctgatataaaatgatacatatgacgggactggggacacgatcgtacgaacgacagcgaggcattcggaaaagtggttgacaactacttatgccctgcttgtggagctctcaacacaagggtgacagcctacgagacgggaggctccaagaacgcgaacgccatcgatgccagaaatgcaaggaaggaggagctgaagaacgacgagatcatggggaaagacttgcctattgtcatcgtcgaccggatcatcaacttgagtggactgtacttctacctcagacatgtctacagctaaacgacgaatagatccgtttgaaagacttgaacatgattcatgccattttgcagtgttattcactatgttaatagt

SEQ ID NO: 53909 - DNA, 138 bp, Zea mays
  Clone ID: MRT4577_149166C.1
ggaacactgccaggtgttagttgcatctcgtccatcgaaacgtataaattggggaaagacacggagaatggcataccacctttacacaccacattgacctaccttatggccaaggtccacaaactaacgactcaattc

SEQ ID NO: 53910 - DNA, 323 bp, Zea mays
  Clone ID: MRT4577_149167C.1
aaaaactcacgcaattgtgtcccaaacaattcttacatgatgcatgcctacgtacatatacagaaagcaaagatgtgtcacactttgaaccgaaaaagaaaacagcatcgagcgagcggagtcctgcccacacagaaacagaacagggcgtaatgtgctggaacagaatcggaacggagcccagctactgtcgcagacgggaagaacttatgcggggttcccgaaggacaccagttaggtggaaactagacttcagcaaccactgttggaaggcggagtgccaaagcggccccaatcagagagcccacccagaacattccatt

SEQ ID NO: 53911 - DNA, 229 bp, Zea mays
  Clone ID: MRT4577_149168C.1
cccaccatcacctctacagtatcatcccatttccaccttgcatctcacacctccatcatcggtcctggggctctccgttactgcgatcgcaagaaaactcacttctactcaacctttcaccgtcacccgtatgactaacaagagacgcctcccgggggagctgcacttcatacgccgcccatgaacacaagccacactactccacctcgcttactccattcattaagcg

SEQ ID NO: 53912 - DNA, 228 bp, Zea mays
  Clone ID: MRT4577_149169C.1
ggccgcccttttttaagaaagacttttaaagattttcacaaaacaagaaacaagtccaaccaggggggcttgggtaattttttccccccaggttaaccccatgctccaaagggtgaatgcaacgcaggcaaaggaaaatattatggccccaagttcacgggttaaggagccccaaacaacctgtttgggcttgctgcaaataaaggggggggtgggccccccagaatg

SEQ ID NO: 53913 - DNA, 291 bp, Zea mays
  Clone ID: MRT4577_14916C.1
tcttttttttttttttttttttttttttttttttttttttttttttttttttttttttttttattgatgaaagacaccctgtatatttatgtaaaccagggccgccttgacagtgggcacaagggcagtgcagataccgtccaacacgggggggagcgtactcttctgctcctcataggtggtagactgaacacgctctaagcggcagatgaacaacggtgatcgtcgacagggaggaggtgcgaaagacattggatgtcgactgatggcttgaggacaggacgcactaat

SEQ ID NO: 53914 - DNA, 304 bp, Zea mays
  Clone ID: MRT4577_149170C.1
ctctctttatattctttcataccctcaccatcaggcactatgtatgatagggttcaagggggggtgacacatggggggggtgatgtctggtaagcttgcccaaaacccatgatacctggctgatatagggagaaaccccccacaatcagtacgaccgggctgtgcctccacctgtattctacatacaaggcagatcacaacggtggacgaataggggccaccatacctcaatgaatgagcgatggaactgtaagggccatggcacacagggcttgctatactgcattaggtgcccggaccatta

SEQ ID NO: 53915 - DNA, 528 bp, Zea mays
  Clone ID: MRT4577_149171C.1
gatctattaaccgtacgcaaaacttggacccgtgaaatccactgactgaccactgcctgaacacccagtgccaaatattgggagtacacaaatagctactactgctaatagcccttaaagagaacagctggggaaccagagcatcctctcacatgccctcaaagccacaatcctctgcttactgtgtcaagtctggagacgcgtaccaagtgagactactccacagccaacgggtaatggctggaacgcacgatgaccacaaccggaatacgggcacatgtcaccaccagatagcaaatcaccgcacatcatcaaactagatgagcgtggccatcggcgctgcatgaaggcacacctgatggcctacacagaaatccacccaatcccagagatcgacatgctacacgcaagacagtcacgttcctcatatcatattttcaactcccaaacccctagaagccctgtccatgcttgcaatctctccttaccaactggagcagtcaatgtgaccccaacttcacactacgc

SEQ ID NO: 53916 - DNA, 413 bp, Zea mays
  unsure (1)..(413): unsure at all n locations
  Clone ID: MRT4577_149172C.1
nnnncctcaacatacaaagtggaattctttttctacaatcgagcaacaatggcgaccaagagatattccctccttatgctccttgctctctctgcatgtgatgctaacgcgacaatttttccttaatgctcacaagctcctatagcttccctttttcccccataccttccatcaatgatagcttcagtatgtgaaaacccaactctttaaccctataggctccaacaagcaatcggagcaagcaacatacctttatcacccttgtttcaacaatcgccagccctatctttggtgcagacattggaacataccatcacggcacagccagctgagcaactcgggctagctgcgaccaaccaagtagctttggcgaacctttttgcctactctcaggacaacaatatcttacattc

SEQ ID NO: 53917 - DNA, 454 bp, Zea mays
  Clone ID: MRT4577_149173C.1
atccggggcggaccaaggcgtccggaaggtgtggttaacgggaccatttttcttaattattaacaggttctaatggttgccttttttcgccaatactttcaataaaggacggtttaagattgggaaaaccaagcctttaaaccttacaggttccaacaggcattggaaccaggcaattaactttaataaccctggttttttaaacaatggccggccttattttgggggcagtaatgggtccaaacaataagggaacaccagttgcagaaactggggttaccagggatcagccaagtagttttggcaaacctttttccttactttaagaaccaccaattttttcaattaaaccaacggtttacattgaaccttgttgttaattggcagaaccaccaactactacatttaagccggttggttacggcttactttaagaagcaccatttttttcaat

SEQ ID NO: 53918 - DNA, 500 bp, Zea mays
  Clone ID: MRT4577_149174C.1
tcgagcggccgcccgggcaggtacaagctttttttttttttttttttttttttttggaaatgtaacttcttatttctaggaggccacatacatcagccaaaaaacttcattattgaattacaactaataagcattctaaaagagggcaccgccaatgatgtgttgttggtagaaggctgctgggtttgacaaatcaagttggacaaagggcagcatttgttgcagttgtaagagggttgcggggttagccacaaactgctggtagaacggaagcaattgttgctgtgtcaagcaagaagcggggcttgttgtatctagctggccaaatggtagtagtatttgctgctggaaataagcaaaggggttcaccgcggacaattggttatatggaagaaattgttgctgctgagcgtaggcaaaaccataactggctgaatggcaacacatgatggtgctggaaataatcataaaaggtcaatgtatacagatggatgaatgga

SEQ ID NO: 53919 - DNA, 621 bp, Zea mays
  unsure (1)..(621): unsure at all n locations
  Clone ID: MRT4577_149175C.1
gtgacggccgcccgggcaggtacaagctttttttttttttttttttttttttttcttttaaaatctggaaatgtaacttcttatttctggttggccacatacatcatccaaaaaactttattattgaattacaactaataagcaatctaaaaaagggcaccaccaatgatgtgccgttggtaggaggctgctggctttgtcaaaccaagttggacaaagggcaacaattgttgtatttgaaagagggttgcggggttagccgcaaactgctggtagaaaggcagcaactgttgctgggtcaaaaaggaaccaccgtttgctgcagctagctggctaaatggtagcaatatttgctgctgaaaataagcagcggggttcattgcggccaattggttaaatggaagaagctcttgttacatgaaagtaagcagtagctacctggctgaatggtaatagttgttgctgcaaataagcaacagggttcaatgtatatagttggctgaatggaagaaatcgtagttgctgatagtaaggaaaaaggtttgccagatctacttggttgatcacaggtagcacagagttgctgcagctgctgtgcctntgaggtttgtacctcggccg

SEQ ID NO: 53920 - DNA, 459 bp, Zea mays
  Clone ID: MRT4577_149176C.1
cacatagaaagttgaatacagtaacttcaatacttcaacaatggcggccaagatatgttccattgttatgctcctagctctctctgcatgtgttgctaacgcgaccattcttcctcaatactcacaagctcctatagctgcccttcttccctcataccttccatcaatgaccgcttcattatgtgaaaacccagcccttcaaccctacatgctccaacaagcaatcgcaacatgcaacttacctttatcacccctgttctttcaacaatcgccagccctatctttggtgcagtcattggtacaaaccatcacggcacaacagcttcagcaactcatgctaccaatgatcagacaagtagcttttgcaaaactatctccctactctcatcaacaacaatttctttcattcaaaccaatgtctacacttaaccctgcttgttattttcaacaacaacaact

SEQ ID NO: 53921 - DNA, 627 bp, Zea mays
  Clone ID: MRT4577_149177C.1
ctgcgcttctccgccgcctccgacattgactcttcctgccccaaacgatcgataatacctcggcgctgagatgctgccctatcatgacctcctatctgcagaatagttcctggcgctgcatttcgactacaacgagatcgaaaagaggggcgtcgtgtgaggacccatcgaaaacctgtcgacccaagggcacgttgatgaagacctcgttgccgatccatccagacgacgagcgatgcaggcatcgatgaccagttgaatgatctcgacccgtcgaacgaggtcagatattcgctggacacattccagactacttgagaaaccatcctgttgacaacaacatcattcagcctcttacgtctacctatacatcaagaatctcgctgctgtggtgcatgcagataacgacgatgagctgctcaaggacgacgagagagctgacaagcgtccccctagcaaggttaaccaccatgactttgctgatggccagactatgaatgacaagccaatccagacattctgctataacctagatgatgtcgctaatcccacattccactatatctctcatgggcataacgatatctagtgctagactagcttatcactggcgtgaactatatatgc

SEQ ID NO: 53922 - DNA, 462 bp, Zea mays
  Clone ID: MRT4577_149178C.1
accatattatctgaaaccaacaagcaacatagaaagtggaatccagtagcaacaatagagcaacaatggagaccaagatattttccctccttatgctccttgctctttctacatgtgttgctaacgcgacaattttgcctcaatgctcacaagctcctatagcttgcctttttcccccataccttgcatcaattatagcttgagtatgtgaaaacccagctcttcaaccatataggcttgaacaagcaatcgtagcaagcaacatacctttatcggccttggtgtgtcaacaatcgccagccctatgtttggtgctaggattggtacaaactatgaggggacatcaggtgcagtaactggtgctaactgtgatcaaccaaggaggtggtgggaaatcttagtggctactttgcgcagcagcaatgtgttggatggaaggagctgggtacactaaaaccctgg

SEQ ID NO: 53923 - DNA, 415 bp, Zea mays
  Clone ID: MRT4577_149179C.1
cccacgcgtccgcgagcgaggatgaggcgaaggcgtgcttggcgaaagaagccagcgtcgactccattggacgtcgccagtgtcgaggagtacaagcagaaggcgggcttggtgtcgaagcggggccggaggtcgacaggcagcaactaactaccgtgaccatcgtcaccgttgtggtggttcttcgccctccgtgccttcttccccctgtccgatagccgacgccggtgcgagatctactcccccccatcctcgcttcaacgagcacctttctttaatcggttagatggtgcgcttacctcgtcctcagttgctataatgggctccaagtgatgggaggcatgaaacatgctgaagtgatacatgctcgtattttgaaaccagatagctgcaaaaccaagtcaataaagcaaag

SEQ ID NO: 53924 - DNA, 246 bp, Zea mays
  Clone ID: MRT4577_14917C.1
gcagttcgaccttgtcgagagcaggaccctacagctcggattcatctaatctctcatgagcagcagaagaacaagggtatggctaaagatggtggtaccgactggatacagtctgctcaagtggaacctcgcccacggggtcggtaccaaccacccacgtgctgctagagaggaagacagataatggttcatggatgctatgcaagccaacactgtagatgttgcgcaaagggtgactgagatcac

SEQ ID NO: 53925 - DNA, 570 bp, Zea mays
  Clone ID: MRT4577_149180C.1
agaccacagcacatagaagtggaatccagtagcaacaacagagcaacaatggcgaccaagatattttccctccttatgctccttgctctttctgcatgtgttgctaacgcgacaattttccctcaatgctcacaagctcctatagcttcccttcttcccccataccttccatcaatgatagcttcagtatgtgaaaacccagctcttcagccctataggctccaacaagcaatcgcagcaagcaacatacctttatcacccttgttgtttcaacaatcgccagccctatctttggtgcagtcattggtacaaaccatcagggcacagcagctgcagcaacaattgctaccattctacccacagaatgtggcaaacattgttgccttcttacaacaacaacaattgctaccatttagccaacatgctttgacgaatcctaccaccttattgcaaccgcccaccattggtggtgccatcttctagattttttatgatttatactgtaataataaagttctcatgctgatatgtgcgacctctcagtaataaagtattagagatctatatttt

SEQ ID NO: 53926 - DNA, 828 bp, Zea mays
  Clone ID: MRT4577_149181C.1
ttttgtgtcattacaattaacaggctacaaggatgtttataattcatggacacaccaagttctccactacccttgttatacaccctaacgaccatcaaataaaactggtcctctttgagatggagtcaaataatccaccagacggattgttgcacatgaccacagtataaacctagtttcaggtaacctatggcacccaatgaaatcaaggttcaaacaatcttataatctcccagatcttagagcggataggttttttttttttttttttaggtattccatggtcgcacatgcacgattattgtcaaccaatttcacagatatacgaaccgtactgaccaaatcaaaggattgccaaagtatgaagcactgagcattaactccgtgtactaggaaagtggatcttacctaaccgattaaagaaaggtgctcgttgaagcgaggatggggggagtagatctcgcaccggcgtcggctatcggacagggggaagaaggcacggagggcgaagaaccaccacaacggtgacgatggtcacggtagttagttgctgcctgtcgacctccggccccgcttcgacaccaagcccgccttctgcttgtactcctcgacactggcgacgtccaacggagtcgacgctggcttctttcgccaagcacgccttcacctcatcctcgctcgcccagaatccacggttgtttccaaaactgaaggaagggagtgggagctttctcctctcgcgcgcgagcggtggcatccggcgaaagctacgcacggccgcacggggatgaatagggctcctcatctgaggctcccgacccggccggc

SEQ ID NO: 53927 - DNA, 603 bp, Zea mays
  Clone ID: MRT4577_149182C.1
tcgagcggccgcccgggcaggtacaagcttttttttttttttttttttttttttttttttttcttttaaaatctggaaatgtaacttcttatttctggttggccacatacatcatccaaaaaactttattattgaattacaactaataagcaatctaaaagagggcaccaccaatgatgtgttgttggtaggaggctgctgggtttgtcaaagcaagttggacaaagggcaacaattgttgtaattgtaagagggttgcggggttagccgcaaactgctggtagaaaggcagcaactgttgctgtgtcaataaggaagcacggcttgctgcaactagctggctaaatggtagtaatatttgctgctgcaaataaccagcggggttcagtgcggccaattggttaaatggaagaagctgctgctgatgagagtaggcagtagctaactgactgaatggtaatagagtgttgctgcaaataaccaacatgattcagtgtagatagctggtagaatggaaaaaattggtgatgctgatattaaggagaaaggtttgccaaagctactcggctgatcacagaagcacaagttgctgcacctgctgag

SEQ ID NO: 53928 - DNA, 369 bp, Zea mays
  Clone ID: MRT4577_149183C.1
tctttttcgcgggcgcaggacacaccatcagggcacatcatctgcatcaactggagctacctgtgatcaaccaagtagctctggcaaaccttgatccagtactctcagcaacaacgatggcttccattcaacaaactgcatacactgaaccctgctgcttatttgcagcaacaactattaccattcagccagctagctactgcctactctcaggaacaacaacttattccattcaaccaatagcccgcactgaaccccgctgcttatttgcagcagcaaatactacgaccattcagccagctagctgcagcaaaccgtgcttccttcttgacacagcaacatgttgctgactcttctaccatccagttt

SEQ ID NO: 53929 - DNA, 318 bp, Zea mays
  Clone ID: MRT4577_149184C.1
ggacaattgtgaataccatactactccatgttgccagtgccggagctcctctcccccccgccgcaatggagcagcaacttactctatgatcagcctggcctgccgccatgacgcctcccactggagacagcctccgatgttttgacaacaatccattctacctcgcggccttgccgcctgcaaactcgataaaggtcgtttggagataatcactaccgctatctcggctccaagcccttcttcctcgccctctgggactacatcttctctgaacatgtggcgagcatgtgccgccaggacaagagcgtcgtcgcaact

SEQ ID NO: 53930 - DNA, 451 bp, Zea mays
  Clone ID: MRT4577_149185C.1
ccggccagcctagctcttggctcttttttcgatcggatcgagcgctttacacaggcaaggcagccgtacacgtacgactatggagctcttgttgtttcaacaatcgcgagccctttttttggtgcagtcattggtacgacccctcagggcccagcatctgcagcaactcgtgctacctgtgatcaaccaagtatgcttttgcaaacctttctccctactcttagcaacaacaattttttccattcaaccaactgtctacactgaaccctgctgcttatttgcagcaacaactattaccattcagccagctagcttctgtctactttagaaacaacaacttttttatttaaccaattggccgcactgaacccgctgcttatttgagcagcaatactactaccattagccagctagctgcacaaaccgtgcttctttttgacacagaacagtt

SEQ ID NO: 53931 - DNA, 243 bp, Zea mays
  unsure (1)..(243): unsure at all n locations
  Clone ID: MRT4577_149186C.1
tcagacattatagatttaggtttccaatgcaacaacagagcaacaanggcgaccaaggganaatcccaccggaagccccacgctccatcggcacgcgacgccaacgcgacaagagccccncaaggcccacaagcnccaaaagcnacccgncacaccccaaaccngccaacaacgacacgcgcaggacgngaaaacccagcnccncagcccaacaggcgccaacacgcaancgcagcaagcaac

SEQ ID NO: 53932 - DNA, 709 bp, Zea mays
  unsure (1)..(709): unsure at all n locations
  Clone ID: MRT4577_149187C.1
gcccgggccgggnaatccaactcatattatttgagtaccgacaagcagcatagaaagtggaacccagtagcaacaatgagaggcaacaagtgggagaccaacgatacttttcgccgtccttcatgcatctcttggctctttcctactatgtagtgtgcatatacgccgacaacttactcgcctgcaatgcgtcacaacgctactatagcgtttcctttttcccccataccttccatcaattatagctctagtatgcgaaaacccacctcttgaaccatatacgcttgaacaagcaatcgcagcaagcaacatacctttatcgcccttgatgtgtcaacactcgccagccctatctttggtgcactcattggaacacaccatcaaggcacaacagctgcagcaactcgagctacctgtgatcaaccaagccgctctggcaaacctttctccctactctccgcaacaacaatcccttccattcaaccaactgtctacactgaaccctgctgcttatttgcaggaacaactagttccatccagccagctagctactgcctactctgaacaacaacatcttcttccatttaaccaattggccgcactgaaccccgctgcttatttgcagcagcaactactactaccatttagccagctagctacagcaagccgcgcttccttcttgacacaacaacagctgctgccgttctac

SEQ ID NO: 53933 - DNA, 442 bp, Zea mays
  Clone ID: MRT4577_149188C.1
cgctgcggccgccggggcgtaaattcccggcgcgacgagctgttctctacggcggccgccgtcctttttttttctttttgcacctggggcaatacgcgtatgacttaaagctacatagatgcttacggatcattacacaacactatcttaacaagcaggccaaacggtaacaaacaagaattagacgcaaagttaaccaaacttgggggcaagagacccatgaacacatggtcccggatgcaaacgtgggagctctgattctgagtccggagaactgactgatcaatagaggctctggggctccggtggcggagaatttggacttgggctggcgatctcggttaatccctgctagcccaggaacatgcccatgccgattccggacgagtgcctgacatgtgatatagagggccacacgatcggtggatggaattcacaggca

SEQ ID NO: 53934 - DNA, 133 bp, Zea mays
  Clone ID: MRT4577_149189C.1
gaggaagtagccggagagatggacgcgaaattccagcaccattgtaagagatggctgagctgagctgaactgaatctgcgacggcgcctctgcactttcatctgattccggcgaattaggagacagacacaga

SEQ ID NO: 53935 - DNA, 242 bp, Zea mays
  Clone ID: MRT4577_14918C.1
gtccccatcgcataattttcctcggcggcgtcgccatctcaccggcggcgggcctacggctggcaaccggaggcgatggcgagctcgtctgtggtggcggacatggagctggaccgccccaacctggaggacgccctcccgcccgactcgctcccgcaggcggcgaccatgaatctccaactgcgcgatctgcttgacatctcgccggtgctaccgaggcaccggtgccatagtcgatgatt

SEQ ID NO: 53936 - DNA, 788 bp, Zea mays
  unsure (1)..(788): unsure at all n locations
  Clone ID: MRT4577_149190C.1
gcgtctcgtcgtgtttcgctctcttgngnnnggnnnggtttttgannnngttatacttgtgggtaacccccgggttcggcctcggcttcttgtaccaagcaagcccggtagccagttccctctcccagccgaggtcctttcctttcagtagataagcacgccgttcctccctgcagctcctctgggcagccacgttcttctaccggtcatcagttgccgctgaaccactgtcggattaattttcagtttcactcgcgtggctctctagagataagctcttcatcggctgtcactcccaatcttcggttcaccgattggctgtcgactttgttgatcctttccgtgtcaaaccagcaagcttcgccaccatcactcaactgctcgctcacgtgtgctcgtaaattttcttggtcgtgtctgctgagctgaccaatggtccagctcgccgttatcgccaagtcccacgcaactgtgctgtctctcgtcgtcattcattcctatttttttcaccgttcagccccatctaggtcatgggggcggaagatctcaacactatttncatatggctgttttagatgctatttgcggggtagagagagtttgttgtgatagatggttttcgccctctcgtcatgttcgcaatcctcgtcgatcgtcgctggtttgagagaaatactggaaggtatggagaagaaagtgaagccgcaccacaacgtcagatgttcaacgacaagctcgagccaggatttatcagcatactcgcaagtattgagtcacgtttgatgctg

SEQ ID NO: 53937 - DNA, 553 bp, Zea mays
  unsure (1)..(553): unsure at all n locations
  Clone ID: MRT4577_149191C.1
cttgaaaaacatcattnatggtcaaaaaataggataagacaactggacagggggacgagcagacaagagaatcgctgaaaaaagagaattatcaaggtgttcgttacggactctactctacggctgacggctggccgacgccgcctcggcggcggctggggagcactgacgcactgggctctattggtcgacggcgcgctccctctcccgcagtctctctggcctccggcgtgggcccccccctctcggctcttgcagtcccgctggctgagcgagttagattaacttgggggcccttcaactttgggggccctgtgcggccgcccagcctgcacaggccaatggacgcccctgctgccagacgccataggagacgggcgccgagcangcagaggagacggggcgcgatccgagctccgcgacacacggcaagatgaagaaaagcggctcggctgggagatccggccagggacggccgtgaggagcccggggcgcgccatggtagccttcccgaacgaaaccggggcagggggagaaaggggcgaccgaacgc

SEQ ID NO: 53938 - DNA, 1145 bp, Zea mays
  Clone ID: MRT4577_149192C.1
gtgtttttttttttctttaaattttcttttttttttttttttttttttttttttttttaagggcaaccatgaaataagtatcctccattatactaaaatgtttatcaactcacaagcaaagacgctccatgcatgaagagaaactgctcgttttgtttctacaatatccattatactaaaggggttatcgacagccatgatccaactgaattcagataactgaacttgacaatgttgctcggcaggactcctcaacgagggaaggcaggactcctcaatgggtaaaggcactcgcaggatagctgctttacaacaaaaagagaatcaccggaagcaccaaggaactccttagcttaaacttataaaaaggccgagcccaccggcacttaacaccagcatgagcagcacaaaactatgacctgaaaaacaacagggaataaaaccctgagtaacactaggttagtgttgttagacgacgttcgcttgacaagcagcctttgtcttggtacttgatcgggttatccatctgcatcatcctgcgggttagcccgcgcttggggtcaacttggcttgtcttccgcatcacgcgattaattaacgtatcgtttcaatagccgactcgaatccgcgagatcggtagtgattttccgatccaagcaattatcgagcgcttggggaatatcacgctgctagcttcgtcatcacccgattcttgggattcttgatgacacgcggaacggcgacgatcttcgattgaagtcttcaatcgagtacttgataagcgatacacagggacctcacttatttttgtttaatatccgggattcggggttcgacgagatcgagcagagaagaacgaggttcgacaggcttgacgacggaacctcatctgcgcacaacggggctgagcgccagccaggattccaagcgcgcgacgagcagtaaacggagcagggcgctatgggaggaaacttgaggccgggtacgcaggggagagctcaggggagcagcgcgtgccaccacggcggccagagcagggaccacgccggcgagcccacggcggcgatggaggagagcgagcagagaggaggaacagctgggcagggtcgaaatccgagtagagaccgagggacacgcgggggagc

SEQ ID NO: 53939 - DNA, 1113 bp, Zea mays
  Clone ID: MRT4577_149193C.1
ggtacccgcggccctctctcgagttttttttttttttttttgtaaatcacattttgatacttcaccagaagtatctatataaggaatggatttcaaggtagccaatgcatcaaagggtttccaagcaactcctataaacctaatgcacattcactagacttaaagtgtgtaaaaataatttaaaaacacaaggaaggggttacatgcaccggggcttgcctgggtaacactaggttagtgtttgttaggtggcgaccacttgccgatcagcctttgttctgacacttgttccgtctgccctttaggttggtccgactgacgacatcgttgtacgaagaagaccactccttgtaccatcttgaggtcaacttagttttggttttccacatcacgtagttaattcacgtaccagcatcaaacgtgactcaatacttgtgaaaatgttgataaattctggttcgggcttatcgtcgaacatctgacaggtgttgagatcttccgccctccatgacccagatgggggctgatcacgaggaggcgaagcacggcgaggcacgtagcggaagagctactgagattaaagacgacgacacgcgccatgactaggaggcatatggtgggggaaaataggaatggacgacgacgagagaacaacacggctgcgtgggacttggcgataacggcgagctaaaacgttggtcagctcggcagacacgaccaagaaaattgacaagcacacgcggggcgagcagctgagtgacgatagcggagcttgctggtttaacatggaaaggaccaacaaagtcaatagccagtgcgactagatgatggaacgtagtccaacaccataatgacaatggccaccagaagggtaaagacgaggtcgagcaagggagaacaggttcaacggctcgacggcagacgcgagcatgcgcgaaacctgatggatgagagcgggtgcaccgcagagacaacgagcaggcgcgcgagcgccaacgcgagccaggagtaggcacaagcgctggggtacaacaaatgacacccgacgaacacgcaacgagacacgcagcagcgacgacggtcgaatcggcaacagagcgttggcgaactcga

SEQ ID NO: 53940 - DNA, 279 bp, Zea mays
  Clone ID: MRT4577_149194C.1
gggaaaaaacaaggcacggatgtccagttaatcgaatacatgtaatctggtaacaatctacagacgttcacaggacccaaacagcatcagaccattgtgcgaaccacccaccacaaacaccatgtctgttggcgatgcttttgcccccgaccgccacaccttaaatcaactggaaagcgcgaagctcattgtccgaatacctgtgatagctactagacatttataccgtgaccggcctgatgcttctcgacgacgtgcaaaccgccatacatattgact

SEQ ID NO: 53941 - DNA, 713 bp, Zea mays
  unsure (1)..(713): unsure at all n locations
  Clone ID: MRT4577_149195C.1
ggccgcttttttttttttttttttaatacaaatcacacacaccaatattattgcagcggaagtcttactaccaaattttaccggttacaaaaattttacattagtttatcagagtgattacaaaagtataagtttgaaatatatatgctagctcaagggatcatcctcaataagaagtatagaaggggtacttagacttataagaaggtcgagcccaccggcacttaacaccatcaacaacagcacaaagttagaacctgagtaacactaggttagtgttgttagacgacgttcgcttgacgagcagcctttgtcttggtacttgatcgggttatccatctacatcatcctgcgggttagcccgcgcttggggtcgacttggcttgtcttccgcatcacgcgattaattaacgtaccgtttcagcagctgactcgaagccacaagatcggtagcgattttccgatccaaccaatttgtcgagcgcttgggaaatatcgcgctgctagcttcgtcttcatctgattcttgggattcttatgacgcgcgggacaacgacgagatcgtgtttgaagcaagttggtgaggtggngtttgagcagaggatgacgggttcgacgactcgactgtgaatgacgtaacgactagctggggcaggatccgagctaataggcacagtatgagacagcgaccagcacgacgaacgaactaagtc

SEQ ID NO: 53942 - DNA, 604 bp, Zea mays
  unsure (1)..(604): unsure at all n locations
  Clone ID: MRT4577_149196C.1
gcagcggaaatcttattaccaaattttacaagttacaaaaattttatattattttatcggagtgattacagaagtataagtttaaaatatatgctaatgaccgtcctcaataagaagataaagacggggtatacttatataagaaggccgagcccaccggcacttaacaccatcattagcagcacaaaactataacctgaaaaacaacagggaataaaaccctgagtatggaattactcagcaagacttacccgactaaagaaaagactctcaagggtatgctggatttgggaatcaaagaaaagttttagcaagaatcaaattagatacttttatagaaatagcttactaaagtgagtccttactttcaatattttaacgccagattaaatattaatagactctatttgcatctggtctaatttcaccatctcatcaatacaacatcatttttattcatgaggttcacatcctgacttaagttgtaggggcagtgaccaagtcttcataaccgcgaaggtacgggcgatccgaatcgattatactcagcttgaggatctncgatcacacgacatatgtagcacttaacccttgcatatgtcaa

SEQ ID NO: 53943 - DNA, 405 bp, Zea mays
  unsure (1)..(405): unsure at all n locations
  Clone ID: MRT4577_149197C.1
cctgnacagtgtatgttggactttctgatagagttagcaccaattgtagtataaatatgttcttttttctctggaaggtaattgtaattctatctgaatactccgatttgagatataatctgctcttgtcaaatggttttttaaagatcattctagtttcacctgtagctttcttccttttattactttaggcaaaggcaatgctggactcccgcatgttgcaatattactttcttattgcttggcattcatgctgcgttaaggtcacttactcatggaaagaagaatggttcctgttgctcttacagtgcatttgcgttctgtagaggatgtggtgcaccagtgtaattagctcggttaatctggtgtggcttgagtaaatttatggaaattactttttgagcc

SEQ ID NO: 53944 - DNA, 123 bp, Zea mays
  Clone ID: MRT4577_149198C.1
gtcgacagacccgtccgcaggatctcgacatacatcatagctgagaacgtaggtcccaagtggacgttgatatgaacacaagtagcaaccggcgtgttataccggtacagcgacatcgtcacc

SEQ ID NO: 53945 - DNA, 677 bp, Zea mays
  unsure (1)..(677): unsure at all n locations
  Clone ID: MRT4577_149199C.1
gcatcggaaatcttattaccaaattttacaagttacaaaaattttactttgtacatgatcgaagtgattacaaaagtgattcaaagaaataactttgaactattataaattatttatagttttgaaatatatgctaggtcaagtgaccatcctcaataagaagataaagacggggtatacttatataagaaggccgagcccaccgacacttaacaccatcaacaacatcacaagactataacctgggtaacactatgttagtgtttgttagacgacttccacttgacgatcatccttgtcctaacacttgatcaggcaggttcgttcatcagcatctccatacggagtagcccgcgcttggggtcgacttgagtcatcttccgcatcacgtgattaattatcgcaccgtttccacagctgacacgaatccgcgagatcggtagcgattttccgatccaggcaatttgtcgagcgcttggggaatatcgcgctgcttactccgtcttcacccgattcttgagatttcttgacgacacgcggaacgacgacgangatcgtgtccaagtgaattttatggcgcgaactgagaaaggacttggcgagcgacgacgcgaggagtaaagcaattttcgcggtcggacgaattctatggcgcggacacaagcacacgcagcatt

SEQ ID NO: 53946 - DNA, 322 bp, Zea mays
  Clone ID: MRT4577_14919C.1
agacatcgtataaccataataatattgaactcatgcatttatactagtgacaatgaatcgtgcacggcattttaacgctggaattggtctacatcgtactaaagatttagaaataaccatagaaattgcttgctgttgcaccaaagtgctgtgaactatccattgtcgctttatgcatacattgttggtttacaaatgaaacatagaactctcatcatgtgcatacattattagttactatggtgaccacaatgtcgaaatggtactcaacttgtttatgactgccgcttataggcaactaatatgacattactagcaatga

SEQ ID NO: 53947 - DNA, 421 bp, Zea mays
  unsure (1)..(421): unsure at all n locations
  Clone ID: MRT4577_1491C.1
aaaattctgnactagccatattttctctactcatatatagaaacaagaatggctttgtcagtaaaaaaaaaaaaaaaaaaaaaaaaaaaaaaaaaaaaaaaaaaaaaaaaaaaaaaaaaaaaaaaaaaaaaaaaaaataaaaaaaaaaaaaaaaaggggcccttggagcaacaagttttatatccctttaacggggggaaaattggggggggggcgcaaaacacagacaaaaatacgatccccgagggaaaaagggtaaccgcctgaaaatccccaaaaaaaaaacaacccgaaaacaaaaaggggaaagcccaggggccccaaagaaggggccaaaccaaaataaatgggggggggaaaaaagcccccttcaaagcggaaaaaccggttggcccactggaataaataaagcgcccacccc

SEQ ID NO: 53948 - DNA, 556 bp, Zea mays
  Clone ID: MRT4577_149200C.1
gccggccgggccgggacacaaggccgcacacgccctcccttaatcagtcgacgccagacgctgcttccaggcccttctccttcctcgcagcgctcccagctcgactctctggcgcccctcgccttatcttccatagacgcgccgctccacctctagcttcttcatcgccgcgccctggctccagctcttcccacgccgacgcgccgccctccgccacctcgccggccatggcgcccctcattcccatctccctcatctcccatggccgcgcagctcctcctcaagtcgcgcccgtcccctaggcacgcgttcgccggcgctcaagccctctcccagatcgtgtcggccaacctcgacgtcggccctctgcccgctggtggccagcgctcgccttgacggaccctttgcttgttgttcacaaaaaatttatcaccttatattatacgatgcattaggtgagttgtgtgacaattgatgtattatcatccttagaaacttgactaccaaatccttgatacatttttacggaaaaaaaaaaaaaaaaaaaggcccctaa

SEQ ID NO: 53949 - DNA, 331 bp, Zea mays
  Clone ID: MRT4577_149201C.1
ttttttttttttttttttttttaaaacggatatcaaggaagggaaatcaattttcaaggaaggaaatgcatcaacagtttagcacacaactcctatcacctaatgcatcaaacaaggtgataaagattttaaaacatcaaggaggtggcgaatgcaccagggctttcctgaataacactaggttagtgtttgttaaacgatgtccacttgacgatcatcctttgtcttggtactcgttcaattatccatcttcagattcgtccatcagcatcattatgcggagtagcccgcgcttggggtcgacttggctcgtcttccatatcacgtgatt

SEQ ID NO: 53950 - DNA, 397 bp, Zea mays
  Clone ID: MRT4577_149202C.1
ccaaatcttgaaggaatgcaccgggggggcttttgaatcgtttccaatgcaaccccaaagagcccccaacccaaagactcatacccgttcctggaccatgcccttgtagagcgccattacattatgacacgccttacccgcataaccatttaccctgtgcggggacactaaaatgccccattaacacaccaaggggaccccgagctaattttccacaccactatgccatatgaccctaaattctgaaaaggctctaggacaatgcaggcttataacggcaagtgcagccagaacagtgtatgacaacattggcggcataacaagcaccttttaccaactcactagagctcttgtcttgaaccaactgggacaggaaccctccaaataacgcttcacc

SEQ ID NO: 53951 - DNA, 547 bp, Zea mays
  Clone ID: MRT4577_149203C.1
ccggccgggatgatagtagcatctgctaacacacgagagatctcctctgcctctgcctcaaccatgcattctcccatgcagggacagagacatgatggatgcggcaaagatgtccttggagacatacgtatgacgagcacctgctgtgcgacatccagggacaacactctcgaggcacctatgcatacggcctgcactgacacggtcaactgcgtgcaaaggacagccgtccccgagctctagaccacaatcatggccaacattgtgaataccttgaactagacaaggcccctctcaacaacagggctgatgctcgaacctaccacatctactgggcatcccatgcgatgctggtgccgctatccgatccaagaagaaatcctgcgcatcaccgcgaagaagacacggcggggactctcagttacattatacatcaagccattgacgcctaccacttcgaacatggatgtggaaaggctgcgccactacctgcttggacagggcatgaaactactacgtaccagctgatcatgcatgatgacgacca

SEQ ID NO: 53952 - DNA, 624 bp, Zea mays
  Clone ID: MRT4577_149204C.1
gtagcggaaatcttactaccaaattttacaggttacaaaaattttacattagtttatcggagtgattacaaaagtataagtttgaaatatatgctagctcaagggatcatcctcaataagaagtatagaagggttacttagacttataagaaggccgagcccaccgacacttaacaccatcacaacagcacaaggttagaacctgggtaacactaggttagtgttgttagatgatgtccacttgacgaccatcctttgtcctggcacgcactcgttcagattatccatcttccggttcgtccatcaacatcatctcgcggattagcccgcgcttggggtcgacttggctcattctccgcatcacgtgattaattaacataccctgactaattcgacgcgatagtcgcaagcacgactacgggttccggttgatgtcatccaggagccttcttttcttcggtaattaattgctgaagatcttttcttcgattgaataatttcgacgaattgaacttgagtcgcgcaggatgtccgagctttttgtcgcgtacttggtgaacaccatgctgctggctccatcttcactcgactcttggaattcttggcgacacgtggaacgacgac

SEQ ID NO: 53953 - DNA, 562 bp, Zea mays
  Clone ID: MRT4577_149205C.1
tatattactttcaaaactatagaatattacacactttgttcagcaaatattacatcaatattccaaatgtttttacaacaatagctattcttcttttaaaactactcttgcagcttcgtttagtagttgaaaaacaactttgtccataatagcttcggccatcttagtaatctcatcttccttttttgcttcggggtcggcctgtaacctgaggggctccgggggaggaggtaattcgactgcaatataaaacatgaataagttcaaagtcacaataataaagcataaagtcaaaagcaattagacaatacctatccgcctttcaagttctgcagttttttcaactgcctttgctgcttctctagcttcgtgggtatctttttcacttttccttataatttcgtgggccatctctcggccaccgttctcccagatgtcggtaaaaaaaattccgccaattaagcttgcctcggccgaagggttttttgtatcttcaatagaaaacgcagcttcagtttgagccaagattttcacatgctcgcatcctgccttctccaagatg

SEQ ID NO: 53954 - DNA, 294 bp, Zea mays
  Clone ID: MRT4577_149206C.1
gcctgaagtgcttctaagcagcggaaatgatcactatgcccgtatttgggatacaaggaagcttgaagccaactctccccttgccagccttgctcatggacgggttgttaattcaggatacttttctccacgaagcggaaataagatcttgacaacttgtcaggacaaccgaattcgtgtatgggactatattcttggtgatctgcaatccccaagtagagaaattgtgcacagtcatgatttcaatcgtcacctgactcccttcaaagctgagtgggatccaaggtttcagtt

SEQ ID NO: 53955 - DNA, 318 bp, Zea mays
  Clone ID: MRT4577_149207C.1
attcggctcgaggccacctgaatggctttttaaaggccattggcgcgagggccaccagaatagggaaggtccgcattgggcgttagacactagaaactggtcggatgtgtacccgctcattccctggaatagatcagacctctggaggtgccaataataaaggagaggagcaactcgatgatcgataacgtgctcatcactgcagaacaagatgcaagtatacttacaggcttagcactccaagatgtactatgtgcacgccatttttgacatacatgttaacaacatgaggcgcaagcacacagacattgtatacac

SEQ ID NO: 53956 - DNA, 294 bp, Zea mays
  Clone ID: MRT4577_149208C.1
ctcatatccttgtagcagtatctctcactacgctaggcatgacgctggttaggatgccttgccgcctctgctgcttcctgctcgtcgtcgccgcctccgccgccgtctccgggcgggggcgggtggtcaccaccctccccggctacgagggccgcctacccttccaccttaaaacatggtatgtttaggtggacaatgactcccgcacggatctcttctactacttcgtccgggccaagtcctacgccgaccacagttacaccccgttcgtcctccggatcccctgctggcaac

SEQ ID NO: 53957 - DNA, 478 bp, Zea mays
  Clone ID: MRT4577_149209C.1
cagagcaggaccggccgccatggaggcttgttcaggactacttcaagcacagcttgacggacgagaacctcgtcgaccagtgggccaacttcttctgccagacagctgatgctcatctgcgccttcgtcatgctgctggtcaggaagaactgagagacagcgcagaacataaagaacctctatcaacgaggatacgctctacaacaggcagtggcagcatacctagacaagataacccagccgaagcgcaccaaaaaaaagtgtcgagaacgcaggtgcaaacacacaatgctcgcttgctgtggagatgatttgccacactcttcggtccctttttgttacaccgattactcacgctcgaaggaacttttggatgaacgtaataagctatcgacgtgaacctgcgccaaaacactaaggatggaagaactttctgggctagacagaataatcatgttagcagtttcactggttaaaa

SEQ ID NO: 53958 - DNA, 348 bp, Zea mays
  Clone ID: MRT4577_14920C.1
atgacgcttaggcggacgcgtgggcaaagcgagagtgcgtaaagaggatcgcctaacaaaacacaatgaagatggtcatcgctctcgtcttgtgcctggctctgtcagttgacagcacctgtgctatgcatatgccctgcccctgcgctgggctggaggtcttgtacggctctcgaccctgactgacgacgatgatgtgcgcccgttcgctgtacccctacgctgagtacctgaggcagccgtagtgcagtccgcttactacggcgccctactacaccggatgtggactgactagcgccatgttccacacgatccgtcaacagtgatgacagcaatagatgaggatta

SEQ ID NO: 53959 - DNA, 538 bp, Zea mays
  Clone ID: MRT4577_149210C.1
gccggccgggtcgggaaccaacctccgctacctaagacagacgtgaatgagcagccatggcttcgtcgctggccgacgtgttgagcacattcctgggcacccgcctgaaggacccggcgccacagaacgagcgcatcgtggaccggttcgtattcggcttgaacgactaggagaagcctgctccgaacaaggtggagaagacatcgacctcctctgaccggccgctgtggatccccggcgccgaggagcccgactacctgaacgtctcgctggacgactactactggttcgacccgttcggtctcgttaagcccgtgcagaacctacagatccagttggactcgctggagcacaacctgctcaagaatgacgccggcggcatcatcggcacccgtggtcgagtcctccgaagtcaagtccaccccgttgcagccctacagtgaggagtacggactccagcgtgtccacaagtgcgagctcatacacggtcgctgaggcatgatcgccaccctcggcggcctctacgtcaagggtctcg

SEQ ID NO: 53960 - DNA, 334 bp, Zea mays
  Clone ID: MRT4577_149211C.1
ctcctcgtcccagacaagccaatcgaagccgagatacgaccatggactccaccggcaccggagcagggggtaaggggaagaagggagcggcctggcgcaaggtcggcgggccaaggaagaagtcggtgtcgaggtccgtgaaggccaatctccagctacacgtcggcctcattgggcgctacttgaagaagggccgctacgcgcatcgtgtcaacaccaacgcccccatgtaccttgacgctgtgcttgaatacctcgccgctgaggttctagtgctctacattaatgctggcagtgtcaacaagatgactagcattattacgctccacgtgct

SEQ ID NO: 53961 - DNA, 605 bp, Zea mays
  Clone ID: MRT4577_149212C.1
acagcaacatagaaagcggaataccagttctcaatacagcaacaatggagacctagatattttcccttcttatgctgcttgctctttctacatgtgttgctaacgcgactattactccctcaatgctcacaagctcctatagctcccctttttcccccataccttccatcaattatagctatagtatgtgaaaacccatctcttcaaccatataggcttcaacaagcaatcgcagcaagcaacatacctttatcgccctagttgtgacaacaatcgccagacctatctttggagcagtcattggaacaaaccatcagggcacaacagctgcagcaactcatgctacctgtgatcaaccaagtagctctggcaaacctttctccctactatacgtaacaacaatttattgcattcaaccaactgcctacactgaaccctgctgtttatttgcagcaacaactattaccatttatccagctagctactggctactgtcaacatcaacaacttcttacatttaaccaaatgatcgtactgaaccccgctgcttattagcagcagcaaatactactaccatttatccagctagctacagcaagccgggc

SEQ ID NO: 53962 - DNA, 272 bp, Zea mays
  Clone ID: MRT4577_149213C.1
cgcatgttgagatgagtggtttcaggcatccattgaagttacatttttgtgtgtgctacagacgtcacagagcaatctcttagcttccgttatttaacagtcaggaacttcagctgttttattaaagactggatgtgaacgctgcggtgctttgccaacaaagacatcatagggacacaagtgcacttttcccatatgttttagttagttgttccctgcatgtctgatatcagtcagagctatgctagaatctaatactcacaccttgaaga

SEQ ID NO: 53963 - DNA, 292 bp, Zea mays
  Clone ID: MRT4577_149214C.1
gactgctactcgtcggcgactaggcgtgtcgagggcgaaacggcggagtcatgcccgatgccatcgccagcaacggcgccgtggccggggactgtcctgcacgtcatgaagtgccatgatggacgaagaccgccacgactactacgtgttgtggagggactatgcggtcgccaagggctggatgccgtatagtacggcggcaggtacggctgcatgggcactgcgctacgatgtggggcaagtactacgcgctctggacgtttgacgacgcgtccaagagccgtggtgtgat

SEQ ID NO: 53964 - DNA, 226 bp, Zea mays
  unsure (1)..(226): unsure at all n locations
  Clone ID: MRT4577_149215C.1
gcacacgcatacatacatatttcatgaaatagaatgaagtacatcttccactgaacatacaaaccctttacgaacactagaggggagggggaatatccagtgcaaaaaaacacacacaggacaggttggnnacaatgaaaacgtaccggaacgtgcaccgaactacacgccnttttttattatatcgatcgatgatgaaggattttgtaggcagcaaccattcgtt

SEQ ID NO: 53965 - DNA, 534 bp, Zea mays
  Clone ID: MRT4577_149216C.1
tcgagcggccgcccgggcaggtgcttttttttttttttttttttttttttctttttttttttttttttttttttttttttttttttttttttggattaaaagctgggtacccccaatcttaggaaaaggaattttcgaacacccttggggaccaatttcacattagaatcgggaaaggtaacttcttattttgggggggccccatacatcatccaaaaaactttatttttgaattacaactaataatcaatctaaaagggggcccccccaatgatgtgttgttggtaggaggctgctgggtttgtcaaagcaagttggacaaagggcgacaattggtgtagttgtaaaaggggtggggggttagccgcaaactgcttgtaaaagggcagcaactgttgctgtgtcaagaaggaagcacgacttgctgcagctagctcgctaaatggcaggagtatttgctgctggaaaaaagcaggggggttcagggcggccaattgggtaaatggaaaaaattgttgttgctgaaggaaggca

SEQ ID NO: 53966 - DNA, 259 bp, Zea mays
  Clone ID: MRT4577_149217C.1
gtcaagcttatgcccaattaattttttaattgtaggagaaataatgagacatccttgctttgcatctgttagccagcagcagcaacatgtttctgtttgctctctctgcatgtccctctctgaagttgtctacatgttgtgttgtttctgaaacagaaaatttcagtaattacaacagatgggcaagacctgtacttagttcagcaacctcagttcctctctatcgacaactgtaggtcatggttatctgcatttcttg

SEQ ID NO: 53967 - DNA, 434 bp, Zea mays
  Clone ID: MRT4577_149218C.1
aaagcttgttactcccaatcttagggaaaataattttcgaacacccttggggaccaatttcacattaaaatctggaaatgtaacttcttatttctgggtggccccattccttatccaaaaaactttttttttgaattacaactaataagccatctaaaaggagggcccccccaatgatgtgttgttggtaggaggcccctcggtctgtcaaagcaagttggacaaagggcaacaattgttgtagttgtaaaagggttgcggggtttgccccaaactgctggttgaaaggcagcaactgttgctttgtcaaaaaggaagcacggtttgctgcacctagctggctaaatgggagtagtatttgctgctgcaaataagcagcggggttcagggcggccaattggtttaatggaaaaagttgttgttgcttagagttg

SEQ ID NO: 53968 - DNA, 620 bp, Zea mays
  unsure (1)..(620): unsure at all n locations
  Clone ID: MRT4577_149219C.1
tcgtttgnataccaacaagcaacatagggaaagtggaatccagtagcaacaatagagcaacaatggcgaccaagatattatccctccttatgctccttgctctttctgcatgtgttgctaacgcgacaattttccctcaatgctcacaagctcctatagcttcccttcttcccccataccttggcatcgaatgtatagacttgcagctatgatgtaaaatcccaggctcttcaacacctataggtctccaacaagcaatcggagcaagcaacatacctttatcacccttgtttcaacaatcgccagccctatctttggtgcagtcattggtacaaaccatcatgtcacagcagctgcagcaactcgtgctacctgtgatcaaccaagtagctgtggcaaacctttctccctactctcagcaacaacaatttcttccattcaaccaactgcctacattgaaccgtgctgatcatttgcagcaacagctattaccattcagccagctagctactgcctactctgagccacatcaacttcttccatgtaacctatgggccagactgaactcccctgcttatttgcatcatcatatactactaccattgagccagctagttgca

SEQ ID NO: 53969 - DNA, 325 bp, Zea mays
  Clone ID: MRT4577_14921C.1
tttttctcgtacgaagcatcatacaaagcggggggtatttgcaacaatagagcaacaatggataccaagatattttccctccttatgctccctgctctttctacatgtgttgctaacccgacaattttgccttaatgtttacaagcttctatagcttccctttttcccccatacctttcattaattatagcttcaggatgtgaaaacccaattctttaaccattttggcttcaacaaggattttcagtaagcaacataccttttatcgcccttgttgtgttaacaattgccagcccctatttttggtgcaatcattggttacaat

SEQ ID NO: 53970 - DNA, 554 bp, Zea mays
  Clone ID: MRT4577_149220C.1
ccctcataacggccgccagtgttctggcaatcgcccttaaactcccccgggggggggggggggggttaattttttttttttttttttttctggaaatgtaacttcttatttctaggaggccacatacctcagccaaaaaacttcattattgaattacaactaataaccaatctaaaaaaggcatccccaataatgggggggggggggagggcttttttgtttctcaaatcaagttggacaaagggaagcaactgttgcatttgtaagaggggtgcggggttagccacaaactgctggtaaaacggaagcaattgttgttgtgtcaaaaaggaagcggggcttgttgtagctagctggccaaatggtattagtatttgctgctggaaataagcaaaggggttcagtgcggccaattggttaaatggaagaaatttttgctgctgagcttaggcaaaaactacctgcctgaatggcaacactgttgttgctgcgaacaattttcaaatttcaatttaaacagtttcattaatggaagaaattgggcttgctgagag

SEQ ID NO: 53971 - DNA, 309 bp, Zea mays
  Clone ID: MRT4577_149221C.1
gctgaactcacggtggcgacacaccaaatgaagaaaaaccaccgctgtttgtcaattgatgattaacaaaatctagcaaatacgacttttagctggatgcatatataaatatgctgctgcattagatacgattcctgattatagctaacccattttatctatttgcattccatataaaaatgtctttacagcttatacgactagactatcatgtgataaacaggacctgtttctcttgatttggtgtgtcgccgccgtgagttcaaaggggcccccttggattaatgagctactccacctgagacataa

SEQ ID NO: 53972 - DNA, 495 bp, Zea mays
  Clone ID: MRT4577_149222C.1
gggaaagggaacttcttatttctagggggccacatacatcagccaaaaaacttcattattgaattacaactaataagcaatctaaaaaagggcatccccaatgatgggttgttggaaaaaggctgctgggtttgtcaaagcaagttggacaaagggaagcaactgttgcagttgtaaaagggttgcggggttagccacaaactgctggtaaaacggaagcaattgttgttgggtcaaaaaggaagcggggcttgttgtacctagctggccaaatgggagaagtatttgctgctggaaaaaaacaaaggggttcagggcggccaattggttaaatggaaaaaattgttgctgctgagcgtaggcagaaactaactggctgaatgggaaaaattgttgttgctgcaaataagcagcagggttcagtgtaaacagttggttgaatggaaaaaattgttgttgctgaaaatagggaaaaaggtttgccaaaactacttg

SEQ ID NO: 53973 - DNA, 687 bp, Zea mays
  Clone ID: MRT4577_149223C.1
aacctattattgagaccaacagcagcataaaaagtggcacccagtagcaccaacagagcaacactggcgaccaagatatcttaccttcttatgctccttgcgtctttgtgcatgcggtgctaacgcgacaactttgcctcaatgctcacaagctcctattgcttcccttattcctccataccttgcatcaatgatagcttcagtatgtgaaaacccagctcttcagccctataggctccaacaagcaatcgcagcaagcaacatacctttatcacccttgacgatcgaacaatcgacagccctatctttggtgcagtcattggtacaaaccatcagggcacagcagcctgcagcaactcgtgctacctagtgatcaaccaaggagctctggcaaacctttctccctactctaagcaacaacaatttcttccattcaaccaactgtctacactgaaccctgctgcttatttgcagcatcaactatgaccattcagacagctagctactgtctactctcagaaacaacaacttctttcatgtaaccaaacggccgcactgaacaccgctgcttattcgcagcagcaaatactactaccatgtagccaggtagctgcagcaaaccgtgcttccttcttgacacagtaacagtagctgtctttctaccagacgattgcggctaagcccgca

SEQ ID NO: 53974 - DNA, 541 bp, Zea mays
  Clone ID: MRT4577_149224C.1
tcgagcggccgcccgggcaggtgcttttttttttttttttttttttttttttttttcttttttttttttttttttttttttttttttttttttttttttttttttttttggggtaaaagctgggtccccccaatcttaggaaaagtaattttcgaacccccggggggggcgagttcacattaaaatcgggaaagggaactttttattttgggggggccccatacctcatccaaaaaacttttttttgggattccaactaataatcaatctaaaagggggcccccccaatgatgtgttgttggtaggaggctgctgggtttgtcaaagcaagttggacaaagggcaacaattgttgtatttgaaaaaggggtggggggttagccccaaactgcttgtaaaaagggaacaactgttgctgggtcaaaaaggaagcacaacttggtgcagctagctcgctaaagggcaggagtatttgctgctgcaaataagcaggggggttcagggcggccaattggttaaatggaaaaagttgttgttgctg

SEQ ID NO: 53975 - DNA, 390 bp, Zea mays
  Clone ID: MRT4577_149225C.1
cttcccggacccctgggccgaccccttggccccaaatcatattttcgcgctggcgccgccgcgctagaaaagtgtttgattctgtgttgcggctttccagagtgattggtatccttttcctgacaacacaggtttttttgagagataagaccccaaaaaaagagggctctggccaacacgctttgggaaattctcttcccctctggggaaaacattctttttttgaacggggcctatatggaaggggaaaataccctttctatactgggtggggttgacacattgggttgtaaaacccttattccgtttttacccaacgcataaaaaccaaagggaccctctcaaatgcggtggggccttttttggggttctaaggggggggcctttttt

SEQ ID NO: 53976 - DNA, 671 bp, Zea mays
  unsure (1)..(671): unsure at all n locations
  Clone ID: MRT4577_149226C.1
ccaatcgaggttgtgatctccttctcagacacacacgtgaccaacacggcacagcctgctgaccatccgcagcggcaactatcgactcatcatacccacctagctccggtctacgataagcggcaacaactcctttacatcatacccaattgtccgtactggactccgtggattattagcacaaacattatactactaccatttaaccagctatgctgcacctaaaccgtagcttccttcttgacacagcaacagttgctgcctttctaccagcagtttgcggctaaccccgcaaccctcttacaactacaacaattgttgccctttgtccaacttgctttgacagacccagcggcctcctaccaacaacacatcattggtggtgccctcttttagattgcttattagttgtaattcaataataaagttttgtggatgatgtatgtggccaaccagaaataaaaagttacatttccagattctaatgtgaaaaaaaaaaaaaaaaaaaaaaaaaaaaaaaaaaaaaaaaactaatggttttaaaggggggggggggagatcttgttatttcgctgtgataaggaaaagaacttggctgcccggccactttcttttggccccctcgcgttggccatgctttagttttattanggggtcccgtccccttgtct

SEQ ID NO: 53977 - DNA, 648 bp, Zea mays
  Clone ID: MRT4577_149227C.1
catcaagcttcattgaaagtgtaatccattagctacaatagagcaacaatggcgaccaagatatttaccctgcttatgctcctgtgctctgtctacatgtgttgctaacgcgacaattttccctcaatgctcacaagctcctatagctttcatatttgccccataccttccatcaattatagctgcaatatgagaaaacccagctattcaaccatataggcttaaacaagcaatctcagcaagctacatacctttatcgtccttgttgtttcaacaatcgccagccctatctttgatgcagtcattggtacaaaccatcagggctcaacagctgctgcaactggtgctacctctgatcaaccaagtagctctggctaacctttctccctactcttagcaacaacaaccttcttccattcaaccacctgtatacactgaaccctgctgcttacttgcagcagcaactattaccactcacccagctagctaccgcctactcttagcaacaacaacttcttccatttaaccaactgtccgcactgaaccacgctgcttatttgcacgccgcaaacactacctaccatttagcctgatagctgcagcccaccgtgcttccttcctcacacagcaacagatgatgtctttcta

SEQ ID NO: 53978 - DNA, 629 bp, Zea mays
  Clone ID: MRT4577_149228C.1
tagtacacaactcctatgatctaatgcatcaaacaaggtgataaatattttaaaacacaaggaaggggataatgcaccggggcttgcctggaatgacactatgtttgtgttggttagatgacgtccacttggcgatcagcttttgttccgatacttgttcagtttatccatcttcaggttcgtccgactgcgagacatcgtcttgcggagatgtccaatctctcattatcctagggtagacttgggtcgtcttccgcatcacgtgattaactagcgtacctgctcacctatctgcgggcgccgacgacgctttcaacggcaaggacaagattgacggtctaggcacatcaacatgcggagatgtagactcgtccatggcgaggacgaggaatgacgacaaactctagttcaaactattcatcgcgcactccgcgggtagcggataggaacctccgggtagcagagttggcaacgagcaccaaggagacaacgatgatgttgctgatgaagatgatagtggtcgctgaagttgaaggccgacggacacgccgagaccgcggttgtaggcgaatttttgacaacattttaaaaaccggccggcctcgagggtcccaatcgcccataggagt

SEQ ID NO: 53979 - DNA, 457 bp, Zea mays
  unsure (1)..(457): unsure at all n locations
  Clone ID: MRT4577_149229C.1
aaaactaaagggccgatcatgttatttattgggggacaagcagtggctccacacaaattagcagcaaccacaagaacttgcgtgggcagcattgttgtttcaaaacgaagaacaacacatggaaaactgcacgctgggacacgatacatacatgggcctagcaatataatcggcgccgcgggatatttattgagaaaccaactaatgcaaacacgctgcctggtggtcgtttacttgggcccgaagcttgccttggtgggcttgacctccccgctgccgacccggaatgcctcggcgaggacagttggggccacgggcggcgtggcccctaagagcgtaatggcgatggcctgcgtgccctggcactggatgttaaaagcggaaaggacggnggcggngccgtgccccctgttctgctggaagtggacaaggcccggcaggaagaccaaaacctccc

SEQ ID NO: 53980 - DNA, 336 bp, Zea mays
  Clone ID: MRT4577_14922C.1
gttatgcctgcctacacttatccgacgttcctatcactagctatataagaccaaatctgtggggaccaacgatgagctgatgatccatgccaagctcccaattgatatgcagcccgccaaggtgtacgactaccgggagctgttaccctagatatctgtcatgctcttctacagcatgaacaccatcgatgtcgacgaggtcacggtcgatatcgtcaagtttcagaagctcacagacgaattgacaatgctgaacctaatgggacagatacctgcgactgttgacgacagattcaaactattttaaagcaatgcgattttcaggtatcttgcata

SEQ ID NO: 53981 - DNA, 1541 bp, Zea mays
  Clone ID: MRT4577_149230C.1
atttgctggaaaccaagggcatttttttggcagaggaaaagccagaccatgactttctcgctgatatccgagctggccaggtaatgaaaacggaggtggaaagcctggagcagagtctcaccctagcccaggtgctaccgattatgtccaattcccatcaccggggctttcccgtggtgcaggggggcaaactggtgggggtatttacccaaacggatttggccaatgcggcccaggagtcggtgcacattgcccttaagcaaattatgacccccaatcccatcactgtagatccggaagcgcccctcagtgatgtgctctatttgctcaaccgttatcaactttcccggttgccggtggtggaaggggacaacaaattagtgggcattatcacccgcacagacattattcgggaggaagtgagtcagttaggggggcaaattatccatcctccccatcccgcctacagcgtataccaaacccgatcgccgttggtgggagaagggcgcattttattacccatccgggactccgatagtgctttagttttgtttcaaattgcggcggcaatcgccaaaaagcaaaactacgaaattgactgtttgcaggtggtcaaggtatctaaagctcaatccccttctgtgcaaagggtgcaatggcagaggcaacggcaactgatgcaaaaactggaacgcattgcccgccaccagagagtgttattccatacggaaatcaagctggcctacagcattaccgacaccatccttgataccattcaaacccgccatagcgacctgctaatccttgaatggcaaggggaaatgcccattggcggccaaatttttggccaaatcacggatcaatggtggtatcccaacgttttaaaccccgcactttcgcttcattttgaatataaaaacagctatctggctctaaacccagaccgagaaacttatttttaaaagttgttgaacccaagggggaaaattcaatgtctagctcctctaacaaagctttgactaagtcgcccactagttctttatcaatttcgtgttcaggcaggggagccataatttctagttgttgaccatagtaagcaatgcgggaactgcgatgttcaccgagttcttccagcaaagcttcaaattcgtcccaatccacatcccgcaaaaccaaggtctggccgggaagcacactgatgcggtctagggctagcaacatggctcttcttcctcgcaatatggctagtttccattatggcccctctaccaaagagcaggattaatccccagcctaaggcagaagtgaatagagagaactaactattaacccagtcctggggaactaagaatttttccgttaattccgcctcgggactaccggcttcgggactgtagcaatattgccaacgtactaagggaggtaaagacatcaaaatggactcagtgcggccattggtttgcaaaccgaaaatggtgccccggtcatagaccaagttaaattccacataccgaccccggcgatataactggaactgccgt

SEQ ID NO: 53982 - DNA, 361 bp, Zea mays
  Clone ID: MRT4577_149231C.1
caccgcggtggcggccgcccttttttttttttttttttttttttttttttttttttttttttttttttttttttttgaaaaaaataacatttcatttaatatgcctcactttcgatcaacaacaccagatcattttattttaaccatcacattcttctccctttaccaaaaaaaaagggggggggaaaaaatgaaatcatttcagcgcctgtacaaaaatatgccgccttttccgaagctgtcctaaataccatttttcggttaacctagtctcctccgtcccttcgtaccaaaaaggggtagtacaggatttttgacctgttgtccatcgcggacccgtgggtcgacctcgagggggggc

SEQ ID NO: 53983 - DNA, 489 bp, Zea mays
  Clone ID: MRT4577_149232C.1
aaagggaagcttcaccttggggaggtggggtcctacatacccctagtacacaggtcccggagaaaccaacaaaaaaacagggggggggagggaggcaacacttgcccaggaaattcaatcctgaaaaaacattacaatccacggggcatctcaccatgtaaattagcatcatgaagcccctctggggggccccctttgggggaacatccggagaagaaatttattctgggagtattcgggggaaaccttaagcttcatgctcttagggagggttgggttaaggggccaagtaaaacggatcccttccatccctgattctaaaaacgaagcccttccatccctgattttaggaacggagccgctctgttctgggttggggaatctggaacggggcgggtttggtttttgtttggttgcaaagttaacggaacggagcgtgactgggcaagcgggctgggaacaaaacggttccccccgggtgattttttt

SEQ ID NO: 53984 - DNA, 1662 bp, Zea mays
  Clone ID: MRT4577_149233C.1
gctcaaccagtctgcaaccagatttgtagtgttgatccatattgtgttgtgtctcgctactctgagctaaaaaagaaaaaaaaaaaaaaaaaaaaaaaaaaaaaaaaaaaaaaaaaaacttcccaggaatccagccgacccagcacttccccggttcctcccagcagagtcttcttctctgcatccgttccgttccccggcctctcgcacatccaccgccaccgagccgcgtgcgtcttccatgaaggacccgttcgaggcggacgtcgaggagcaggactcgccgccggagtcgccggcgccgcccgaggatgaacccggcgccgcgggccctgcggaggaccccgaggactacgacggcggcccgcccccgcgccagccgtctgccccggcgtctcacgcagccggtgccaaggccaaggcccgtgtccatagggagcagcaggaggatgacgacgaggacgaggaccagattgaggtcgacctcgagaagcttcccagcagcactggcgacccagacaagctcgctaagatgaatgctatactgtcccaatttacacaacagcagatgaaccgttatgagtcattccgaagatctggatttcagaaatctaacatgaaaaggctgttggcaagcatcactggaagtcagaagatttctatccctacttcaattgtggtatcgggaatcgccaaaatatttgttggtgagctaattgaaacagcaagagtggtcatgagcgagaggaaggattcaggacccattaggccttgccacatcagggaggcatacagaagattgaagcttgaagggaagatcccacggcgatctgttcctaggctcttccgctagaattgaagcatgtatattacacatgtgtctggagtcctgacagatgtgtgccatgaggtgaggagtttctagtaccagcttgttgcagtttctggacagaaacctgaccagactctcacagcttctgttgagaaatcctgtcaaatgtcatatcatctttaagatggaattagaaagagttaaaacgtccctaccacggggcctaaaatcgcctggggttgttatttgtactgagggctactttgaaaacctcaaatccccttcgggattggaggggattgaggtggaaatgaactaattttctcttgagtttccaaactagccctctgtgattgtgtagaatcgttttccatgcgctcctcgtcatacggaccatgggaattgaaaacctgtgtactgtaaagttagccccccgttttgacttcaaactaaccgctgatgcgctgaaaaacaggtggtggctcctgtccccagctaaatgtctttaaatgggtttggggaatgatttagcaagaacaaggttaggattacagggtcgggcatgcggctgggacctgcgaaacgaggatctattcgaaaagcagtttgttagaatttacttacttgcttaaggctgttttcggtgaatctgtttgacactgtttgaaggatgagtttgaaatagggataagggacccagcgcagtgccgcccaaggtttgaaaaaccggggggcaaaccaaataaaccggccggctttccggttatcgggcccaaccggttttggagtttgaatttgtgaaattttaaaaaatttgaaaaattttggcg

SEQ ID NO: 53985 - DNA, 972 bp, Zea mays
  Clone ID: MRT4577_149234C.1
atccgttacacggcctctcgcgcatccaccgccaccgcgccgctccatgaaggacccgttcgaggcggccgtcgaggagcaggactcgccgccggagtcgccggcgccgcccgaggaggaacccggcgccgcgggccccgctgacgacgccgaggactacgacggcggcccgcccccgcgccagccgtcggcgccggcgtcgcacgcagcatcagccgcggccaaggccaagggccgggtccagagggagcagcaggaggatgacgacgacgacgaggaccagatggaggttgacctcgagaagcttcccagcaacactggcgaccctgacaagctcgccaagatgaatgctatactgtcccagtttacacaacagcagatgaaccgttatgagtcattccgaagatccggatttcagaaatctaacatgaaaaggctattggcaagcatcactggaagtcaaaagatttctatccctacatcaattgtggtatcaggaatagcaaaaatatttgttggtgagctaattgaaacagcaagagtagtcatgagtgagaggaaggattcaggacccatcaggccttgtcacatcagggaggcatacagaagattgaagcttgaagggaagatcccacggcgctctgttcctaggctcttccgctagaactgacacacatcaggcaggagtcgggacagatgtgggacaatcgttttccacgtaactgcggacctcgtcatacgtaccatgggaattgaaaacctgtgtactgtaaagttagccccccgttttgacttcatactagccgctgatgcgctgaataacaggtggtggctcctgtcacgagctagatgtcttgaaatgggtttggggaatgatttagcaagaacaaggttaggattacagggtcgggcatgcggctgggacctgcgagacgaggatctattcgaaatgcagtttgttagaatttactt

SEQ ID NO: 53986 - DNA, 820 bp, Zea mays
  unsure (1)..(820): unsure at all n locations
  Clone ID: MRT4577_149235C.1
aattcggcacgagggtaaagtatagttaagattttaacctcttttgactttccatttagcctgtgactttcatggataatactttaatagaggctttgagacctgtgtccagagtaaataaagagaaaattatattgcacagttaggatggaaatttgatatccatcaataaaattgataaattatagaatggtgcaccttatcttttattttactagaacacagtgcaacttctatatattcttatttgtaacttggatatgttgcaaaaataataaatattactagatccttgcaaagagaaggagaaataataaaatctagaaaagaataatacaagggagctttgaaatgaaatattatttatatacaaaccttctatggattgaaaagaccgtttaatctgttactggatttcattatatttgattcagctcctcagtgcaggtatgtactgttttcagtatcatgtttattttatgttctgaagtagaaatgcctttgtagggccataaatactttgtcttttactgctttcaggtttctggatttgtttttaccaaggttcaagaaaacctaggcgctagtcacacgttatcctactgactagcgtctaggaagattaaacgtagattaagcgtngattaatcgtttttgtttagggtttagtgcgtgcacagccaagcatgaataatctgaaaactatacaatcagataatttggaaagagtagaaactcatctgaggagcagctcaatattgtacatgcagagccaagcttgcaaacaacagggcaacatcacaagtcaaaggatcacaag

SEQ ID NO: 53987 - DNA, 187 bp, Zea mays
  Clone ID: MRT4577_149236C.1
tctctccatcgcactcactcatcgttacgtctcactcgtcgtggcttcccttctcctcctcggggtcctcgtcgtcggcgcggtcattgtgcgggatgtaggcgagacctttcatgactcgtgtatcaagacccagttccccactatctgcgtccacagcctcgccgctaatctgtacagccacaat

SEQ ID NO: 53988 - DNA, 347 bp, Zea mays
  Clone ID: MRT4577_149237C.1
aaggacaactaaactgctagccagtgcacctagtatagaaatatgcgaaatgtgcgtggctaaactggtgaaatagccgtgccgccatacaaatagagcaaatgacaggtccaaaattataagatcacggtagtacggtggttttcggaaatgataccctacatatactacgacataagtgaccgtagttctgctctacttgttggcctcactactggggtttcccttggccgtggccttgctcatggccagtttagcagcttattgttttatggtggttgcattgtagtcaatggcgtcggcaacgggcttggaagacttgttaaaagtggctgcaatgtaactgg

SEQ ID NO: 53989 - DNA, 715 bp, Zea mays
  Clone ID: MRT4577_149238C.1
gattgtctttatgtggccttcgtctgctcgctgcagtgcgctcgtcgttcataatctcggtctgagtactcccgcatatggagttatgatgatcaccttcccacggaccagcatgcgtaagacatccggaatgttaattgggttcaaggtctagacgccacttcaaccgtaccacatgtagggctgactactcctatcgacactagacatcgcttttttcagtggaaaaaaccctttgctgaggcatctcacgcccacgaaatcgcccttgagatcatctttattgaggctaattgccctatctctgctatcctgaagcgagctcgtgtcctgctggagaagaactccaataacattgctgcctttgtgacaaaccatggttgtttgaactacatccaggagagcctaaggtctagtattctccatctcttaagagtcttcaccatgctatgagcgttgcattgctggattctgtcgtgacggcctgtgctgagggatatattcccgccgtccgattcaaggtcttgaaagtttctggctgcttccctcctctccctctctgaggagatgaaatagaacgctagatctgtaaaacagctgcatgggctctgtagctttgtgcctgacggcgctccgcacacctgtggcgctcaccaaaccatacctgacctcatgatgacatgaaccagccagtgatcttgccatagtcttgttg

SEQ ID NO: 53990 - DNA, 1629 bp, Zea mays
  Clone ID: MRT4577_149239C.1
atgtccccatcgaagaaacagttaacaaacaacaatgattcgctgtactggtcaaatgaaaaatatgactactcttgctcttggttggatgaccgggcaatgatttcagctttgcttgatgtggtcatagaagaagactctgcaagagcgctctcccctcttcctcttgtagctggtgtggaggctgagctgcatccggtctctgttggccataagagcatggatgcagaaatgaaacagccacttgagggatccatgtccctgaacatcgacagcgaaggtgaaccccacattggaaatggatcgatcgtcgtcgagaaccctgcatctgacctggtgaagtcagaatctgaccgaataaaaaccttttaccagacggtcctgtcggctatcatggtgttcgtcacggcagcgctatcaagctacaaggacatgaagcctctttactcgaccacaagccacggcaaagctcacctcagcaacctcctagtcgacgagggcctattcatattcatgaccttcttgtgtgctatggtcctaatgatgtctgagttcgtcgtgcaccagcatgggccggcggggccatggtctggtgctgggttcgcaccattctcgttgcagtcaccggtgtgatgctaatcgtggctgacacaatcctcctcatcgtgacgaaccgaagcaacatgttgctgtcagttcttcttgtaccggaggtgttgccttttcggcgtggccgtgagcgttggagcatggatgcaagagagtttacccagctcggagcttggcagcaggtacgattccgccatgaagggaacctttgatatagctacagttggcaccattgtctcgttcacgcttcaggggggcatcgtctttggctacctgaaaaccccagacagtaatcaggtcaagcatgacccgccgctggacctcgctgcgtgctacgccacctcgacgctctccctgaccggaatgacaatgtgtgccatgccgctggcatatctccccaacggcatgctggaggttctcgtcagagtcgtcgagaggcttaggagtgctgtgctggccgctctggcgatgatggcgctggtcgtctcagtggagttcctggatggattcgtcgtggtctccttctttcccgacgccgtcacgattgccctgtactacgtggtgaagctgttctcggcatgtcaaccccgagaggagatctcacagctggacttcaccttccggatcgttgccgccgcggggttcacgctaatgactggactctatgcggcttttacggggacagatcactatggcttcaacctcaagaccgctatgttcatcctgttgcttgcagttgtgtcgagcttgagccgtctggcaatcccacttcacatgcctgaggcgggagtgggaggagtcatcgagttcggcattgttagtatagctctctcttttcccctgctggcgcttctggctgccattccattggtgttcaaggtcttcgtcgaccattacatcaatcgctagtctttgggttgtctggcgcaattcttcctgtggtacagtgccagtaatgaatgatgcgtttttaaactaagggcataaatttaaaaatcttatttttattactgcatttaa

SEQ ID NO: 53991 - DNA, 861 bp, Zea mays
  Clone ID: MRT4577_14923C.1
aacgggcacgctgaggagggcgtcagggcgagacaacccgctcgccgtggaccgtggtgccgccgcgcgcccgctgccctgctccccgcccgctgccctgctcccctccaccttccgcgcccttgcactgctgcctccagtatactgcgtcggcgaagcttccagaattccttgcctagggtttctccgggcagccttcgatggggcctcccttcttccttctcttcctcgtcctcacggccgctgcggtcgtgtcctcggccccccggcgggaggcgttccgccgggacccagggcacccgcactggcaccatggcgctttccacgatgtcgaggacagtgtccgcgccgacgtccgccgcatgctccacacccgagcagaggttccatttcaagtgcctcttgaggttaatgttgttcttattggtttcaatggtgatggagggtatagatactctttggatgggcacaagctcgaagaattcctaaaaatgggtttcccacttcacaggccctcttgctttgagacaggggagccaattgatatcgagcatcatattatgtacaatgttatatcggctggacaaccggagctgatatctctcgagaagtcactgaaggaggccatgcaacctgcaggaattgcaagagatagtgaatatggcagggaattgcctctatttgaagtagaagcgactgcagtggaatcgatatttcagaggctatactcattcatttttgacatggagcctggttatcctgcaaatgacatggataggcctgttcctgttgcgatatttattgttaattttgtaaggttagaatggatcctcgaaacaagaagttaatctcgatagttta

SEQ ID NO: 53992 - DNA, 282 bp, Zea mays
  Clone ID: MRT4577_149240C.1
gaacgaaaacttatatatgtctgagaagttcacacacaggccggagctattgccaccacaccttacaaacaaccatcatagttgaggcacttcacacctgagcaaaccaaacctggaacactaaccaacttaatccacctcctcgatcttgggaccagcaccgatcccaccagacagggcatcctcatacatgccagaaggagcgcccatgcccgatccctggtcctgggacatctatcggatgatggggttgcagatcccctaacgcttcttcatgttgtc

SEQ ID NO: 53993 - DNA, 940 bp, Zea mays
  Clone ID: MRT4577_149241C.1
gcaccttagaagggggaatccataaccaccattgaaccaccattgccgaccaaaatagtggccttcctaatgctcctggctctttctacatgggtggctaacgcgacaattttccttcaatgctaacaagctcctatagcttcccttcttccccaataccttccatcaattatagcttcaatatgtgaaaacccagctcttcaaccatataggcttcaacaagcaatcgcagcaagcaacatacctttatcacccttggtgtttcaacaatcaccagccctatctttggtgcagtcattggcacaaaccatcagggcacaacagctgcagcaactcgtgctacctgtgatcagccaagtagctctgcaagtctttctccctactctcagcaacaacagtttcttccattcaaccaactgtctgcactgaaccctgctgcttatttgcagcaacaacaactattaccattcagccagctagctactgcctactctcagcaacaacaacttcttccatttaaccaattggccgcactgaaccccgctgcttatttgcagcagcaaatactactaccattttgccagctagttgcagcaagtcgtgcttccttgacacagcaacagttgctaccgttctaccagcagtttgcggctaaccccacaaccctcttacaactgcaacagttgctgccatttgtccaacttgctttgacaaacccagcagcctcctaccaacaacacatcattagtggtgccctcttttagattgcttattagttgtaattcaataatgaagttttttggctgatgtatgtgtcggtgttagccagatcataactctcatcatcactatcaaccatttcatagtcaacaccatttgaaggcgcaagttcgtcattaatgtcattgccttcaaggattgctaaaaaaaaaaaaaaaaa

SEQ ID NO: 53994 - DNA, 558 bp, Zea mays
  Clone ID: MRT4577_149242C.1
attttccttcttccttctccccactccccactcctactccatcttcttccgccatcttcttgccggagggcactccgtctccctctcgtgtttgtccatgaatccggttccgactacaatctgattgtgattcttagacctcacccctcctctcaataagtaccaccaccagtcctagataggagtacgcctgtgtgagatcgcacaagacccaccatgccgcacgaaggctattacgaagcctctttgcgtccgccggccttggatgatgcgccggcggcgaaggactggggggaagtcctcctcgaccgcgtcgcttacatggtcgacaagaaaaaccatacttccgtcaaccttcaattcaagagggatctggacggcaaggaggtggatctgtgggtcactctgtgcttcgcccggccgcctcgtctctcctatttctgctgccacgcctcctgccccaacgacaaagaagaagacacccgcttgttcttccgcgagcctttcgtgttcgccacggagggtaacctcgccgtcatcaccctctgccacgggcgc

SEQ ID NO: 53995 - DNA, 839 bp, Zea mays
  Clone ID: MRT4577_149243C.1
gccacataaaaagtgtaattaagtgcctacaacagagctactacgactaacacggtaggctccatcataatgctccttgctctttacgcatgtgctgctaacgccacaatactacctcaatgctcacaagctcctatagctttcataattacaacataccttgcatcaatgatagcttgattatgcgaaaacagagctcttcaaccatatacgcttcaacaagcaatcgcagcatgcaacataccattatcacccttgcagtttcaacaatcgccagccctatctttggtgcagtcattggtacaaaccatcatggcacagcagctgcagcaactcgtgctacctgtgatcaaccaagtagctctggcaaacctttctccctactctcagcaacatcaatttcttccattcaaccaactgtctacactgaaccctgctgcttatttgcagcaacaactattaccattgaggcagctagctactgcctactctcaggaacaacaacttgttgcatttaaccaattggccggactgaaccccgctggttatttgcaggaggaaatactactaccattgagccagctagctgtaggaaaccgtgcttgcttgttgacacagtaacaggtgctgtctttgtaccagcagtttgtggttaaccccggaaccgtctgacaactacaacaatgggggggcttggagcaactgggttggacagacccagtgggctgctaccaacaacacatgattggtggggacctgttaaagatgggtcattaaggggaatgcaataataaagttattctggatgatgaatgtgtgtaggggggagattagaaggt

SEQ ID NO: 53996 - DNA, 895 bp, Zea mays
  Clone ID: MRT4577_149244C.1
cggccgaggtacaagctttttttttttttttttttttttttttttgtttcacattagaatctggaaatgtaacttcttatttctggttggccacatacatcatccaaaaaactttattattgaattacaactaataagcattctaaaagagggctccaccaatgatgtgttgtcggcaggaggctgctgggtttgtcaaagcaagttggacaaagggcaacaattgttgtagttgtaacaaggttgcggggttagccgcaaactgctggtagaaaggcagcaactgttgctgcgtcaagaaagaaacactgcttgctgcagctagctgtttaaatggcagtaatatttgctgctgcaaataaacaacggggttcagtgccgccaattggttaaatggaaaaaactgttgttgatcatagtaggcagtagctagctggctgaatggtaatagctgctgctgcaaataatcagcaggggtcatcgtatatagtgggtataatggaagaaattgttgttgctgatattagggaataaagggttgccagcactacttggttgatcacatgtagcactagttgctgcagctgctgtgccttgatggtatgtaactatgtctgcaccaaagatagggctgccgattgatgaaactaggagtgataaaggtatgctgcttgctacgattgcatgttgtagcctatagggttgaagagatcagttttcacatactgtagctatcattgatgtaaggtatgggggatagaaggaatgcaataggagcgtgtgagcattgagggtgaattgacgcgttagcaacacatgcctagagagcagcgagcataaggaggtgcagtatcttggtcgccattgttgctctattgttgctactggattccac

SEQ ID NO: 53997 - DNA, 1028 bp, Zea mays
  Clone ID: MRT4577_149245C.1
aattcccggccggacccacacgtcatctcccccctcacctcgctcgcctacgtacgtctctctctctccgccgcgaccccccacaagcggcgccggcgcccgcccgcgctgcagctaaaccaaaccctaagccacggccaccgccctacgccgcgggctctccgcgatgcgccggtgcgcggaggcgatcgcgagggccgtggtcgagttcctcgacgccgtcatcctggccttcatccgctcgtgcttcggcgcgcgcccccgccgcggctccggcctccgagatgcgctcgtgcgcggggatcgggccgcggaggtcatctgggatgaggaaggcttggtaagggacggacgatttcatgaggatttggctgacgggtgtggaattgatgaggagctcagacgcgaggcaagttacctgaagctatgcggcactatctctgaaaccccagctgaactacgcaatgagcaatcgtatgaaaacaatttggaaactactaatgagtgtgatagcaagctcacgtatggaccaccggcaaattgcaaattgctgtttgaagctaattcatcacaagggcaacgcaatcccagatgtgaggagcgtcactcgctcaggtctatactgaacagtgaagatgctgggcgtcatcatggagctgaatatgttcctcgttcagcttcctcggaaaagaggctgtttcaaaacatgcaacacaagccacttgattctggtggttcgccgtttccaactcctctagttctcagggatgacatgcagacccctgggacagcatacgcttcacacagagggacctctatatctggaaagcgtgtgcggactcggaaacaattcatataccctgtcctcagatccatcgagaacagacttcagcagattgaactgacagaagactcttcaccattggcatcgtccgatcctctaaaggagagagacttgggagcagattctaccaaggatccaacccaagcgtcttcaacttcagcccacgcgtccgcggacgcgtggg

SEQ ID NO: 53998 - DNA, 758 bp, Zea mays
  Clone ID: MRT4577_149246C.1
aaattgttcccttctttacccccttggctctttctcaatggttgctaacccaaaaattttccttaaaggtcacaagaatctcatatagttcccttttttcccatatacctcacataaatgatctctacagtttgaaaacccccatctcttcagccctataggctccaacaagcaatcgcagcaagcaacatacctttatcacccttgttgtttcaacaatcgccagccctatctttggtgcagtcattggtacaaaccatcagggcacagcagctgcagcaactcgtgctacctgtgatcaaccaagtagctctggcaaacctttctccctactctcagcaacaacaatttcttccattcaaccaactgtctacattgaaccgtgctgcttatttgcagcaacaactattaccattcagccagctagctactgcctactctcagcaacaacaacttcttccatttaaccaattggccgcactgaaccccgctgcttatttgcagcagcaaatactactaccatttagccagctagctgcagcaagccgtgctttctttttgacacagcaacagttgttgcctttataccagcagtttgcggctaaccccgcaacccttttacactacaacaattgttgcctttggccaacttgctttgcaaacccagagtctctaccacaacacatattggggtggcctttttagatggttatagctggaataaaaataaagttttggatgagtttgtggccaccgaa

SEQ ID NO: 53999 - DNA, 820 bp, Zea mays
  Clone ID: MRT4577_149247C.1
tcggaccaacaagcatcattttagagatctggaaatgtaacttcttatttctggttggccacatacataatccaaaaaaccttattattgaatcacaactaacaagcaatctaaaagagggcaccacccatgatttctcacatggcaggagggcgttccttcttccaaaatacgttgcacaaatggtagcttcagtatgtgaaaacccaggtcttcaaccatatacgcttactcatgcaatcacagcaagcaccatacctgtatcaaccttgatgactcaacagtcgccagtcctatctttggtgcagtcattggtacaaaccatcatggcacaacagctgcagcaactcgtgctacctctgatcaaccaagtagctctggcaaacctttctccctactctcagcaacaacaatttcttccattcaaccaactgactacactgaaccctgctgctcatttggagcaacaactattaccattcagccagctagctactggctactctcaacaacaacaacttccttcatttaaccaattggccgcactgaaccccgctggttatttgcagcggcaaatactactaccatttaaccagctagctgcagcaaaccgggcctccttcttgacacaacaacaggtggtggctttctccaacaggttgggggtaaccccgcaaccctcttacaactaccacaattggtggcctttggccaacttgctttgacagaaccagcgggctcctaccaacacacatcattggtgggggccctctttagaatgcttaataagtggaaatcaatataaaggttttttgggtgg

SEQ ID NO: 54000 - DNA, 608 bp, Zea mays
  Clone ID: MRT4577_149248C.1
actacacgatacgactgctagccaaatacgcgcccgacccctagaccccatatccgccgcggcgtctggatatctactgctggtcttggcggccgaggggccatggtgcggctcgcgatactctctgcaggcggtggacggtccggacatgctactgcaaacgcggggctgggttcgggcctcccgcgcactctgcgccagctgcagatttccgtgttgggcgcctccactttggacgcggcaagcatcagtcatagtcatcatccgcctccttgggctcgttggacaccatgggtgacgactcgctcgccgtcgcgtgcgggcaggtcgttggaggtgactagtcacaggaacgaagtggtgtagccggctggtcaactccatctacatgctgggtgctaccacctgaggttctgaccatgctggccctgatggcaacggcttgggcggagccgacgcagccaaccagtccgtgtccggcggtgcagcagcttggcgatgggaggacagaacggctgataaggcgcaccgctggtacgctgaggtctatctgggtctcgacctcgtccggcacggcgcggtcttcgtccgactgtctcaaatactta

SEQ ID NO: 54001 - DNA, 431 bp, Zea mays
  Clone ID: MRT4577_149249C.1
gccccctcgcgagtttttttttttctttttttttttttttttttttttttttttttttttttttttttttttttttttttttttttgagaccccaaagtaccttttttttgggggaacggaaaaaagccttataacaacggccctcacgtagggactttgggagggggtcctgggttttttgcccaaacccgggcaggggaaacccccccttccgggaacggagggggggagggcaaacaattggtgttttttaccggccgccctcggttcaaacagacaaaaccaaaagggaaatgctgttggaaacccccttgggggggatcccgggggaaaacccctttgggtggggggggggggggtaaaccaggggggggggaacccggggcggcccgaaagagattttgggggcgggtgtggtgagcttggcccc

SEQ ID NO: 54002 - DNA, 355 bp, Zea mays
  Clone ID: MRT4577_14924C.1
gagtgactttttttaacctcagcctgaaattcgctctcacgaggagtagaacccaggacctaaggagtgctactcggaaggagtgctactcggaccacctaactaactcagctagagaccctttcgctccctgaagtgtttagtgtttaacaatcaacttaactttttaaggtgagcattaactagactttgattttactaaatgttgaagaatactgcacacaagttttattcattcattgaactacttagctggctactggccagttattgactatatactttggcatctaaattttatgatcaggtattcatatgccattccatatagaaattgaatctattaccagtggat

SEQ ID NO: 54003 - DNA, 979 bp, Zea mays
  Clone ID: MRT4577_149250C.1
aacatataaaagtgggaatacagtaactacaattgagcggcagtggccaccaatcaatcaaacctctcttatgctccttgctcctctctacatgcagttgcataacgcgacaccaccacctaaatgctcacagctgctgatagcttgcctttttccaacatacctggacataagaggatacacttgaatatgtgtaaaaccaaggctcttcaaccatataggcttcagacagcaatcggacaagcaacatacctttatcgaccttgttgcttcaacaatcgccagccctatctttggtgcagacattgggacaaaccatcagggcacaacagctgcagcaactcgtgctacctctgatcaaccaagtagctctggcaaacctttctccctactctcagcaacaacaatttcttccattcaaccaactgtctacacgtgaaccctgctgcttatttgcagcaacaactattaccatttagccagctagctactgactactctcagcaacaacaacttcttccatttaaccaattggccgcactgaaccccgctgcttatttgcagcacgcaaatactactgccatttaccgagctagctgcagcaagtcgtgcttccttcttgacacagcaacagttgatgcctttccacaagcagtttgcggctaaccccgcacccctcttacaactacaacaattgttgccctttgtcccacttggtttgacaaacccagcagcctcctaccatttacacatcattggtggtcccctcttttaaattaattattagttgtaattcaataataaatttttcgccccccccccgcccaagcgtaaataagaagtttcatttccagattggtaatgtgatattggtccccaagggtgttccatattcttttctaagattgggagtaacacctttaaatcaaaaaaaaaacaaaaaaaaaaaaaccccccccccgccccgccgcccgcttga

SEQ ID NO: 54004 - DNA, 309 bp, Zea mays
  Clone ID: MRT4577_149251C.1
ctgagccatagctgacccagtgagggtgtggctccggtaccagcctgagtgcgtcatgggctcgggaccatcgctacatcagtgcttctgctatattgcgttgaccgactatatccgcagacgcatgtcatcgtctacttaacctgcagatctatagctgtttctaccttggggagtagcttcataacatctggaataccattgaatgtgacacttcaccgatcgaactcactaatttaccacattcatgggcactcaacctgcatgcaataaatgtatcactactcaagtgactaactactacacatg

SEQ ID NO: 54005 - DNA, 498 bp, Zea mays
  Clone ID: MRT4577_149252C.1
ctattgacataccacgatatgacgcttcctactcgcctacctcactgttctacacctttcccccttgtgccaattccttactacgcgcgcctctccacgcggaccacgatcccatgagacaatgcatctcaatccacatccgcaagaacggtatccagcaacgaaacgcgcagctgcaagctgcactgcctcgagcatggcattcacgctgacgcgcatatgcccggagactacgaacattggagtgaagcgatgatgctttcacaccgtactacagtgacactcgttcgctgcgaagcacgtgacccgggctgatatatgacgaccttgaacccactgtgatcaatgacgtgaaaactgagacctacagccagatcgtcctccctgagcagctcatccaagcaaaggagaatgcatccaacaactttgaccgcgagctatactgcattggctatgagagcgtcgagctgcgcaatgatcgcatcaagaaccatgccg

SEQ ID NO: 54006 - DNA, 712 bp, Zea mays
  Clone ID: MRT4577_149253C.1
aaaccagatacaggggtttgcagtagattcatgagagcaacaatggaatccgaaatattagccatcgtcatgctaattgttctttatacatgagttgctaacacgacaatgttcgctcaatgattacacgctgagataggctttcctattttcgccataccttccatcaattatagctacagtatgggaaaacccagctctccaaccatataggctgtaacaagcaatcgctaaaagcaacatacctgtatcgaccttgttgtgtaaacaatcgccagccctatctttggtgcagtcattggtacaaaccatcagggcacaacagctgcagcaactcgtgctacctgagatcaaccaagtagctatggcaaacctttctccctactctccgcaacaacaatttcttccattcaaccaactgtctacactgaaccctgctgcttatttgcagcaacaactatcaccatttaaccagctagctactggctactctcaacaacaacaatttctttcattcaatcaactaactggggggaaccctgctggctacttgcaggcaccacaactactaccatttaaccaacttggcgggagccctgatggcttcttactggaacaacagacttctggcctttcatctggaagctgtggaaaacaatggttctttcttgcgacaacaacaaatggtggccttttacccacagggtggggg

SEQ ID NO: 54007 - DNA, 317 bp, Zea mays
  Clone ID: MRT4577_149254C.1
cccccgggctgcaggaatggggcacgtggatacatttacgtggcgaactgaccctgcagtcagtgcagagccgcatcacgcaccagttcagcctgcccaagacgtcgtctgagatggcaagtattgataaattcctccagttccaggacgcggtgccttgtaagatccgtgccaagcggggatgcgccacccatccgcgcagcatcgccgagagggtcggtgaattcattttcttccatagatttccttaggtttggaagcctgcagctgagcgatttgctgatctgtggtgctcaggtgaggagaacaaagatcag

SEQ ID NO: 54008 - DNA, 902 bp, Zea mays
  Clone ID: MRT4577_149255C.1
acgcggggaaccatattattgagaccaacaagcaacatagaaagtggaatccagtagcaacaatagagcaacaatggagaccaagatattttccctccttatgctccttgctctttctacatgtgttgctaacgcgacaattttccctcaatgctcacaagctcctatagcttccctttttcctccataccttccatcaattatagcttcagtatgtgaaaacccagctcttcaaccatataggcttcaacaagcaatcgcagcaagcaacatacctttatcgcccttgttgtgtcaacaatcgccagccccatctttggtgcagtcattggtacaaaccatcagggcacaacagctgcagcaactcgtgctacctgtgatcaaccaagtagctctggcaaacctttctccctactctccgcaacaacaatttcttccattcaaccaactgtctacactgaaccctgctgcttacttgcagcaacaactattaccatttagccagctagctactgcctactctcaacaacaacaacttcttccatttaaccaattggccgcactgaaccccgctgcttatttgcagcagcaaatactactaccatttagccagctagctacagcaagccgtgcttccttcttgacacaacaacagttgctgccgttctaccagcagtttgcggctaaccccgcaaccctcttacaactgcaacaattgctgccattcaaccaacttgctttgacaaacccagcagcattctaccaacaacccatcattggtggtgccctcttttagatttcttatgagttatagttcaataataaagttttttgtctgatgtttgtggcttcccagaaataagaaagtacatttctgaaaaaaaaaaaaaaaaaaagcggcc

SEQ ID NO: 54009 - DNA, 252 bp, Zea mays
  unsure (1)..(252): unsure at all n locations
  Clone ID: MRT4577_149256C.1
aaacctaaccctcggtcgcngcgcgtgacacgntcgagtnctcgctgcgcgagtcgcgcgnacgccacatgagttcacatcggaancctctacggtgcanaganctggaatcgtgagacagaaatagtgctttatgacgagactccaggagtcagtgtgagtnnagtangattaggtagtctcagtatggtgattacaacagnttccatgagaagatctgatntgcttcgctttgtcaaagatctgtcggta

SEQ ID NO: 54010 - DNA, 777 bp, Zea mays
  Clone ID: MRT4577_149257C.1
cgggatcaacactattattgagaccaacaagcaacatagaaagtggaatacagtagcaacaatagagcaacaatggcggccaagatattttccatccttatgctccttgctctttctgcatgtgttgctaacgcgaccatttttcctcaatactcacaagctcctatagctgcccttcttcccccataccttccatcaatgaccgcttcagtatgtgaaaacccagcccttcaaccctacaggctccaacaagcaatcgcaacaagcaacttacctttatcacccctgttctttcaacaatcgccagccctatctttggtggagtcattggtacaaaccatcagggcacaacagctgcagcaactcgtgctaccagtgatcagccaagtagctctggcaaacctttctccctactctcagcaacaacaatttctttcattaaaccaaatgtgtacactaaaccctgttgtttatttgcagcaacaacaactactactatatacacagcagatctgctctgtactactacagcaacacatttttttatcataaacaccaagggcccgcactgaacctctctgtttattcgcagcagcaaacactactaccattggcccaggtagctacaacaaaccccgctttcttcttgacacaacaacaattgcttgcgttctaccagcagtttgtggctaaccccgcaaccttttaacaactgcaacaggtgctgccctttgtccaactgctttgacaaacccagcagtcttctaccaacacaca

SEQ ID NO: 54011 - DNA, 326 bp, Zea mays
  Clone ID: MRT4577_149258C.1
gatgattctaggatatcttcggttcctgtttattattccagaaagctactatcgctattgtagcatcttccactgtatatttctgaaatttttagatctattgtctgtcctttatttttatatctaatatctcattatttttctccacttttttataatcatttatattttatttcatttttagttttattttttttattttttttatttttttattttttttttatttatttttttttttttttttctttcttttttttttttctttttttttctttttttttttttttattttcttttattatttatttctctttatttttttt

SEQ ID NO: 54012 - DNA, 1752 bp, Zea mays
  Clone ID: MRT4577_149259C.1
cccacgcgtccgcggacgcgtgggatgaaacactacctggacttacctcagttgcatctggcaaagcagtggagctctttgctaggatgttacatcatcctgacgagatacgggccccaggcgatactgctggtacagaaacagaacatcaacttggtctattgccacatcagctacgaggatcactccccaagtgtgatttatttgtggagctcaacaattcctcagtcaactgtactgcatgttctgttgctgtattgtcggagtatagaagaagaggattggattttgtcatgcaggctatcaactatccagcatatctgaaagattttacaggcatttctgattcgaaaagaccagatacttgtcctaaaataccgcccaacatctctgtaaattcagacaagatttctgatgtccgatgtctactattgggtgctggaactcttggatgtgatgtcgctcgcattcttatggactgtggtgtacggaagataacagtagttgatagtggtcatgtagttgtgtcaaatttagcgagacaatcactctatacttctgatgaccgtggtgctccaaaagcaactgcaatacttgggcatctagtggagagatgtccttcagtggatgcacaaggcattaaaatggaaatacctatgcctgggcatcctgtgtctcctggtgaagcagcgggtgtgctccaagattgcgagcgccttaaggaattggtgttgtcccacgatgctatcttcttgttgaccgacacaagagaaagcaggtggcttccaactctcctatgcactaacgaaaacaagattgctatcactgcagcattagggtatgatagttaccttgtcatgcgacatggggctggccctggcataagctgtgaagcttccagtgtggtcactgccatagacaagatgtccacggaggatgcccttgggcgtcaaaggctggggtgttatttctgcaatgacgtcattgctcctgtcgactcagtttccaatcggacactggatcaacaatgtacagtgacacgaccggggttggcctctattgcatcaggacgcgctgcagacctcttcagaagaatgttacaccatcctgatgggatacatgctccaggagagattgctggtacaggcagtggtcatgagcacggccttttacctcaccagatgcgtggatcactatcgcagtacaacatattaaccctgttgggctattcctcgagtaattgcacggcatgctcccatgcggtattgtatcaatatcggaggagagggatggatttcgtgatgcaagtaatcaatgaaccaacctatttggaagacctgaccggcctcacggagttgatgaaatccgcgtcttgctcacaggtcgagtgggtagatgaaattgatgaagacgatttcgtcgaggtctgatatgttacatggttttgacgactggtagatagtatcattctttacaacatggtaaagagatgacgaagcaatcaaagcaaccaccctatatatttgtaactcgctgctagctttttactctgtccgtcttaaaatgtaattcgttttaggctaaacctacattcattaatctgctccgtctcaaaatgtaattcattttaggctaaacctacattcattaatcaggtactcgtgaatgtagcttgaatgtatgtctacatttataatcattcaaataatttgaatgtggacttaaacaaaagagggatatatattttcatcc

SEQ ID NO: 54013 - DNA, 369 bp, Zea mays
  Clone ID: MRT4577_14925C.1
gaagctgatgctgtcaaaagatcatttgctggggactcgtgcaggtaattattatagcaattctgccacttcgataaaaatcctaaggactgagggaacctataaggattcttttttcgaggcacctgattagttgatatttctgcaaccatagatagtcatagctgtgatttgattgtttcatgcctacttgaatgtagcaatttgtttcctactctctcagtttcaaatcgtaagtagttagcttttgctacgcacctagatatacattatgtatacatagtaaaagctatgtatatatagaaaagctaaaaccacttacaatttggaacggaaggagtacgatttccttaagtgcaacagtagggt

SEQ ID NO: 54014 - DNA, 2040 bp, Zea mays
  Clone ID: MRT4577_149260C.1
aaaataaatgttcatgagtattaaactttcatgtacacctccttataatagctttttcattctcccacatccaacaatgccgatgacaattaatgagcgtctgacaccaatgaagtatagataatattgtaaaagatgaggtccgagtgtccgacaccaatgaagtatagataaagcaagactaaacaaccatctacgcgaatttggcgagctcctcggcgaacgccgcagcatgaggttcctcgacgcagcgaagcatgagccggatgccgcgcttgggcgcgggcggtttgaggtagatcaccgacgcgacgatgttgacgtcgtcgttgagcgtgaagacgtaccccggttcgccgaagccgtagtccacctcgttgaacccgacgcggctccagtccgacaccgtcaccgtgccgtagtccagcggcacgttgtagtggtcgtccttggcgccgccgcgcatccagtccgtgaaccgcgtggtgagcgcctccttggcctcccgcatcacgccgaccacctccggaagcgacgcctcacggatcgccttgctggtccgggtgatgcccacggggtacacgcaattgccgtagtagccgtccaccgacggcagcacgccgtggaggaggtgccgcgtgctggcggcgaagccgagccggacctcggcgtcgtcggggagcgccatcgccagcgcgcggcacttgaacaccaccgccgtgacagcgtcgaaggtggagcaggtctgccccgtcgcgtccttgaagtcgtccttgatgcgcgcgatgctctccggcgagatctcgaccacctgggtcacgaagctgaacgccgtgaacgacggcggggggccgcgcggcagcttaggcgggtccgggatcgcgtcgcggtcccagaccggcgcaaccgacggcgccggcagcccccgcgccatctcgccggccgccttgaggaactgcgccgcgccctgcccgtcgaacaccaggtggctgaagcagatcccgaccgcgaacccgccgcaggcgaacttggtcacctgtgccatgaggacgaggtcctcgagcttctcctcggggggaggtcgcgggaggagctcctccttggggatgagcagagggcgctcgaggtagttgacgtcggcgagcgcgcagctcgcagcggcctccacgaaccagacgccctgcccggtgcactccaccacgggctccccggggctggcgtccgcgatgcggccggccaccgggtagtacggcaccagcgccttcgcgaagccgtcgcgcatcgcggccacggcggcgtctttgtccccgcctgctcctacggccgggggaaaaacctggatgaaatccaccgacacgcgcaccgccgcggtcttgtcgatggaggacagtgggagggtgccgccgggtgttggccccactggcgcgacgagctccggagccgatttcacgacggtgggggcggcggcgacggtagacatgatggcgtcggctggtgtagcggagcggtgggcgcgagttggtgcttgcggtgctcaccagcagcaggtaagtggagcggagggtatttccagctgcggcctagtttggcacgagctgtcgagctcaacgctggattggagtttggaagtcgtcggggtctgttaggcgaatctgatcaaccaagtagcacgagttgctgcagctgttgtgccctgatggtttgtaccaatgactgcaccaaagatagggctggcgattgttgacacaacaagggcgataaaggtatgttgcttgctgcgattgcttgttgaagcctatatggttgaagagctgggttttcacatactgaagctatcattgatggaaggtatgggggaagaagggaagctataggagcttgtgagcattgagggaaaattgtcgcgttagcaacacatgcagaaagagcaaggagcataaggagggaaaatatcttggtcgccattgttgctctattgttgctactggattccactttctatgtcgcttgttggtctcaataatatggttgatcccccgc

SEQ ID NO: 54015 - DNA, 439 bp, Zea mays
  Clone ID: MRT4577_149261C.1
ggacagaaccaatggcctgtttaaacaaaactcagcggcaattttgcccaaaacagtagtaaactgccgtaggccactgttgctgtaatctcagcacgtcgtttttgattttggggggaggcttaccccagttccaactaaaagcccttttagcggtttttacttacacggattttagtatctttggatccaatatttgcaactttactttaaaagcctccatcggcctttgcttccttgccttgttctttaggaaacggcaatggttgatccaaaccaccttttgttgcatctccaaaaagttccgaaacaacagaagcccttgctgacttcgttttttaataatccccaaacaggtcaggggtgggagcttcctttgcctaatggttgcgaggctcgctcgataattttaccttagcctaagaaaacacgggggttt

SEQ ID NO: 54016 - DNA, 606 bp, Zea mays
  Clone ID: MRT4577_149262C.1
gagaacaaggataaacgactagatatctatgtattaacacaataatggacaccgacatagttaccatggacggcgagctgctgaaggcgcaaggcgacgtgtggcgcctcatgctctactacctgacagtccatgccgatcacgtgcacggtgcacctcctgatcccgaccgccatccacaagctaggcctgtatgtcaccctgacggacctcgtgcacgcactgacactgatcatctgcgaggtcccctgcctcttcctgaccagtgtgatactgctggcctggtctgccgacgtcttgtccacctacgactggtatgacatcttgaatacgctgatctgtatgttgtggtaggacaagcactcggacgaccacacctaccacaactaattccaggtggataccgacttacgacactacgtgtaagacgaaatgatctcgtggcaagtgtgctcagaaagaggaggacgaggaccgccagctgccgccagcgctcgatgtcctgcactttatggccctcgaccaccacagtaccaagctgctggaccataagctgtacatgtgcgagaatgaaagcgtgtccgcacaccacaacctgtaccatcg

SEQ ID NO: 54017 - DNA, 326 bp, Zea mays
  Clone ID: MRT4577_149263C.1
aaaaaaaaggggggttttaaccccccccaaattaaatcctgcccttcacaattatacccttcaacaaagccaaaccctcccatgggtttttccgttttcggcctttaaatcgaaattgttttcaatgcattttccaaattttcccttaataaaccggctttgcaagaagcttttttaaaactttcttacaatcgtggggagatacaaatttttgaatggtggcaaacaaaaaaaagtttaaagacttttttccaacaaatcggattttttttttaaatgctgccgaaaaaaaatgcctttaacccggcgagtttttaaaataattt

SEQ ID NO: 54018 - DNA, 294 bp, Zea mays
  unsure (1)..(294): unsure at all n locations
  Clone ID: MRT4577_149264C.1
caaccggaacggngnnccaaaaaaaagcaaaaaaacccngggaccgggacaaccgacccgaaaaggacccaaaaaaacccacggcaaaaacaccggccacacaaaggaagcggaaancnanggaaaaaaaaggcnggagcaaagcccaaccaccaccaacgccagcaccccaggaaaaggaccgaccggaagncaccccaaganccgggggaaggcaaccaagncgcagcccggaacgaacccgnncacgggcccaacgcacaaaaagcccggaaagaaagaggcgacagaaac

SEQ ID NO: 54019 - DNA, 433 bp, Zea mays
  Clone ID: MRT4577_149265C.1
tgctatccttttctttcccgttctacagccgtctggtcgcccacgtccgcccttgccaccacccgcagccttctctgtccccgcactgctgccacacgccttcgacgcaaaactcaggtcccttgtaagggctcagcgctagtggatacacagctacactcccacactctacatccaatacagcttcttcacaggcgaactggctgcaaacacttgtcttagatgtcaacctcgctggagataacaccgtttgtgaggcgccctgctcctggcaaggcgggtaagcctattgccatccgctccaactttttcgaagtcctgcaactcccggacatcacagtgcatcactacgacgtaacgattacgccagacgttccacctccagtgaaccgcaaggtgtttacgcaacttctggaaacctaccgcgactctg

SEQ ID NO: 54020 - DNA, 576 bp, Zea mays
  Clone ID: MRT4577_149266C.1
aagaaatgtatggaagcctgaccaccaggtacacaacagtgcaatggacgagctcgtctgccccgccgcctcatcatgcagctctccctcgcccacctccttcttcgcggccggccacgtaccggagctcgagttcgtgtcctgggatgtcccggaggaatggatggagggcaccgactggttcgatgaacctttggatggcgacgagggctcgcgctcggcgggcaacgacctgtccggcgaaccgccggcgcctgcgccgaagcggcggcgtggccggaagcccgggccccggaccaacggccccactctcagccacgtggaggccgagcggcagcggcgggacaagctcaaccgccgcttctgcgagctcagggccgccgtgcccacggtgtcccggatggacaaggcgtccctcctcgcggacgccgtcacctacatcggggagctgcgcgaccgcgtcgagcagctagaggctgaggcgaagcaggcctcggccgctgtcaccaccgcggtggcagcggccagccactcgttcgcccccctgcacgagaagctggggctggaggtgcggat

SEQ ID NO: 54021 - DNA, 210 bp, Zea mays
  unsure (1)..(210): unsure at all n locations
  Clone ID: MRT4577_149267C.1
gccccgggaagaaaaggcagcccggccagaaggggcgagcaggaggaccccagccaaccccgggnggggggggggacaacgggcggggggggggggcnagcgcgcggccacagcagaaccgggacgcacaagggggcnaaagagacccaagccgggaagagacacagcggcaggccagccccaacacaacgccccaaacggcgaccagag

SEQ ID NO: 54022 - DNA, 889 bp, Zea mays
  unsure (1)..(889): unsure at all n locations
  Clone ID: MRT4577_149268C.1
atttctcgatctgagccgcgcaaaaccctagccgtctccaaatcagtcacccgccagccgccaccgccaccgccaccgccgccacctccatggacacttccctggctgccgccgctgtcaccgcagaggcctccgcccccgccacagcatcaacggaaccttccgcggctcctgatgcctcccccgcagcctcctcctcctccgctgccgccgccggcgccgaagacctcgcggggggcgtggcgtcattgagcctggacgagcggttcgacttgctgatgagcataggcgaggagtgcattcagcccgacgagctcaagcggcttctgcagaacaagcccgtccctatctgctacgacgggttcgagccctccggccgcatgcacattgcccagggtgttgtgaaggcaattaatgttaacaagatgatcagagcgggatgcaaagtgaaaatctggatagcagactggtttgcacagctaaacaacaaaatgggtggcgatctgaaaaaaatccagactgtcgggcgctacatgattgaaatatggaaagcagctggtatgaaccttgatggtgttgaattcttatggtcttcagaggaaattaataggcgtgcaaatgaatactggccacttgtaatggacattggcaggaaaaataatatcaaaagaataacgaggtgttgtacgattatgggtcgctctgacaatgaggaattgactgctgcacagatcttctatccttgcatgcagtgtgctgatatattcttccctgaagctgacatatgccagntgggtatggaccanaggaaaggttacatgttagcaagggatattgcgatgacatcaaaaggaaaaaacagccattattctgtcacatcatatgctcc

SEQ ID NO: 54023 - DNA, 302 bp, Zea mays
  Clone ID: MRT4577_149269C.1
cccacgcgtccgcccacgcgttcgcccacgcgtccgcgtttgtatatctaagcacagtactgctcattgcatttgggtttcatggattttgtcttcattatcttatatttgttatgcaccctcattttttgtgcaggaggcatgctctcttacttcccaagatctcttgcacggaaacacatccaaagatagcacagcttctagaacatcacaaacctaatgtgtcacttcttatgctaaagtgtgcagagtgcgatagcttctctgctacagaaaactttgaaaaagatggcggttcatct

SEQ ID NO: 54024 - DNA, 276 bp, Zea mays
  Clone ID: MRT4577_14926C.1
agtgaatgccttttttttttgattgccatggtagattacataaaataaatactgttaattggggggccgcacgcttctaattcgccatgaagagcccgcacgcacccttcctgggatagaaggaggactaaagccggtgggcgctggaacccatcgcgacacggccacaggttggctagggaatggcgtaatgtgggcacaccggggcctttgggtactgcagaaagcgcgagggtgccaccgctaaatcaccccgatatgataatattctccagt

SEQ ID NO: 54025 - DNA, 364 bp, Zea mays
  Clone ID: MRT4577_149270C.1
gagctcaccctccggcggccgccctcctttttttttttttgggggttttttttaaaattttcccccgttttcccccccctttttgttttttttttttttttctccccctggggaaaaaagggttctgtgaaaaacccacactcgaaaaaaaaacccggggtgcagggaaagaacccccgttttaaaccacaagccttggggggcccaaaggggacctaggaaacctttttgggctagaccccaacatctaaatttacaaaaaaacccccggggttaaaggaaatggaaaaaaccccccgggacccattagcccctatttttgaaacttgaaacccttgaaggagcccgcaattcctccaggggg

SEQ ID NO: 54026 - DNA, 362 bp, Zea mays
  Clone ID: MRT4577_149271C.1
actcagatctcgccgtcaagcaaacaaacaaaatctcacacttcggagcggggacccagagcgacatatatgaagagtcgcattagcactaacaaagccccgtctcagggacacacgtacggcatggaccaaagccccctgcctgggccaaggatcatatcatgattatcatggcttcatgggatggcaacggatcggagcccatgctacaccaccatgaggacacacctctctactcggagggccggcgggatcccgagcagaggccccgcgagctagcttggactgtagctattgagcaacattccttacttgggccacgggggctttccgccagaggtgtactaaccaagctgcaccac

SEQ ID NO: 54027 - DNA, 776 bp, Zea mays
  Clone ID: MRT4577_149272C.1
ccggccagtctcttgctatcgtcggtgctggtggtggtctcggttccatcgctgttcagtacgccaaggctatgggtatccatgccattgccattgatggtggtgaggagaaggagaagatgtgcatgtctctcggtgcccaaaccttcatcgacttcacaaagactaagaacatcgtcgctgatgtcaaggctactaccaacgatggccttggccttcacgctgctctcctcgtcgctgctgccgagaagcccttccaacaggctacccaatacatccgatccaagggtaccgtcgtctgcatcggtctccccgctggtgctcagttctctgcccccgtcttcgacactgtcgttcgcatgattcagatcaagggatcttatgtcggtaaccgtgccgatactgctgaggccatcgacttcttccgccgtggtctcatcaaggttcccttcaagactgttggtctctctgagctcaacgaggtcttcaagctcatgaaggctggccaagttgctggtcgctatgtcgttgacaccagccgataagcgcgcggctgtcgcttgggtagtgcgggaaagcacaccccaaaagtaaagggccacctatcgccaaaagggtgatcgataacctactaagaggagttcaggccggagttgatttggggtttcaagcggtgatggtaaccatgaatcttggttacaattttgtgtacagccctagtttatgagtttttatgattttgtatagcatggataacagaaccaatacttcgatac

SEQ ID NO: 54028 - DNA, 608 bp, Zea mays
  Clone ID: MRT4577_149273C.1
ggagctgagaatgacccagagagctggtggacctccagtatagtctggctaagtcctacgccagcactcccgagctcaggaagacgtggctggacagtatggccaggatccatgtcaaaaatggggatctctctgaggcagcgatgtgttatgtccatgtcacagccctggtggcagagtatctcacacggaaaggcatgtttagacaaggatgcacagcattcagggtgatcaccccaaacatagacgaggaggcctccatgatggaagatgtcggaatgcaggatgtccatttcaacgaggatgtactcatggagcttctagaacaatgtgcagatggactttggaaggctgaacgctatgagctaatcgctgacatctataaactcatcatccccatttacgagaaacggagagattttgagaggttagcccatctgtatgacacccttcaccgggcctacagcaaagtgaccgaggtcatgcactcgggccgcaggctcttggggacatacttccgagtggccttcttcggacaggcagcgcaataccagtttacagacagtgaaacagatgtggagggattctttgaagatgaagatggaaaa

SEQ ID NO: 54029 - DNA, 810 bp, Zea mays
  Clone ID: MRT4577_149274C.1
gggagcccacgcttccggaaacataaaagggggaatacagtttcctctttagaccaccaatggcggccaagatagggtccatccttacgctcctggctctttctgcatgtgtggctaacgcgaccatttttcctcaatactaacaagctcctatagctgcccttcttcccccataccttccatcaatgaccgcttcagtatgtgaaaacccagcccttcaaccctacaggctccaacaagcaatcgcaacaagcaacttacctttatcacccctgttctttcaacaatcgccagccctatctttggtgcagtcattggtacaaaccatcagggcacaacagctgcagcaactcgtgctaccagtgatcagccaagtagctctggcaaacctttcttcctactcttagcaacaacaatttcttccattcaaccaactgtctacactgaaccctgccggttatttgcagcaacaactattaccatttagccagctagctactggctactctcagcaacaacaacttctttcatttaaccaattggccgcactgaaccccgctgcttatttgcagcagcaaatactactaccatttaaccagctagctgtagcaaaccgtgctcccttcttgaacaacaacaggtgctggctttttccaccagtttgcgggtaaacccgcaaccctcttacaactacaacaattggtggcctttgcccaacttgctttgacagaaccaacgggcttctaacaacaacacattattgggtggtggcctcttttagaatgcttattaattggaaatcaataataa

SEQ ID NO: 54030 - DNA, 699 bp, Zea mays
  unsure (1)..(699): unsure at all n locations
  Clone ID: MRT4577_149275C.1
ttttgttttgaattctcaatgaatcgggtatcacacattaagggatgatttaatagcttgctactcccaatcttcgggaaaataattaatcgaacacccttggagactaatagaacattagaatatggaaatgtaacttcttatttctgggaggacacatacatcagcaaaaaaacttcattattgaattataactaataagcaatctagaagagggcaccaccaatgatgtgttgttggtaggaggctgatgggtttgtcaaagcaagttggacaaagtgcagcaactgttgcagttgtaagagggttgcggggttagccacaaactgctggtacaaaggcagcaactgttgcggtgtcaagaaggaagcagggcttgttgtagctagctggccaaatggtagtagtatttgttgctgcaaataagtagcagggttcagtgcggccaattggttaaatggaataaattgttgttgctgagagtatgcggtagctagctagttgaatggtagtagttgttgttgctgcaaataagcagcagggttcagtgtagacaattggttgaatggaagaaactgttgttgctgagagtagggagaaaggtttgctagagctacttggctgatcacaggtagcacgagattttgtagctgttgtaccttgatggnttgtaccaatgactgcaccaaagatagggat

SEQ ID NO: 54031 - DNA, 577 bp, Zea mays
  unsure (1)..(577): unsure at all n locations
  Clone ID: MRT4577_149276C.1
ggccgacgggcacaccacgaacgcacagctggtgcctccactccatgcctagctgagaacaaccaaagagctcaggcaaacctgcttgcctactgtcaacatcaaccattacttgacatgcaaccaactgtctgcactagaaccctgcctggtcattagcagtatcaactattaccatctcacaccagataactactgcctactctcataaacaacaactacttacatagaaccagataggccgcactgaaccccgatgattattggcagaagcataaactactaccatatagccagctagctgaaggacgccgagcaaccttcttgacacaaaaacagaagctggctttctaccagcagtttgcggctaaccccgcaaccctcttacaactacaacaattgttgccctttgtccaacttgctttgacaaacccagcagcctcctaccaacaacacatcattggtggtgccctcttttagattgcttattagttgtaattcaataataaagttttttggatgatgtnaaaaaaataactttttagaaaaaaaaaaaaaaaagctttacctgcccggc

SEQ ID NO: 54032 - DNA, 343 bp, Zea mays
  Clone ID: MRT4577_149277C.1
cgggggggccctgccaattcggtcaaagaaacaggaaccggcaaaaaaacaggggacgggggaaaacaagcgggaaacggcgaaaactaggggtcacacagggaaccaccccacccaggaacaagaataaaggaaggcagcgaaatggcccccaccccccgggttaaaacagaggggagcaccagggagaccggggcagggaaggggctgggccaaacggggggggggggccgggcctgtcctcgacccgccatccaaaaagggaggggggtcaggaaaagaaaccctcaaggggggggccgacaccaggggggggaccctggacacggcttaagaccatatt

SEQ ID NO: 54033 - DNA, 1021 bp, Zea mays
  Clone ID: MRT4577_149278C.1
tcgagcggccgcccgggcaggtgcttttttttttttttttttttttttttttttttcttttttttttttttttttttttttttttttttttttttttttttttttttttttggattaaaagcttgttactcccaatcttaggaaaagtaattatcgaacccccttggggaccaatatcacattaaaatctggaaatgtaacttcttatttctggttggccacatacatcatccaaaaaactttattattgaattacaactaataatcaatctaaaagagggcccccccaatgatgggttgttggtaggaggctgctgggtttgtcaaagcaagttggacaaagggcaacaattgttgtagttgtaagagggttgcggggttagccgcaaactgctggtagaaaggcagcaactgttgctgtgtcaagaaggaagcacggcttgctgcagctagctggctaaatggtagtagtatttgctgctggaaataagcagaggggttcagtgcggccaattggttaaatggaagaaattgttgttgctgagagtaggcagtagctagctggctgaatggtaatagttgttgctgcaaataagcagcaaggttcagtgtagacagttggttgaatggaagaaattgttgttgttgagagtagggagaaaggtttgccagagctacttggttgatcacaggtagcacgagttgctgtagctgctgtgccctgatggtttgtaccaatgactgcaccaaagatagggctggcgattgttgaaacaagggtgataaaggtatgttgcttgctgcgattgcttgttgaaccatatatggttaaaagctgggttttcacatactgaagctataattatgaaaggtatggggaaaaaaggaaagctatagagtttgtagcataaggaaaatggcggttagcacccatggaaaaagagcaggaggcataggaaggcaaaatttttgggtcccaatggtggttcaatggtggctatggattcccctttttatggtc

SEQ ID NO: 54034 - DNA, 929 bp, Zea mays
  Clone ID: MRT4577_149279C.1
agcttgcttcccaatcttagggaaaataattatcgaacacccttgcagaccaatagcacactagaatttggaaatataacttcttatttctaggaggccacatacatcagccaaaaaacttcattattgaattacaactaataagcaatctaaaagagggcaccgccaatgatgtgttgttggtagaaggctgctgggtttgtcaaagcaagttggacaaagggcagcaactgttgcagttgtaagagggttgcggggttagccacaaactgctggtagaacggaagcacttgttgttgtgtcaagaaggaagcggggcttgttgtagctagctggccaaatggtagtagtatttgctgctggaaataagcagaggggttcagtgcggccaattggttaaatggaagaaattgttgctgctgagagtaggcagtagctagctggctgaatggtagtagttgttgttgctgcaaataagcagcagggttcagtgtagacagttggttgaatggaagaaattgttgttgctgagagtagggagaaaggtttgctagagctacttagctgatcactggtagcacgagttgttgcagctgttgtgccctgatggtttgtaccaatgactgcaccaaagatagggctggcgattgttgaaagaacaggtgtgataaaggtaagttgtttgttgcgattgcttgttggagcctatagggttgaagggctgggttttcacatactgaagcggtcagttatggaaggtatggaggaagaagggcagctataggagcttgtgagtatggaggaaaaatggtcgcgttaggaacacatgaagaaagagcaaggagcataaggatggaaaatatctttgccgccattgttgctctattgttgctactgtattccactttctatgttgcttgttggtctcc

SEQ ID NO: 54035 - DNA, 112 bp, Zea mays
  Clone ID: MRT4577_14927C.1
ctcgagccgattcggctcgaggattcctcaatcgccttcggaaaggtgcacgtcccgcatcgcacactcgtctctcgcatatttacgtgcctgcaaatactcccccaatcca

SEQ ID NO: 54036 - DNA, 443 bp, Zea mays
  Clone ID: MRT4577_149281C.1
aacatggaaggtggattgaggaaccaccattggagaaccaagggggacaaagatattttccttccttatgctcctggctctttctacatgggtggctaacgcgaaaattttccctaaatgctcacaaagcgtcctataggcttccttttttccccaaaccttcataaatatagcttcaggatgtgaaaaacccagctctttaaaccatataggcttcaacaagcaatcgcagcaagcaacatacctttatcgcccttgttgtgtcaacaatcgccagccctatctttggtgcagtcattggtacaaaccatcagggcacaacagctgcagcaactcgtgctacctgtgatcaaacaagtaactcttgcaaaactttcttcctacttttcggaacaaccatttctttcatttaaaccaattgtttaacttaaaccttgttgtta

SEQ ID NO: 54037 - DNA, 1152 bp, Zea mays
  Clone ID: MRT4577_149282C.1
aacgaattttatagaagctggctgaaaagctgagtgtttagcagtccgcagcagcttttggtggtcagaagctgcgaaaaaccgaaacaaacagggacatggtgtcctccctggtccgccaccgatgcttaggcctccatttttgctaggaccctctatgcaactagatgagcttgctgcctttgccccaaggcctcagttacctcagcagccatcatatgtaaagtcggctgccccaacagttgttaagagaccattagcacagcacactcctgagctgacggctatggttcctgcatcagttcgtgtcaagagagaatctgcgctccccaaaccaaaaccaaaggtgcagcagcagcagcagctatcaacagcatccatttcaaggccttcagtgaccctcataagaagtgatgctcggccttcttcagcggcacccaagccgcccaagtatggacgactcctacttggcattcttggaagatatgaaggaactaggggcacttgatgggtaactcatagagtaactgcctgagtgcacttaacagcttaattcatggaaaacctggacatgggacctttttttttttgcaatgtggtaaatggatagtctctgctcagtcaaccggagctgccgcggagaaagaaaatcatgcagtagtttaattgaaaacccgggaaaacgattgtagtctggctggagatgtctgaacaagctgtacaagctcaagctgggagatatttgtggcccaacttgaatagctggagaccttttgcacacttgaatagctgtacaagctggagacctaaaggctctttgtggcccaactgtacacgtttgagatatttggaacttgaatagctgctggctctagcgaaggatatcttacaggtgctctttatgattcatgattgcactggctgatttgcagataataccattacaccagtcgtggggaggactactgttgtgccttaatttttgtatggtgcatttgccttgaaaaccatgacggagttgctgtcctgggaccccatgtaaacttgtgacattcacaaatgtcggtattggttctatagactatagtccggcgacattactggatacgagccacggcttctatataaaagtttcgtgctttctgtgctgaa

SEQ ID NO: 54038 - DNA, 139 bp, Zea mays
  Clone ID: MRT4577_149283C.1
cacaggcgtacgtctaggtagctagcaacgtgtgcgaaaaggtctacgtttagcgatgttgcgcatgaaccacacatgggcccatcctgtccttagtagccagatcaacggacccaacaatgatagccttatgaggcac

SEQ ID NO: 54039 - DNA, 974 bp, Zea mays
  Clone ID: MRT4577_149285C.1
ctggccgggatcactctattattgacaccacaagcaacatagaaagcggaatccaggatcaacaacagagcaacactggcgaccaagatattttccctccttatgctccttgctctttctgcatgtgatgctaaccgcgacaattcttccctcaatgctcacaagctcctatagccttcccttggttcccccataccttccatcaatgatagctacagtatgtgaaaacccaactcttcaaccctataggctccaacaagcaatcacaggaagcatcatacctttatcaccctcgttaaacaatcgccagccctatctttggaagcagtcattgtctcaaaccattacggcacagcagctgcagcaactcgtgctacctgtgatcaaccaagtacctctgacaaaccttactgcctactctcagcaacaacaatttcttacattcaaccaactgtctacattgacaccgcgctgcttatttgcagcacacctattaccatatcagccagctagctactgcctactctcagcaacaacaacttctctcatttaaccaaccggtctaactgaaccccgctgtttatgtgcagcagcacatactactaccatttatccagctagctgcagcaagccgcgcttgcttcttgacacagaaacagttgctgcctttctaccagcaagttgcggctaacccccgcaaccctcttacaactacaacaattgttgccctttgtccaacttgctttgacaaacccagcagcctcctaccaacaacacatgattggtggtgccctcttttagatagcttatcagttgtagttcaataatgaaggtttttggatgactgctgtggcttcccagaaatgaaacaggcctcacaccgcctacactgcctgagtggaattacgttgtagctgctgtaaataaccaggagatttcaatgctgtcagttgcttgactggaataaattgctg

SEQ ID NO: 54040 - DNA, 320 bp, Zea mays
  Clone ID: MRT4577_149286C.1
aaaaccaaaagtgtttaaagggacagactttaatttcaaatgcaaattcttgagccgtttaacagggggtggtgggaggaaacccccaaacttttcccaggacacaaacaaaggttttttaaaaccaaaacctggtttgacaggcaaaaagatttttgcaagccgatcagtttttcttcttcttgtggccggaattattggcgccctttggggggaccttcttgtagttttttttcaaggggggcaagttcttgggtgccttggaaaaattcccctttttaatgcccttgccgaagtaccaatggacaaacccccgcttg

SEQ ID NO: 54041 - DNA, 835 bp, Zea mays
  Clone ID: MRT4577_149287C.1
cgaattcggcacgagggctgtacagagggtcgccaaggccatcaattttaagacctgcaatgctctcctcttgaaggtgaaccaaatcgggtctgtgaccgagagtatcgaagctgtcaggatgtccaagcgcgccggatggggagtgatggcaagccacaggagtggcgagacagaggacaccttcattgctgacctctcagttggcctgtctacggtacgctgtcaactggtcaagatactgtcgaatcgaacgtcttgcgtactgacctggtttccatgactccgtttcagggccaaatcaagacgggagctccttgccggtctgagcgcctggccaaatacaaccaggtaaagcgcgcgcgcaaaccttcttcgtttcccaaccaggctatgctttacctctgaaaccaaacgttcgcggtttgcagctgctcaggatcgaggaagagctcggggatgccgcggtctacgccggagcaaagttcagggcaccagtggagccctactaagaaaggaagaggatggggatgttttcttgtggagctatactagctcgctgctgccttttgttacaatgtttgtacggtcgcaataaatgtatggtcgtctttgctcgagagctactcaggtgattttgtcgtgggagcaccaaaagcagaaaagaactgtttttttcttctctctctctagattctgacgagtggtggtctgcactcgtcgtaatgtcgtttgcctaaactgattttgatggaacaggaaatcttgctggtcttgccaaaaaaaaaaaaaaaaaaaaaaaaaaaaaaaagtactctgcgttgttaccactgct

SEQ ID NO: 54042 - DNA, 1253 bp, Zea mays
  Clone ID: MRT4577_149288C.1
cgacccacgcgtgcgccacgcctacacgagaccaacaaacatctttcaaagcgtattacaacaccaacaatagagggcaattggggccaatatattgtccatccttatgctccttgctctttctccatgtgttgctaacgcgaccatttttcctcaatactcacaagctcctatagctgcccttcttcccccatacctttcatcaatgaccgcttcagtatatgaaaacccagtccttcaaccctacacgctccaacaagcactcgcaacaagcaacttacctttatcacccctgctctttcaacaatcgccagccctatctttggtgcagtcattggtacaaaccatcagggcacagcagctgcagcaactcgtgctacctgtgatcaaccaagtagctctggcaaacctttctccctactctcagcaacaacaatttcttccattcaaccaactgtctacactgaaccctgctgcttacttgcaggcacaacagctactaccattcaaccaacttgtcaggagccctgctgccttcttactgcagcaacagttgcttccattccatctacaagttgtggcaaacattgctgctttcttgcaacaacaacaacaattgctgccattttacccacaggttgtgggaaacattaacgccttcttgcaacagcaacagttgctaccattctacccacaggatgtggcaaacaatgtcgccttcttacaacaacaacaattgctgccatttaaccaacttgctttgacgaatcctaccaccttattgcagcagcccaccattggtggtgccatcttctagatttttttatgctttatactgtaataataaagttctcatactgatatgtgcaacttctcagtaataaaagattagagatctatattttaagttcaaatgcacccaagtgtgttccaccattttttgtttcgctaagaccaaataccaaaacctttcaatcatattattgtatgaactctgcataactccacactaccacttacaaacattatgaaggggttggtggctagatggaggttgcaacctagaggatgagaaggatgatgtgtaaaggttgcatagatgggcttaggatgaaatctgttgttggcctagaatgttggtatctcgattatttgaggatacaatatcgaaagtccatgatatcgaacatatgatcaatttgtttgtttttgccaaaaaaaaaaaaaaaaaaaaaaaaaaaagcttgtactcg

SEQ ID NO: 54043 - DNA, 1323 bp, Zea mays
  unsure (1)..(1323): unsure at all n locations
  Clone ID: MRT4577_149289C.1
ggatgcgacaaacgttggggatgaaggtggttttgcacctaacattcaggaaaacaaagaaggccttgaactattgaaggcagccatagaaaaggctggctacactggaaaggtggtcattggaatggatgttgctgcttctgagttcttcggtgagaaagacaagacttatgatcttaatttcaaggaggaggtaagaatcacaacttcttattatgtttttgtagttttatttacctagagctatagctattccttatgttattctataggggtatggtaatacatgaacatttgttttatattaacatgtactcactttcttggctagaacaacgatggctcaaacaaaatttcaggcgacagcctgaaagacctgtacaagtcctttgtttctgagtaccctatcgagtcgatcgaagatccatttgatcaggatgactggagcacttatgccaaactcactgatgagattggacagaaagtgcagattgtaggagatgatcttctcgttaccaaccnccaccagggtcgccaaggccatcaatgagaagacctgcaatgctctcctcttgaaggtgaaccaaatcgggtctgtgaccgagagtatcgaagctgtcaggatgtccaagcgcgccggatggggagtgatggcaagccacaggagtggcgagacagaggacaccttcattgctgacctctcagttggcctgtctacgggccaaatcaagacgggagccccttgccggtctgagcgcctggccaaatacaaccagctgctcaggatcgaggaagagctcggtgatgccgcggtctacgccggagcaaagttcagggcaccagtggagccctactaagaaaggaagaggatgaggatgttttcttgtggagctatactagctcgctgctgccttttgttacaatgtttgtacggtcgcaataaatgtatggtcgtgtttgctcgagagctactcaggtgattttgtcgtgggagcaccaaaagcagaaaagaactgtttttttttcaatctctctagattctgacgagtggtggtctgcactcgtcgtaatgtcgtttgcctaaactgattttgatggaacaggaaatcttgctggtcttgccataaaaaaaaaaaaaaaaaaaaaaaaaaaaaaaaaaaaaaaaaaaaaaaaaaaaaaaaaaaaaaaaaaaaaaaaaaaaaaaaaaaaaaaaaaaaaaaaaaaaaaaaaaaaaaaaaaaaaaaaaaaaaaaaaaaaaaaaggggggcccccttttaaaagaacaaagtttaatttccggggattgcaaagttaaaaattttt

SEQ ID NO: 54044 - DNA, 430 bp, Zea mays
  unsure (1)..(430): unsure at all n locations
  Clone ID: MRT4577_14928C.1
aaaaagcgcgaaacgggggcccaaaccaaaatattccttgagggggaaaaacgggccgggaattttattccccgggggaaaaaaacccggggcatcaaaatttactccgggacctaaggggctggggccccctttttttttaaaacctgggggggggggatttaatcctgggggaccaacccgggggccaaataatttggtttcggggttggagggggtttttttggggttttttccggattgggaagttgtggtggaagccgggacggttgaaggggttgacccaatttggaccccgccgggggttttaatggccccaccgtttttggaaaaggcggtttccccaccaatttggggggtnggaaaagttcccatgggctggacctccgtgggtttttccgtgggggggggtttggggccggaaaagggc

SEQ ID NO: 54045 - DNA, 1129 bp, Zea mays
  Clone ID: MRT4577_149290C.1
gccggccgggctgacgatcaaccagtattattgagaccaacatcgcacacatagaagaggtgaatacagtcagcaacaatagagcaacaatggcgaccaagatattttccatccttatgctccttgctctttctgcatgtgttgctaacgcgaccatttttcctcaacactcacaagctcctatagcttcccttcttcccccataccttccatcaatgaccgcttcaggatgtgaaaacccagtccttcaatcctacaggctccaacaagcaatcgcaacaagcaacttacctttatcacccctgttctttcaacaatcgccagccctatctttggtgcagtcattagtacaaaccatcagggcacaacagctgcagcaactcgtgctaccagtgattagccaagtagctctagcaaacctgtctccctactctcagcaacaacaatttcttccattcaaccaactgtctacactgaaccctgctgcttatttgcagcaacaacaactactaccatttagccagctagctactgcctactctcagcagcaacaatttcttccatataaccaattgtacgcactgaacccctctgcttatttccagcagttaatactactacccattgggccagctagctacaacaagccccgcttccttcttgacacaacaacaattgctctccgtgctaccagcagattgtggctaaccccgcaaccctcttacaactgcaacaattgctgccctttgtacaacttgcgttgccaaacccagcagccttctaccaacaacacatcattgggggggccctcttgtagattgcttattaggtgcaattcaataatgaagttgtgtggctgatgcatgtggcctcctagaaataagaagatacatttccattcaaccaactggctgcattgaactctgctgcttatttgcaacaacaactaccattcagtcagctagctgctgcctacccccagcaatttcttccatgtccccaagtggcaggacggaactcagctgcggattccccgcggcgcaggtaccaccattcagcctgttagctgatgtgacccctggggggggcccgacaccacaacagccgttgacggggtacctgtacgctg

SEQ ID NO: 54046 - DNA, 817 bp, Zea mays
  Clone ID: MRT4577_149291C.1
tgttcttggcgtccgattaccattcagccttttagctactgcttattgtcagcaccaacacctttttccatttaaccaattggccgccctgttccccgctgtttttttgcagcagcaaatcctcctcccatttagccagctagttggggcgccccgtgtttccttcttgtctcagcgacagttgctgcctttcttcctgcagtttgcggctggccccgcccccctcttgcaactacacccattgttgccctttgtccaccttgctttgacaggccgagcggcctcctaccaacaacacatcattggtggtgccctcttttagattgcttattagttgtaattcaataataaagttttttggatgatgtatgtggccaaccagaaataagaagttacatttccagattttaatgtgatattggtctccagaaaaaaaaaaaaaaaaaaaaaaaaaaaaaaaaaaaaaaaaaaaaaaaaaaaaaaaaaaaaaaaaaaaaaaaaaaaacaaaaaaatgcaaataaaaaaacaatattaaaaaagacacataaaaaaaaaaaaacggggcccccgttttacaggcgcccggtttgggcaaacccgtgtggtggacccattttatttttctatgcgggcacatccctctttctccacgggcggttttttaaaaggggcgcggccggaaaaacccttgggcacaccagcttaatccgcttggcaaaatgcccccttctttgcggggggggattagccgagggggccgtcccgtttccccttcccaaaaattgtccacttgggtaggccaaggcccccccccct

SEQ ID NO: 54047 - DNA, 601 bp, Zea mays
  Clone ID: MRT4577_149292C.1
attgggtacccgggtgtccccctcgagttttttttttttttttttttttttttttttttttttttttttttttggcagcatgtatcgttttttttcccttttaaaacttaaaacttttaattacatggcacatcagctcaggcccgaaaccttttgttacaacaaacattattccatctgtatgattgtatacaggcacctcgcattaccagcgcccgttagcatgggggcgccacaaggagactccgttcaccccatttcccaaactggggtagtccgcaacctggggggggtatccatttgggttaaccccaaggctcatcaccgatggactgggaaagccattcagccaaggctttgatgcactcacgtcaaacaggccattagagtaactatccaacgagggaaactgccgttccctcaacccattgaccgcatttatgtcataagcccccgagaatccaccggcatactcatacttggttgaattgaaccgagcaggacttttaacagaagccattcccatatctgacacgtttcctcttggtgaaaatggcaggccaaacacattgtaatcttgatgaaatgactctggtatact

SEQ ID NO: 54048 - DNA, 914 bp, Zea mays
  unsure (1)..(914): unsure at all n locations
  Clone ID: MRT4577_149293C.1
aagagatcctcagagattgctcccacgtcttctagatacatgtgctcaaaatggtctccactttgagcatgccttatttgtgccaaaccaatcacagtacaacaagcttggatcccttgcatccccaccttcagccggtggggaaattgatttgtcatggcagttgtcgcttcaaaaggtgtggggaaacctgcctcatcacaataaaggtctaaatgatgtaaactctagcggagctacctcggtttttgaatctcttccattggcaattaaatggctaagggaaactgctcaacaaaatcaatcgattcagtttcaggtcttagttaccggctcgctgcaccttgtcggcgatgtcttaagattgctcaagaacaataagtaacttcatttggaatggcacattgttcagattgaactggctgcctacggaccactaaggcactaactggagcttatcgaaatttgtgattgggatagcacaacataccaacttggttacaaggctggaagaaattgaaagacatttttatttcagttccaatcagcggtaaaattgttgtatttaatcgtttctttaagttcctggcgttatgtgccatcacatcctcactccagaaggatgtaaccaatttttagaatgtacaattagtggattctcagcgacacatctttgtatgattggtggacgggtctgcgtagcctttgcaacagacaatcaagaagacgctttgacggcctgctaattcatttttggtggaatttatggctggaacgaaataacagaattttcccaagtcagcatagaagcgttaatcaagtggncccttgcagtcatcagatattgctagtagctgaggtcttggtgatctggtctagtggggttttggtcttcctcctttattttttctttt

SEQ ID NO: 54049 - DNA, 532 bp, Zea mays
  Clone ID: MRT4577_149294C.1
aaaaaaaaaaaaaaaaaaaaaaaaaaaaaaaaaaaaaaaaaaaaaaaaaaaaaaaaaaaaaaaaaaaaaaaaaaaaaaaaaaaaaaaaaaaaaaaaaaaaaaaaaaaaaaaaaaaaattttttcttccccggggggccctttaaaaggggaatttttgcaattttccttccccctgggggcctttttagcttccttttaaagggcccatttcccctttttttgagtctttttaaaattatttgcccctggttttacaccgtttaatttgggaaaacccttgttttccccaatttatttgctttaaaacaaatcccctttttaaaagttggtttaaaaacaaaaagcccccccccgttcgccttttcaaaaatttgcccaccctttttggcaattgaaccccccttttagcggccctttaaacccgggggttttggggtttcccccaaaggggcccgtttccttttcctccccctttttcccccctttttttgtttttttcccttcttttttcccccttttggccggttttcc

SEQ ID NO: 54050 - DNA, 281 bp, Zea mays
  Clone ID: MRT4577_149295C.1
cggagaggcccagccgtggctgtccacatccacagaggggctcaagatccccatgactcctacatcctcttttgtgtctccgccaccacccactgcctcacctcattccaaccggaccacaccgcctgaagcggcccagaatggccagtccccatggcagccctgatcttagtagcagacaatgcagggggcagtcatgcctcaaaagatgccaaccaggttcactccactaccaggaggaatagcaacagtccgccctctccgtcctctatgaaccaaag

SEQ ID NO: 54051 - DNA, 401 bp, Zea mays
  Clone ID: MRT4577_149296C.1
cgtttggccaaagaaaaagccgcttcctgacacgattgcctctttatatagatagatataggatctatggggttattacttagaagtctattttgtacaagatcccctcctatctgatagaaaagggtcccatgatcccgagccggtcttatcttggctcgcaaaccccaagtttgtctatgaagagctaatctaattgtattagtttctataatggatttcttatgtggaatactaatggatagggcctcgttgctaagtgctacaagatctagtgcactggaactcgtggttatggacccgaatcctttagtatggaacattgtcttttccaagtaaaacccctagtatatgaaagaatgaaaaggtgctttcgttcttgtggaataagaagccctcgt

SEQ ID NO: 54052 - DNA, 368 bp, Zea mays
  Clone ID: MRT4577_149297C.1
cagcacggcagtgctccgttacctcctcgtggttcgccccggttgtctactcctggagctcccccggcgcgacaccggccgagctctctagcgcacggcggccggagaagacgaggagggggggacgatctcatacatcggaccggcgtgcctgtgtcgtctgctgatcgcgttgttctctttactctttctgtccctcctttagttgaacacttcaatcagtatattaagatttctgattgggcggcggatcgccatgggattcggaatgcggaataataacaacggggcgagctgctcgtcgtggcgcctggacccggcggcgccgctgctgccgagccacggcagcagcgggggccgctagggtg

SEQ ID NO: 54053 - DNA, 311 bp, Zea mays
  unsure (1)..(311): unsure at all n locations
  Clone ID: MRT4577_149298C.1
caaccgccaccgtgaggtatccgtcgtttccttctctctccacgactgctccaacatttactaactgaccagcaccatctccgggcccgccgacagcccctactagggccgcacgttcgtcatcgatatccgtcttccccatgaatatcccttttagccttctaagattcatttcatcaccaaagtatggtaccctaacannggcaggcaaaatggatctatttgcttgtacattcttaaagatcagtttaccccatccctttacctttaaaactgcgcttccttcccttcaaactctgcttttctacttc

SEQ ID NO: 54054 - DNA, 290 bp, Zea mays
  Clone ID: MRT4577_149299C.1
caatgatcctggaaattgcagtaacaaaagcacacaacgattatagtaactataagatacaataaaacaaataaatgtgaaagtagattcatgaaaatgtattcctttaaaatattgttttcctacaggcctatttaacaagatgtttcattttactgtatattttgtagttaatataaatgttgctctaatcagattgcttacgagcatttttattatatttatgttgttgtactaatatatgagataagtaaatgtagctcccacaaggtaaacttcattggtaagat

SEQ ID NO: 54055 - DNA, 303 bp, Zea mays
  Clone ID: MRT4577_14929C.1
ataagaggtaggccggcacaactggtttgccaggtcctctaacttcctgatgagctgaaaaccacttgctttgtgcagagtgtctaaaatgtctaaaatgaaaaaccctcggacttttgaggagcaaacagaatgcatcatgaatactctactcacagacttcttgaccccaacattccaggctgctaacaggaaccttcctgatgcagacgaaccatgttcaggagaggattactcttttgatgtggctatcgttgctggccgacttcgaatgctgggtgacaagttcaacggagagctgga

SEQ ID NO: 54056 - DNA, 473 bp, Zea mays
  Clone ID: MRT4577_1492C.1
gtttcgtttcatgagaaacacacacacgacactcccaagttttgcttacttgtctgacgaaggcttccagggaggcgaggttgctgatggcgaggcacatggtggtcatgaagccgggcacgccgaagtaggggtagagcagcgccgccgcgtcgaagaatgtctccgacacgaactgtgcatctcttgcattcgtggccagcgccgcctccacgtccctcgcccactggtggacaccgcagattctcatcgtctggtgatccgccacgacctccacgtgccgcctcgttatctgcgagagcatactagtgagtactgtgaacgatatcttctattgtgctttttttttttagaaaaagatcatattatgcagaactatataatcttagtatgataattgtaccgtaactgacactaaagtgtcgtatattgctaatgtaacgatgaaccgttagctacaaaaatatataaaa

SEQ ID NO: 54057 - DNA, 755 bp, Zea mays
  unsure (1)..(755): unsure at all n locations
  Clone ID: MRT4577_149300C.1
gtacgcctgcaggtaccggtccggaattcccgggtcgacccacgcgtccgatttgatacccgcgcccccatggctgcccaggggatggtggagactcgagtgttcctgcagtatcttcctgctatcagagccttatgggaggacagtggtatacagaatgcctacgatcggcgccgggaattccagctgggtgagtctgtaaagtatttcttggataacttggataaacttggagtaccggattacattccatcacagcaagatatcctgcttgccagaaggcccaccaaaggcatccatgagtacgactttgaaattaaaaatgttcctttcaaaatggttgatgtaggtggccagagatcagaacggaaacgctggtttgaatgctttgacagtgtgacgtcgatacttttccttgtctcttcaagtgaatttgaccaggtgcttatggaggaccgccagaccaatcgccttacagaatctctgaacatttttgaaacaattgtcaacaatcgggttttcagcaacgtctccataatcctcttcttaaacaagacagacttgctcgaggagaaagtgcaagttgttagcatcaaagactatttcctagaatttgaaggggacccccactgcttaagagacgtccaaaagtttctggtggaatgcttccggnggaaacgccgggaccagcagcagaggcccgttgtaccaccacttcaccaccgcgatcaacacagagaaacatcgnctcgtgt

SEQ ID NO: 54058 - DNA, 309 bp, Zea mays
  Clone ID: MRT4577_149301C.1
cttcggagaccattaaccttatttacttcctaacgcaaaagaacccggaacaccccctgaagggtgtgggtggttgccctcgctctcctggctctggctgcgagcgccaactccacgcatccaacctgcagctgcggctggcagccaccaccgacggttcatctaccatcgacggtgcatctgccatctgcggtttacctgtcacctgcggtgcatcttgcatcgccggtccacctgccacctgcggtccacctgccaccggcggtccatgtgccatcggcggttcatctgtcatctgcaccatgccac

SEQ ID NO: 54059 - DNA, 255 bp, Zea mays
  Clone ID: MRT4577_149302C.1
cagccatgatctaccttcaacccatcattgccggtgcacctctgcgagatcacttgtgaaacttcgatgaccattaaactgttgcgtctgatgcttgcggctatcgctttaatatcaagggtcatttgtacacagacaggcggctgcaactgtgctcaccatctaaacgatgcgcacttacatactccagcatgccatgatacacattttctatagcgtcaaccaccatcacatcattggccgcagcattaacac

SEQ ID NO: 54060 - DNA, 199 bp, Zea mays
  Clone ID: MRT4577_149303C.1
caaaaaacatacgtatgacctacagaccatcaaaaagattcagcagaaaagatctgtcgcaaaacgcatgggcttgaaggacctgaaaatgggatataacattgacatccattattacagcgtgaggcttaaagctgcacacaagtttcttaaagccaggggaccatgttaagataattgtgaacctgaaaggaccgga

SEQ ID NO: 54061 - DNA, 353 bp, Zea mays
  Clone ID: MRT4577_149304C.1
tgcgcttttccaatatcacatatccacagatatatgtgcctcttttagggttgggggaacaaaaaaaaaaaacaaaaaaaaaacaaaaaaaaaaccacctaaaccacaaaaaaaaaaccaacaaaaaaaaaaaaatcggccggcccccccccattgatcccctaacccctgaaataaatcccaaacctgaaccaccaggcctcccaacttcccttaaactaagccaaataaaaccttggccaaatacaccccacaccttattcccgaccaaaaatgtttccccctcacaattccccacaacaaccaaaccccaatcttaaattgaaaaccctggggctcctaataaggaacct

SEQ ID NO: 54062 - DNA, 291 bp, Zea mays
  Clone ID: MRT4577_149305C.1
aagggctaaaaaactatggttgatccacataaaaacacgttttggacagtggactcactgagaaacgacaataacaagtctgaagcacatgatgatagtaatagggaaatcttaaatggagtcacactccagctggatcatagggctagcaatgagttgctgccgagaagcatggccaccaatgtaccatagctgcccactcagcaaaccgacgctatggacacagtcatgccatattcccccaatgatgtttgtgagggattatattcctgcatgccctggacatgaaca

SEQ ID NO: 54063 - DNA, 520 bp, Zea mays
  Clone ID: MRT4577_149306C.1
caacaagcaacatagaaagtggaatacagtagcaaaaatagagcaacaatggcggccaagatattttccatccttatgctccttgctctttctgcatgtgttgctaacgcgaccatttttcctcaatactcacaagctcctatagctgcccttcttcccccataccttccatcaatgaccgctttagtatgtgaaaacccagcccttcaaccctacaggatccagcaagcaatcgcaacaagcaacttacctttatcacacctgttctttcaacaatcgccagccctatctttggtgcagtcattggtacaaaccatcagggcagaacagttgcagcaactcgtgctaccagtgatcagccaagtagctctggcaaacctttccccctactctcagcaacaacaattgctgccattcaaccaacttgctttgacaaacccaacagcattctaccaacaacccatcattggtggtgccctcttttagatttcttatgagttatagttcaataataaatcta

SEQ ID NO: 54064 - DNA, 410 bp, Zea mays
  Clone ID: MRT4577_149307C.1
gctaaatacaggcgtgttcagatatttaaaaaaaaaaaaaaaagaaaaaaaaaaggaagagaaaaaaaaagggggggaaaaaaaaaaaaaaataaaaaaaaaaaaaaaaaaaaaaaaaaaaaaaaaaaaaaaaaaaaaaaaataaataaaaaaaaaaaaggggggccctttttaaaggatccaattttcctcccccggccttccaacgtattaccttttttttgggggcccctaatttcaattcccgggcccgggtttaccaccggggggccggtgaaacccctggggttccccacttaattccctttgcacaaattccccttttccccagttggggaaaaaccaaaagggccccacccattcccctttccaacaaattgcccacccttaatgccaaatgggcccccccc

SEQ ID NO: 54065 - DNA, 1001 bp, Zea mays
  unsure (1)..(1001): unsure at all n locations
  Clone ID: MRT4577_149308C.1
gcgcccacgcgtccgcccacgcgtccgcccacgcgtccgcccacggtgcgtcccggaactgactagaactagtacgtagaaatccaacactcgggacgaaattaaaagagacgacgcacatcaaccagcaggcatcgcgcggtcaccaccatggcggcgcaggagggcggcatgaggctggtgtcgcacccgatcgcggcgcacgacgggcggctgccgcggcagtacacggcggaggggcagggcgccaagaaggacatgtcgccgccgctggagtggtacggcgtgcccgagggcgcgcggtcgctggcgctgctggtgcaggacatcgacgccgaccccagcgtgccgtggacgcactgggtggtggccaacatcccgcccgccaccaggggcctccccgaggggttctccggcgccgcggggccgggggcgggggcgggccgcgaccagctcggcggcctgcaggagggggtcaacgactggaagcagcccggctggcgcgggcccgtgccgccctcccacggccaccgcatccagttcaagctctacgcgctcgacgacgaggtgcacctcggcaacaaggtgaccagggataagctcatggaggcgatcgacgggcacgtgctggaagaagccgagctgatcgccgtgttccagggagtcgtcgccaacaactaacacacacactcagagatatctttgttggcgtgctttgtatttgcttgtgtggctaccatgtaattttgatcgaataaaagggaacttcacatgtgcttagcttattgtgtgacgaagagtacgtcatgtgggcagctttacgtgcttacgtacgttaagagtaacaaaatggtctttcaaatgctagcagttgtgaatttggccatggcagcattatcaatttgcctgcagcagctcctatcatcagttactggtggagcttatttaagatgaaatagtaaacctggttgatgacaaaaaaaaaaaaaaaaatnnaaaaa

SEQ ID NO: 54066 - DNA, 844 bp, Zea mays
  Clone ID: MRT4577_149309C.1
cacgcctgcatgtaccgggcccgctattacacggtcgacctacgcgttcggagaccagcaagcaacatagaaagtgcatatcattagcaacaacacatccacaatggcaaaacaatatattatccctcctctagctacttgctctttactacatgtgtcgctaacgcaacaattttccctcaatgctcacaagctcctgtagcttcccttcttcccccatacctctccatgcaattatagcttcaatgtgtgcaaaacccagctcttcaaccatataggcttcaacaagcaatcgcagcaagcaacatacctttatcgcccttgttgtttcaacaatcaccagccctatctttggtgcagtcattggtacaaaccatcaaggcacaacagctgcagcaactcgtgctacctgtgatcaaccaagtagctctggcaaacctttctccctactctcagcaacaacaatttcttccattcaaccaactgtctacactgaaccctgctgcttatttgcagcaacaactattaccatttagccagctagctactgcctactctcagcaacaacaacttcttccatttaaccaattggccgcactgaaccccgctgcttatttgcagcagcaaatactactaccatttaaccagctaggttgaacaaaacggggcttctttttgaacccacaaccggtgctggctttctaacaacaatttgggggttaccccggaacccttttaccactaccacaattggtggcctttggccaacttgctttgaccgacccaacgggcttctaacaacaacacatcattggtggtgcccttttttaaaatggttattaat

SEQ ID NO: 54067 - DNA, 194 bp, Zea mays
  Clone ID: MRT4577_14930C.1
tactcgtgtagatggcgaggacgcaatagctcggtggtaacagatgccatctaccatatcgcaagcagtggccacctgaaggtgtgaaggatttctgtggaagcacgggggacggatcgatcacgtggtctcgcttaggatttcagaggatgtacttgccaagtggggaaaaggccctgaatgcttgagcacag

SEQ ID NO: 54068 - DNA, 590 bp, Zea mays
  Clone ID: MRT4577_149310C.1
tccggaacaccagcaatccacacgagctcttcgacgtcacacggacgttgctctccgacacaccaatcgtcggcaccaatggcttactaccactgagttggactactgctcggaggaggtgaggtcggtggccccggccggattcggtcgactcgtgaggtggagtacatgcagcacgtcgatcaaggaagaagttcagagtgatagtcgatctgagtcgcacgtcgccggtagccaaccactaccaacaccatggttaccaaggtggccacgtcttcttggtgcgagagaccagctgctaggaggacttctgctgctggaccggtgagttctgcgatagcagggagagcttcctcgacagggctaactgagcatcccgaacggacgtcatgaacgcccgttcgtgcctgcctgcgtgacttatgtatgtctgttactgcgtttggatgtcgtacttggttagtgtacactggtacacgcactcaattcctgtacgaattactacaatatgctcgtgacctgattaaaacttcttcgtaatactaataccttatgaaattcagatattgaggaccctatggtcgtggtca

SEQ ID NO: 54069 - DNA, 804 bp, Zea mays
  Clone ID: MRT4577_149311C.1
gctagctgggtttacgctaacaagtgacaatttgttcaatatatgcaattgtcggcactgaacccctgtgtttatttccagcagcaaatactactaccatttggccagctagctacaacaagcaccgcttcctttttggcacaacagcaattgcttccgttataccagcagtttgtggctaaccccgcaaccctcttacaactgcaacaattgatgccctttgtccaacttgctttgtcaaacccagcagccttctaccaacaacacatcattggcggtgccatcttttagattgcttattagttgtaattcaataatgaagttttttggctgatgtatgtggcctcctagaaataagaagttacatttccaaaaaaaaaaaaaaaaaaaaaaaaaaaaaaaaaaaaaaaaaaaaaattaaaaaaaaaaaaaaattggggggaaaaaagaaaaaaaaaaaaaaaaaaaaaaaaaaaaaaaaaaaaaaaaaaaaaaaaaaaaaaaaaaaaaaagggggggccgtttttgggggtcccaggtttacttccccgggcttgcaacgtcttggtttttttttggggccccctaatttaatttcccggcccggggttttacaccgtggggccgggaaaacccttgggtttccccattttaatcccttggcggcacttccccttttccccggttggcgtattgcggaaggggcccgccccgttcgcctttccaaacttttgccccccttgatgggcaatgggaaccccccttttcggggccctttaaccccggggggggtggtgtttcccc

SEQ ID NO: 54070 - DNA, 1005 bp, Zea mays
  Clone ID: MRT4577_149312C.1
gaagactataccatcctcatcatgaatcggttatcacactgtaaggatgatttaaagcttgttactcccaatcttaggaaaagtaattatcgaacacccttggagaccaatatcacattagaatctggaaatgtaactttttatttctggttggccacatacatcatccaaaaaactttattattgaattacatctaataagcaatctaaaagagggcaccaccaatgatgtgttgttggtaggaggctgctgggtttgtcaaagcaagttggacaaagggcaacaattgttgtagttgtaagagggttgcggggttagccgcaaactgctggtagaacggcagcaactgttgttgtgtcaagaaggaagcacggcttgctgtagctagctggctaaatggtagtagtatttgctgctgcaaataagcagcggggttcagtgcggccaattggttaaatggaagaagttgttgttgttgagagtaggcagtagctagctggctaaatggtaatagttgttgctgcaaataagcagcagggttcagtgtagacagttggttgaatggaagaaattgttgttgcggagagtagggagaaaggtttgccagagctacttggttgatcacaggtagcacgagttgctgcagctgttgtgccctgatggtttgtaccaatgactgcaccaaagatagggctggcgattgttgacacaacaagggcgataaaggtatgttgcttgctgcgattgcttgttgaagcctatatggttgaagagctgggttttcacatactgaagctataattgatggaaggtatgggggaaaaagggaagctataggagcttgtgagcattgagggaaaattgtcgcgttagcaacacatgtagaaagagcaaggagcataaggagggaaaatatcttggtctccattgttgctctattgttgctactggattccactttctatgttgcttgttggtctcaataatatggttgatccccgcgt

SEQ ID NO: 54071 - DNA, 1085 bp, Zea mays
  Clone ID: MRT4577_149313C.1
tcgagcggccgcccgggcaggtgttgtgcttgatccgcatgacagcgcgactctcgcttgtatgcctaggttgatgtgtatgtaataaataaacaaaatagtaaatgacatgtttttcataaaaaaaaaaaaaaaaaaaaaaaaaaaaaaaagcttgtacaagctttttttttacaagcttttttttttttttttttttttttttttttctggaaatgtaacttcttatttttaggaggccacatacatcagccaaaaaacttcattattgaattacaactaataagcaatctaaaaaatggcaccgccaatgatgtgttgttggtagaaggctgctgggtttgtcaaagcaagttggacaaagggcagcaactgttgcagttgtaaaagggttgcggggttagccacaaactgctggtagaacggaagcaattgttgttgtgtcaagaaggaagcggggcttgttgtagctagctggccaaatggtagtagtatttgctgctggaaataagcagaggggttcagtgcggcgaattggttaaatggaagaaattgttgctgctgagagtaggcagtagctagctggctgaatggtagtagttgttgttgctgcaaataagcagcagggttcagtgtagacagttggttgaatggaagaaattgttgttgctgagagtagggagcaaggtttgccagagctgcttggctgatcgctggtagcaccagttgctgcagctgttgtgccctgatggtttgttgccaatgactgcaccgaagatagggctggcgattgttgaaacaacaggggtgataaaggtaagttgcctgttgtgattgcttgtttgagcctgtagggttcaaggcttgggttttcccgtcctgaagcggtcacctatgaatggtatcgtgtcagaaatgcatgtatcgcaccggtttactattgcgaaggaatggtccagttagccacccatgtagacagagctctatgcttatgcatgaggatgtatcttcagcgccggtgtggtctcatggtgctacctgtcgaccgccggctcgggcacgtttggtcacaaattatgagtgag

SEQ ID NO: 54072 - DNA, 376 bp, Zea mays
  Clone ID: MRT4577_149314C.1
aaatgacaaagtttggttattgtgagaattaaacatgcgcaacaagcaagaaaatagacgaaagaacaaacaaaagttaagctaaatgaaacaacataacgcatttttttaaaagacaagttcgttaaattaccaaattccaatcaacaaataatcacttcaaaaatcagaaagagaagaaagaacaaacaataaattgacatcaagcagaagttaaaacacgcttcattttttcttgtaaagcagtaatacgaggtatgtcttgaactgctaaagctgctttgaaatcgcgcaacagttgcatttgtatttcaaggtctaacacaggagcagcttgagaagaagaaggaacatctccaattgcttttgggatagc

SEQ ID NO: 54073 - DNA, 3123 bp, Zea mays
  unsure (1)..(3123): unsure at all n locations
  Clone ID: MRT4577_149315C.1
tttttttttttttttttttttaaacggggaaggaatgacgaagtagatctcgacttcacttaagattaaaaacgaggcagagtgaattatattcttaatgagtcattatgttatcagccctaacgagcaaaggagaacaacacaggtaataatcttaaggtaaacagtgagtggcacagcagaaactgactccagcttgttccatatgaattaacggcgaaggcttgcctgcctgcgtgactgcttccagctccccttcctatccttcaaaactgtcgttcgnctggattcctcactgcatccggtccatcgaggcaaggcagccaaagcagacattggagcaatggagccaatagccggtctgccttccatgtaatgtacaggggttttctttcatcattcagcttactataggatgatgaactgataatcttcaaggaaccaaccaactttggtcccttttttccattgaacatcgggtcgatccgatgaaggcccactggaagatttgttcgtattgttcagcggcatggtcccacgtgaagtcttttgacatgcctcgcttcattagcccttcccaggaggacttgtgttccctgtatgtagatattgcagttcgcaatgtccacaaacatgttttctgtggttaggggtgcgaatgcccaccctgtaccctgctctccattctcaccgaaagggttgaagttctccacggtatctctaaggcccccagttgcatggacaacaggaactgtgccatactgcatagcatatagctgattgagaccacaaggttcgaatctggatggcattaacaatatatcgcagccggcagttattcggtgggaaactggaacactaaatccaacccatccacgaaatttatccttgaagatcgactctgtagatctcatccaatcttcaagctctgggtcaccagatccaagcatgacaaattgaacatcttcccgcatgagatctggtatgataagttgaatgagatcaatgcctttctgataatccaaccttccaataaagccaatcagaggaacatcaggccttataggtaaacccagctccttctgcaatgcacctttacatttggcctttccagagaggtcatcaacagaataatgacaggggatacatttgtctgtggcagggttccaatcattaatgtcaattccatttacaattccgtttaatacactctttctggagcttaagagctcattgaggccctgtccaccttcagcagttgtgacctcccacgaataacccttactgacagtcacgattcgatctgctgtcacaactgcacctttcaaaaaattaactgcctcacccttgtcaagggcatgcctcctcgcccattcagggaatacccactccagagctccataccattcaggtggcaacccaaggtcaggatatgtgcttgcaggctctacaccctgatgtgctaaattatgtattacaagaatgctgcgggagtctttataaacaccatatggtctatattttgcagcaagaaggactggcactagactggcatgccaatcattgacaacaaacatgcaattctgtccataaatatatcctcccaattcaaggatcaaaggagcctcacatgcagcatagcaaaggagtgtgtatctgaactgattatcaccaaaagcaccaaacttatctccatataaatttccaggtctgtgatatgagggatgatcaacaaacacccagtcaactgaatctctatactcatggaagaaggtaacttcatgttcaccgccaaagcatggaatccgaatgtgtttttctgtgtaaaatgcatttgcataattcttatcggaggtaccatttaaatatctgggcattacaaccatcacacggtgaccacgagcagcaagagcaactggcaatgaaccacaaacatctcctagacccccagactttgcataaggagaagcttcgccggttacaaagacaatgctttgtgttactttagctcgagcttgctcctttccaaccacaatctcagaatcttgctcacttgccacaactactgtgttatcgatggaaccttcagcaatcccttcaggttcgagaccgaggtcccccaggccggcgtcgggcacgggcggcggcgtcgatgccggctcacccgtgggctcggccggcggcgcgaggaagccgggcacgagcgggggcgccagcagcgcgggtggcagcgggcgcggcgcgggcccctccctgctcagctccgcgacgcaccggcggcgcagcacgcgctggagccgccgcgggcgcgcccggtcgccgacggcggccggccaggcggcccgcgcgaggaggaggcacgcggcgcccacggccgagggcgtcgccattgcggagagggagagcagacaggagcgcggggggcgggggccgtggatcgcgcgcaacaatggcgaccaagatattttccctccttatgctccttgctctttctacatgtgttgctaacgcgacaattttccctcaatgctcacaagctcctatagcttcccttcttcccccataccttccatcaattatagcttcagtatgtgaaaacccagctcttcaaccatataggcttcaacaagcaatcgcagcaagcaacatacctttatcgcccttgttgtttcaacaatcgccagccctatctttggtgcagtcattggtacaaaccatcagggcacaacagctgcagcaaaccgtgcttccttcttgacacagcaacagttgctgcctttctaccagcagtttgcggctaaccccgcaaccctcttacaactacaacaattgttgccctttgtccaacttgctttgacagacccagcggcctcctaccaacaacacatcattggtggtgccctcttttagattgcttattagttgtaattcaataataaagttttttggatgatgtatgtggccaaccagaaataagaagttacatttccagattttaatgtgatattggtctccaagggtgttcgataattacttttcctaagattgggagtaacaagctttaaatcaaaagataaataatataaaaaacaaacaagataaaattgatgcatatgaaggcac

SEQ ID NO: 54074 - DNA, 897 bp, Zea mays
  Clone ID: MRT4577_149316C.1
gccgcccgggcgggggagcttttttttttttttttttgttctttctatattgtttcattatttgtttctactttttgcttctctagtgatcattcaattttttttggtaaaccttttttccttatttttagtttcaacaatttttttcattcaaccaacaggggggggggggaccttgcttttttattggggggaccaacaactactaccaaaaaatcaggttgctactaccaactttaagcaacaacaaaggggggcccccaaaccaatgggcggactggaagcccctggttttttgcaagaacaaagtactactaccattaagccagttagctgcagcaaaccgggcttccttcttgacacagcaacagttgctgcctttctaccagcagtttgcggataaaaccgcaaccctcttacaactacaacaattgttgccctttgtccaacttgctttgacagacccagcgggctcctaccaacaacacatcattggtggtgccctcttttagattgcttattagttgtaattcaataataaagttttttggatgatgtatgtggccaaccagaaataagaagttacatttccagattctaatgtgaaaaaaaaaaaaaaaaaaaaaaaaaaaaaaaaaaaaaaaaaaaaaaaaaaaaaaaaaaaaaaaaaaaaaaaaaaaaaaaaaaaaaaaaaaggggggaagatataaaaaaaaaaaaaaaaaaaaaaaaaaagaaagaaaaaaaaaaaaacttttttattgggtaaaacaaaataaattacccatggtcggtgggttttacaacgatatccactgtgtaaaacacctggggtaccaaattaaatggctttgcggaacacccttctttacacaggtgccgtcttaatgaaaaggg

SEQ ID NO: 54075 - DNA, 331 bp, Zea mays
  Clone ID: MRT4577_149317C.1
aatggcccccaagatcgaccccaacgagatcaagatcatctacctccgagccaccggaggtgaggtcggagcttcgtccgctttggcccccaagatcggtcctttgggtctttcgcccaagaaggtcggtgaagacatcgccaaggccaccggtgactggaagggtctccgagtcaccgtccagttgaccattcagaaccgtcaggccaaggtcagcgtcgtccccagcgcttcgagtttggtcatcaaagccttgaacgagcctcctatggaccgaaagaaggagaagaacatcaagcacactggtaacgtttctttcgacgagatcgtc

SEQ ID NO: 54076 - DNA, 809 bp, Zea mays
  Clone ID: MRT4577_149318C.1
acccacgcgtacaggacagacccatgacactattaccagttgaccagcaactgcgaccaaaaggcaaccggtccttaaccacctagctctctctacatgtcctgctaacgcgacaatattgcctcaatgctcacaagctcctatagcttcactacttgcaccataccttccatcaattatagcttcaatatatgaaaacccagctcttcaaccatatacgcttcaacaagcaatcgcagcaagcaacatacctttatcgcccttgatgattcaacaatcagcagccctatctatgctgcaatcattggtacaaaccatcagggcacaacagctgcagcaactcgtgctacctctgatcaaccaagtagctctggcaaacctttctccctactctcagcaacaacaatttcttccattcaaccaactgtctacactgaaccctgccttgcagcaacccatcgttggaggtgccatcttttagattacatatgagatgtactcgacaatggtgccctcataccggcatgtgtttcctagaaataatcaatatattgattgagatttactctccttggcacatctaaccctacaaaccatcgcatcgcaccaacgacaacattttctgccatcactgagccacctagcagtggtgaaccctgtggcctacttgcagcagcagctcgcttgggtccaacccacttgctctggcgaacgtagctgcctgcgcagcccagcatcagcgcgcccagttcgtgccagcgctcacgcgactacccgtggtgaaccctgccgtgtacctacaactgctt

SEQ ID NO: 54077 - DNA, 300 bp, Zea mays
  Clone ID: MRT4577_149319C.1
aaaagggaaaagggggcgcccatttttccttgaaaaaagaacagggactggcttggaaatatccccccacccaatacccatgggcaacttcacacagggtttttgttggctgcctacccccggtccttctaggggtaccccaggtacaattttccccaccattttggtaacttttccaactgagaatcacccgtttacatgttacaacaaatgcaagctttcgggcccaacgacggggattgctgaaaaaaccagggaccgcccccggggcgatcttcatttttgggcccccccccccgg

SEQ ID NO: 54078 - DNA, 377 bp, Zea mays
  Clone ID: MRT4577_14931C.1
gagattccgagtgttgtgttggttgggtgatgatgatgaagcagaggtgatcaccacggccgagttccacccgtcgtcctgcagcatgctggcctacggcagctccagcggcctcgtcaggctggtcgatctgcggcgatcggcgctgtgcgaccacagcgtgagaatgttccaggaccgcgagaaccgccctcagcccagcacatttttcagtgagataatctcctgcatcaccgaccttaagttcacaggcgacggggaacaccttctgactcgcgactacatgaacctcaagctctgggacctgcgcgtggaaacctcacccgtcgcaacgtacaaagtccacgagttccttcgcccaaagctgtcggagctgt

SEQ ID NO: 54079 - DNA, 1186 bp, Zea mays
  Clone ID: MRT4577_149320C.1
aaaatctggaaatgtaacttcttatttctggttggccacatacatcaaccatattattgagaccaacaagcaacatagaaagtggaatccagtagcaacaacagagcaacaatggcgaccaagatattttccctccttatgctccttgctctttctgcatgtgttgctaacgcgacaattttccctcaatgctcacaagctcctatagcttcccttcttcccccataccttccatcaatgatagcttcagtatgtgaaaacccagctcttcagccctataggctccaacaagcaatcgcagcaagcaacatacctttatcacccttgttgtttcaacaatcgccagccctatctttggtgcagtcattggtacaaaccatcagggcacagcagctgcagcaactcgtgctacctgtgatcaaccaagtagctctggcaaacctttctccctactctcagcaacaacaatttcttccattcaaccaactgtctacactgaaccctgctgcttatttgcagcaacaactattaccattcagccagctagctactgcctactctcagcaacaacaacttcttccatttaaccaattggccgcactgaaccccgctgcttatttgcagcagcaaatactactaccatttagccagctagctgcagcaaaccgtgcttccttcttgacacagcaacagttgctgcctttctaccagcagtttgcggctaaccccgcaaccctcttacaactacaacaattgttgccctttgtccaacttgctttgacagacccagcggcctcctaccaacaacacatcattggtggtgccctcttttagattgcttattagttgtaattcaataataaagttttttggatgatgtatgtggccaaccagaaataagaagttacatttccagattttaatgtgatattggtctccaagggtgttcgataattactttccctaagattgggagtaacaagctttaaatcatccttaaagtgtgataaccgattcatgatgaggatggtatagtctccaaaaagcgtactttgttaggttggaccctatagccatacagaatgtgcacctgttaggcatgccgatcaaaacatgtgacacatacgtttcgtgaacctatcgatattttatgtatttttacaaaaaaaaaaaaaaaaaagcggcc

SEQ ID NO: 54080 - DNA, 989 bp, Zea mays
  Clone ID: MRT4577_149321C.1
accaacaagcaacatagaaagtggaatacagtagcaaaaatagagcaacaatggcggccaagatattttccatccttatgctccttgctctttctgcatgtgttgctaacgcgaccatttttcctcaatactcacaagctcctatagctgcccttcttcccccataccttccatcaatgaccgctttagtatgtgaaaacccagcccttcaaccctacaggatccagcaagcaatcgcaacaagcaacttacctttatcacacctgttctttcaacaatcgccagccctatctttggtgcagtcattggtacaaaccatcagggcagaacagttgcagcaactcgtgctaccagtgatcagccaagtagctctggcaaacctttccccctactctcagcaacaacaatttcttccattcaaccaactgtctatactgaaccctgctgcttatttgcagcaacaacaactactaccattcagccagctagctactgcctactctcagcagcaacaatttcttccatttaaccaattggccgcactgaacccctctgcttatttccagcagcaaatactactaccatttggccagctagctacaacaagccccgcttccttcttgacacaacaacaagtgcttccgttctaccagcagtttgtggctaaccccgcaaccctcttacaactgcaacagttgctgccctttgtccaacttgctttgacaaacccagcagccttctaccaacaacacatcattggcggtgccctcttttagattgcttattagttgtaattcaataatgaagttttttggctgatgtatgtggcctcctagaaataagaagttatatttccaaattctagtgtgctattggtctgcaagggtgttcgataattattttccctaagattgggaagcaagctataaatcatccttatagtgtgatacccaattcattgagaattacaaaacacaaacatcacgagg

SEQ ID NO: 54081 - DNA, 113 bp, Zea mays
  Clone ID: MRT4577_149322C.1
gcttacaacaggggggaatgaatggatgactagacttgtacagtcgtctaaaaaatcctaggactttctcagccatctcacttcaccgcctccggccggccgcactcctcttg

SEQ ID NO: 54082 - DNA, 183 bp, Zea mays
  Clone ID: MRT4577_149323C.1
ggaagcaagggacttcgtcatctttctggtctgcgtaatttgcagagcatcaatttctctttaacatgggttcctgccattggttggaagaagatctttggttggagttaactgaagtcttttaattttgccattcgccaaatcacagatactggttaagcgttttttacaggtttaattgga

SEQ ID NO: 54083 - DNA, 329 bp, Zea mays
  Clone ID: MRT4577_149324C.1
cgggagtcgaaaagaaattggacgtggcagtgggtttgtggctgttgaaatcccattcacacctcgagcaaaacgtgtattggaattgtcccttgaagaagctcgtcagcttggtattatcttcacctatctacacagttagctcgttttgtgttattaggtttggttggttaatgtccacctataattttatcggactactttctttggactttgttcacacaccttgaaaattttaatcaaagctagtatttatggttcctggtaagacattgtattcttcctcccctttttttactgggaatgcaaaatgctagtttatgtttgcc

SEQ ID NO: 54084 - DNA, 781 bp, Zea mays
  Clone ID: MRT4577_149325C.1
attcgtgctatttctagttaattgaggacatctgaggacgtatttgctgtcatgtctcaatccctccgaccctacctgcaatgcgtacgcagcagcttgaccgccgcgctcacactctccaactttgcttctcagaccgccgagcgacataatgttccagagattgaggcacaaacgtcccccgaggtcttgctgcagcccttgaccattgcgcgcaacgagaacgagcgtgtcttgattgagcccagtattaactccgtccgtattagcatcaagatcaagcaggccgacgagattgagcatatacttgtccataagtttacaagattcttgacgcaacgtgcggagtccttcttcattctgcggaggaaacctatcaagggctatgacatttctttcctgataacaaacttccacaccgaagaaatgctgaagcacaagcttgtcgactttattattcagtttatggaagaggtcgacaaggagatctctgagatgaagctatttttgaacgctcgagcacgatttgtggccgagtctttccttacaccttttgactaaacccctcagctggtttgaggcttggagtttgcttgggagtgtcggctgccgcaatgtttctgtgcccaggcaaaatgtatcaaccattcgtgatagcatggtttgaactgcggaggctctgataggcgagcctcatgccgtctttagaagggaggttcaagatagcgacattagacataaactttgccgacttaccgaaatgagatgcgtatctttttgg

SEQ ID NO: 54085 - DNA, 211 bp, Zea mays
  Clone ID: MRT4577_149326C.1
gagggtggtgatctcggccttgagcgcgcgcaggcggagcgccttgagcgcgcggacgaggtccggcagcaggtcggcgcggtcgtcgcagcagagcgacgcgcgcacgacgaggcggccgtcctcgtcgctggacgcgtcgacggtgagctcgtcggactcggtggggagctggcacgcctcctccgtgatctccgacgtctgccgcttc

SEQ ID NO: 54086 - DNA, 2237 bp, Zea mays
  Clone ID: MRT4577_149327C.1
gggtccacgcacgcgtccgcacacgcgtccgcccacgcgtccgcccacgcgtccgggccaattgggaaagaatatattgaccctgaatgatgcgaatttctgtcagttgcttgttccgtctgggacagccgtgccataattttgagggtcttccgtctttaattggttgctagtatatcaaggttttcctcctacctatgcatggaaacatggatttaattgttctctgtacgtatatccatctcttgctaacggaacctgtggatcaaaatcatctcatgttcgattggtatactactttgtcatctcacttctatgtgtagattttagctttttttcatagggctgccgtctagttttacttctgtacgtatttcattcactagataggtatctagatacttggatggcgcaattgtcttgattcccaacccaacagcatagtctcggagtggctagtaccttgcctgttatagttatctaactaataatgtacatcaattcattatgtcaaagtcgtttcattaatttgttcttctatatattcatcccctgcttcatttcccttcacctgctgctgccccccttctcaacttaattatctcctctcttgccacagtgaaggagccttatgagctggttggctggggctttactccaattctggtgctactaagatgggccagggcctgctcagcaacaagtctgggacaagactaagcatagatgaaatagcaggcgcttaccatttcttgctcttgctctcccccgtggtttccttctgggactgcatcttccgcaagataagatactcattcagacctgagtgggtgtagcagcatcctgcactcacccacccatcttagcaacagttcctttccttttcttcctcgttattaaaataaaaaaaagttagacaaaccaatgaggccaaagaatgaagtttgaacattttgttttctttcttccctaattatacctagtagtgagtagaggagtcaggtctaccagaggtaatagtgaatagcagcaggcacggctgtcatggacagggctaccatgagcagcaatcaggcaggcaaagtgttgaagaaaggaaaaaagaagcaggccaaggacgagctggaccgccagaagcaggcggagaagaagcggcgccgacttgagaaagcgctggcaaactcggctgccataatctcggagctggaaaagaagaagcagcagaagaaggaagaacagcaaaggctggacgaggaaggtgctgccatagcagaagcagtcgctcttcatgtcctcataggcgaggactccgatgaaccctgccatttgatgctgaacaagcaccatataaggtgcaaccattgggccccctcggctgcttttgaattcaccgtggacgcacagcccgccgaggtgtacccgtctgaggatggactggtatgcggcagccatgcgtatgctcccagagcccccaaggggaggcgggctgattgggggattggacaggcactgccatgctggggagaagtgagtgacctccaaggcccgtactaccaaggaacgttccgtcagtctgttacctgccctggcttcatagccgctcaggctgtgtcatcgttgcagatcagggaagagtcgccagaggtcacctctccaagccatggggccgatgctgctgcgaccgtggttaaccggatgcttggtggcaccagcaggctcaacctttacagggggatataaacatttacacttgtcaaagaattgtattgtatatataaaaaagaagatgtgtttggctgcattgcctgcaatatatatataatatagtcttgtggtttccgaaagagaaatggacagaacatccatcctgttttgttgttgttttttctttgccaaaggttatttgtgtactgtcagttaacactgtgaacatatatgctttttaattaatatgttgagtgcttatggcttgatgtgagccaaaaaaactgtgtcaaagttgcagatcagggaagagtcgccagaggtcacctctccaagccatggggccgatgctgctgcgaccgtggttaaccggatgcttggtggcaccagcaggctcaacctttacagggggatataaacatttacacttgtcaaagaattgtattgtatatataaaaaagaagatgtgtttggctgcattgcctgcaatatatatataatatagtcttgggtttccgaaaaaaaaaaaaaaa

SEQ ID NO: 54087 - DNA, 678 bp, Zea mays
  Clone ID: MRT4577_149328C.1
caaaagggtatctcccgggaccactggcataagaggcgggccaccggaggtaagaggaaacctctgcgtaagaagaggaagttcgagctcggccgcccagcagccaacacaaagcttggtgcccgccgtattcacactgtccgtacccgtggtggtaacaagaaattccgtgctctccgtttggaccagggcaatttctcatggggttctgaatgctgcacccgcaaaacccgtcttattgatgtagtctacaatgcatccaacaacgagttggtgagaacaaagactcttgtaaagaacgccatcgtcgttattgatgctacacctttcaggcagtggtatgaggcacactatgccattcccattggtcgcaagaagggagccaagctgactgacgccgatgaagctctcctcaacaagaagagatctaagaaggttgagaataagtacaagaacagacaaagggtggccaaggttgagccagctttggaagagcagttccagaccacccgcctgcttgcctgtgtttcaagtcgacctggccagtgcggaagggctgacggatacatccttgaaggcaaagagctagagttttacatgaggaagatcaaggccaagaagggcaagtaaactgtaaactgacatttactaaggtgtaattttacattttaggtgaat

SEQ ID NO: 54088 - DNA, 361 bp, Zea mays
  unsure (1)..(361): unsure at all n locations
  Clone ID: MRT4577_149329C.1
atcctataatccgcgaatcacccaacgcaccgcaccgcagccgcaccgcacgcacaccaacaaccagagcgcgccgcagaacacccgacgacatggccgtcgcctccgcctgggccaagcccggctcatgggctctcgccgccgaggagcaggacgacctccccccgccgccgccccccgtctcagcctccgacttccccgacctctccaccgccgccaccaccaaggaccccaagaagaagaaggnccagacagtctccctcgcctcgttcaacatcgtcaagttcgacctcccctcctcccgcgggaccaccccagacatggtgctaagcctccccaccggtccccgcgagcgcactga

SEQ ID NO: 54089 - DNA, 200 bp, Zea mays
  Clone ID: MRT4577_14932C.1
gcacgaggaggcgatttgtagcgtagatgcgtaattgtgccaaatgcaagaaagagatatgttattattcaggtgttgtccacttgtacctttgccagattgcctagtcccatgctcgtttggacattggagtactagaacatgaggcgttcatacggacgccctatcaagagaacacaagtgatagtaccagatggaat

SEQ ID NO: 54090 - DNA, 146 bp, Zea mays
  Clone ID: MRT4577_149330C.1
gggtccctcttcatcgtgcccttctttcatgtcgtgtccaagatcgccgactacgtccgttatggagtggttgggcagcatcaccacccagaactccatgtacacccaccagtctgacaagacatccatgtcacaggaactgtctc

SEQ ID NO: 54091 - DNA, 534 bp, Zea mays
  Clone ID: MRT4577_149331C.1
catcccacactgagctatcatctgctcccagtttcccccgtcacgttataaatccgtctctctatatacagggggtgaaattaatacatggaggggaaggaggaggacggtcgcctgggcgccaaccgatactcggagcgccagccaatcgggacggcggcacatggcacggaggagaaggactaccaggagcctccgccggcaccgctgttccaggcgcaggagctgacgtcctgtcccttctaccggttcgcgatcgccgagctcgtggccaccttccatggtactgtacatcagcatcctgactgatatgcgcgtgacaaagccgccaatgaagtgcgccaccgagcgtatccatcggatcccgggtgcctccccggggatgatctgagggctgcggcactggacggggggaatctccggcgggcacatcaacccggtcgtcaccttccgcctcttactggcgcggaaggtgtcgatcacgcgcgggctcttctacatggacatgcagtgtctgctctgcatctgagaaga

SEQ ID NO: 54092 - DNA, 1141 bp, Zea mays
  Clone ID: MRT4577_149332C.1
tcgagcggccgcccgggcaggtgaccaacaagcaacatagaaagtggaatccagtagcaacaatagagcaacaatggcgaccaagatattttccctccttatgctccttgctctttctacatgtgttgctaacgcgacaattttccctcaatgctcacaagctcctatagcttcccttcttcccgcataccttccatcaattatagcttcaatatgtgaaaacccagctcttcaaccatataggcttcaacaagcaatcgcagcaagcaacatacctttatcgcccttgttgtttcaacaatcgccagccctatctttggtgcagtcattggtacaaaccatcagggcacaacagctgcagcaactcgtgctacctgtgatcaaccaagtagctctggcaaacctttctccctactctcagcaacaacaatttcttccattcaaccaactgtctacactgaaccctgctgcttatttgcagcaacaactattaccatttagccagctagctactgcctactctcagcaacaacaacttcttccatttaaccaattggccgcactgaaccccgctgcttatttgcagcagcaaatactactgccatttagcgagctagctgcagcaagtcgtgcttccttcttgacacagcaacagttgctgcctttctacaagcagtttgcggctaaccccgcaaccctcttacaactacaacaattgttgccctttgtccaacttgctttgacaaacccagcagcctcctaccaacaacacatcattggtggtgccctcttttagattgattattagttgtaattcaataataaagttttttggatgatgtatgtggccaaccagaaataagaagttacatttccagattctaatgtgatattggtctccaagggtgttcgataattacttttcctaagattgggagtaacaagctttaaatcatccttacagtgtgataaccgattcatgatgaggatggtatagtctccaaaaagcgtactttgttaggttggaccctatagccatacagaatgtgcacctgttaggcatgccgatcaaaacatgtgacacatacgtttcgtgaacctatcgatattttatgtatttttataatactatattttatac

SEQ ID NO: 54093 - DNA, 842 bp, Zea mays
  unsure (1)..(842): unsure at all n locations
  Clone ID: MRT4577_149333C.1
gcggggatcaaccatattattgagaccaacaagcaacatagaaagtggaatccagtagcaacaatagagcaacaatggcgaccaagatattttccctccttatgctccttgctctttctgcatgtgttgctaacgcgacaattttccctcaatgctcacaagctcctatagcttcccttcttcccccataccttccatcaatgatagcttcagtatgtgaaaacccagctcttcaaccctataggctccaacaagcaatcgcagcaagcaacatacctttatcacccttgtttcaacaatcgccagccctatctttggtgcagtcattggtacaaacgcatcaaggcacagcagctgcagcaactcgtgctacctgtgatcaaccaagtagctctggcaaacctttctccctactctcagcaacaacaatgtcttccattcaaccaactgtctacattgaaccgtgctgcttatttgcagcaacaactattaccattcagccagctagctactgcctactctcagcaacaacaacttcttccatttaaccaattggccgcactgaaccccgctgcttatttgcagcagcaaatactactaccatttagccagctagctgcagcaagccgtgcttccttcttgacacagcaacagttgctgcctttctaccagcagtttgcggctaaccccgcaacccttttacaactaccacaattggtggcctttggcccacttgctttgacaaacaccagaagnctctaacaacaacacaataatggtggggccctcttttagaatgcttattaattggaaatcaataataaaggtttttggatgatgta

SEQ ID NO: 54094 - DNA, 1073 bp, Zea mays
  Clone ID: MRT4577_149334C.1
acgcgggacctcctagattagtaggtaatccatcaaccatattattgagaccaacaagcaacatagaaagtggaatacagtagcaacaatagagcaacaatggcggccaagatattttccatccttatgctccttgctctttctgcatgtgttgctaacgcgaccatttttcctcaatactcacaagctcctatagctgcccttcttcccccataccttccatcaatgaccgcttcagtatgtgaaaacccagcccttcaaccctacaggctccaacaagcaatcgcaacaagcaacttacctttatcacccctgttctttcaacaatcgccagccctatctttggtgcagtcattggtacaaaccatcagggcacaacagctgcagcaactcgtgctaccagtgatcagccaagtagctctggcaaacctttctccctactctcagcaacaacaatttcttccattcaaccaactgtctacactgaaccctgctgcttatttgcagcaacaacaactactaccattcagccagctagctactgcctactctcagcagcaacaatttcttccatttaaccaattcgccgcactgaacccctctgcttatttccagcagcaaatactactaccatttggccagctagctacaacaagccccgcttccttcttgacacaacaacaattgcttccgttctaccagcagtttgtggctaaccccgcaaccctcttacaactgcaacagttgctgccctttgtccaacttgctttgacaaacccagcagccttctaccaacaacacatcattggcggtgccctcttttagattgcttattagttgtaattcaataatgaagttttttggctgatgtatgtggcctcctagaaataagaagttacatttccaaattctaatgtgctattggcctgcaagggtgttcgataattattttccctaagattgggaagcaagctataaatcatccttatagtgtgaaaaaaaaaaaaaaaaaaaaaaaaaaaaaaaaaaaaaaaaaaaaaaaaaaaaaaaaaaaaaaaaaaaaaaaaaaaaaa

SEQ ID NO: 54095 - DNA, 223 bp, Zea mays
  Clone ID: MRT4577_149335C.1
ccggccgggatatctttcttggccttctgactaaaataaagtgtaatattttgtccttatcagtttaatatctgatatgtgaaccacatgtattaaatttatttcttatatgtatcaaatatgattatgtgtcatcgcaacacgcgggtattgtacgagtattgtactggtctttatctttatatcgcacgagtttccgaaaaaaaaaaaaaaaaaagcggcc

SEQ ID NO: 54096 - DNA, 4974 bp, Zea mays
  Clone ID: MRT4577_149336C.1
cattggacctcgcccggccgtcgttgtcgcggcgtgggcactcgccctcccgtctttccctctctctcctcccaccacacccggtcgtcgttgtcgcggcgtgagcgagcgagaggggaaaacccaaaaccctagcaccccccgccccgtcgccgacggccgccggagtagagagatggcggtggacgaggtgaactcggtctacgtcggcggccttccctacgaggccaacgaggagatgcttcgcgacgccttcgggtactacggcaccatcgtctccgtcaaggtgattaatgatcatgctgtcaaaggcaagtgttatggttttgttactttcactcaccccagagctgctgagcaagcaattgcgggcatggacggcaagaaattaggcaaccgtattgttcgagtaaatgaagtgcgtacaagaggcccccgcgattttggccgagatggtttcagacgagatccaagaaggtatggtagagatccatactgggacagaagggacagggaacggagctatgatcgtgaaagagatccctaccatgacagggatagtgatagatcccgtgagcatgatagagaaagagattatgaacatggtggatttaatagagaaattgactatcccatggaccgagatcgtgaaggagatgagagacgtcctagagaacatgatcgtacagcagaaatgcataatgtggattcagataatgacaaagataaggaacatgtatcaagaaaaaggttcagccgcccaaaaggtcgtgatagcagagatttatcaagttccagtgatggtcttcaaaatgatggaaaacatcagttggataaaactattcagatgcgcgaggaccttgaaaatgaggttaaccagattaaggataaaatatctgggaaagaacagcacattgcagatttgcagaagaaagctcagaaactagaggatgaactggttgccgcacggaaagtatcttcagaacgacagttggcggttacagacctgtacaaacatttcctccaacttcaggactacaatgatagggtcaaaacagctgaacagaggctgcagtctctcgttgatgctgccttggtcgagctcgacatggccgaagatgctactaccagagatggctcgatgtacgagaacggcgtgctttgaacacccaactgccatgggtttgtgtggttgctgatttgttagatttgtagtttgcgtctgccatgtaatagaactgcattgtaactagaaacaggaaaaatgttgtgtaagggtcggagaatctgctgtcgtggtccctgagcccggatttctctttcgaagttggattcattaaccggcctgattattcctgataccgtaaaaaaaaaaaaaaaaaagcggcaacgggaaaatgtttttaaaaaaaaaaaaaaaatttttttttttttttttgctacaattgccaaaattaccatatatcttgaatttgtgatatatgtgaatcaaccatattattgagaccaacaagcaacatagaaagtggaatccagtagcaacaatagagcaacaatggcgaccaagatattttccctccttatgctccttgctctttctgcatgtgttgctaacgcgacaattttccctcaatgctcacaagctcctatagcttcccttcttcccccataccttccatcaatgatagcttcagtatgtgaaaacccagctcttcaaccctataggctccaacaagcaatcgcagcaagcaacatacctttatcacccttgtttcaacaatcgccagccctatctttggtgcagtcattggtacaaaccatcagggcacagcagctgcagcaactcgtgctacctgtgatcaaccaagtagctctggcaaacctttctccctactctcagcaacaacaatttcttccattcaaccaactgtctacattgaaccgtgctgcttatttgcagcaacaactattaccattcagccagctagctactgcctactctcagcaacaacaacttcttccatttaaccaattggccgcactgaaccccgctgcttatttgcagcagcaaatactactaccatttagccagctagctgcagcaagccgtgcttccttcttgacacagcaacagttgctgcctttctaccagcagtttgcggctaaccccgcaaccctcttacaactacaacaattgttgccctttgtccaacttgctttgacaaacccagcagcctcctaccaacaacacatcattggtggtgccctcttttagattgcttattagttgtaattcaataataaagttttttggatgatgtatgtggccaaccagaaataagaagttacatttccagattttaaaaacgggaccgcctcgcggaaagggggaaacccgcatctctcctgatttggataacctcgcgcaactatcacagcacaggcaaccctgaggcccagacctgatctcgccggcggcgagcttgtgtccatggctgacggggccgagatggacgaagaggctatgcgggccttcttcccgctctccttcggaaaggcggctccgcggcccagctctgctacctcctccgcccactccaacacccttcgcaagcctcaaaaccctagtaaccccaagccttccgcctctaccgccgcggacgacgatggggccgctatgattggtcctcctcgcccgccgccggcgcccgcgggggaggaagacgatgaggacggcggcggtatcatgatcgggccgcctcggccaccgccgccctccgctcgcggcgagggggacgacggcgacggcatgattgggccgcctaggccgccgccagcggatgatgaagacgtcgatgatgatgaggacgacgacgaggaggagatggaggatgatggggagggtggattcaatcggatccctcttagcaacgaaattgttctgcgggggcacaataaggttgtctctgcccttgctgttgaccatacaggatccagagtgctctctggtagctatgattatacagtgcgtatgtacgacttccagggtatgaattcaaagcttcagtcattcagacaattggaaccatttgagggccatcaagttcgtagcctaagttggagtccaacgtctgatcgattcttatgtgttactggttcagctcaggccaagatttacgacagggatggacttacactaggcgagtttgttaagggtgatatgtatattcgtgatctgaagaatacaaaaggtcacatctctgggcttacaggtggtgagtggaatccaaagtcaaaagaaaccattttgacatcatctgaagatggctccatgcgtctctgggatgtgtctgattttacaagtcagaagcaggtcatcaaacctaagctggtacgaccaatgcggattcctgttacatcatgtgcatgggaccatgaagggaaacgaattgtgggtggcataggggatggttctatacaggtctggaccataaaagctggatggggtagcagaccagatatccacgttgagaaaacacacacagaggatattactggggttaagttctcaacagatggacagagtcttctgtcaagaagtatggatagtactcttaagatatgggatttgagaagaatgaaaactcctttgaaagtatttgaagatctgccaaatcactacgctgagacaaatgcagcatttagctcagatgagcagcttatttttacaggaacatctattgaaaaagatggtgacaatgggggattactttgtttctttgatagaaagaaacttgagcttgtatcaagggtgggaatttcagcacattacagtgtgataaggtgcctctggcatccaagaatcaaccaggtgtttgcaacagttggagacaagaaagaaggtgggactcatatcctgtacgatccttctattagtcaaaggggagctcttgtatgtgttggacgagcaccaaggaaaaagtctgttgatgattttgaggtgcaacctgtcatacacaatccacatgcattgccacttttcagagatcaaccaagtcgtaagcgtcaaagagagaagatactgaaagacccactcaaatcccacaaaccagaagcacctgttaatggtccaggttttggtggaagagttggtactacaaaaggcagtttgctgacacagtatctcttgaaggaaggtggtttaattaaggagacctggatggatgaagatccaagagaagccattttgaagtatgctgatgctgcggagaaagacccaaagtttattgcgccagcttattcccaaacccagccgaaacctgtttttgcggagtctgattcagacaatgaagagaaataaccatgcgcctggttacctaagctagcatgcacctgcattctgttttctgacagatgtctcttgatgagcttgttgcacatgccctgtaacctgcttttcaacagtggagaaacaaaagagcatcttcaagggtcttgatgataggagctctgccccttcattacagatggataggattagtatctacgacacttcagcactagagctctatgatttgttggatgttgtacccactgtatgtacttagtcctgaaacagtggccaatctatattatactctctctgttctttcttttttatttgtcgcggtctagttcaaaaatgaactagcgggcgacaaatattcaagaacggaggtagtatatgacttagacgtaactttagtgcaccgaatgtagtcaacctttgtttgctttggagaatgaggatttgttgttctagtatcagtctctttgttgttcctaatgggctagttggaagatattttgaggattttgaaaggcaaatgctgtttttgtgtagtatgggctgtacggtccaaacaagttgtgaaacagtggcgtatcagccttgttattactatgatccaacaagccaatggtcctggatatagc

SEQ ID NO: 54097 - DNA, 1690 bp, Zea mays
  Clone ID: MRT4577_149337C.1
tagaatctggaaatgtaacttcttatttctggttggccacatacatcatccaaaaaaccatattattgagaccaacaagcaacatagaaagtggaatccagtagcaacaatagagcaacaatggcgaccaagatattttccctccttatgctccttgctctttctacatgtgttgctaacgcgacaattttccctcaatgctcacaagctcctatagcttcccttcttcccccataccttccatcaattatagcttcaatatgtgaaaacccagctcttcaaccatataggcttcaacaagcaatcgcagcaagcaacatacctttatcgcccttgttgtttcaacaatcgccagccctatctttggtgcagtcattggtacaaaccatcagggcacaacagctgcagcaactcgtgctacctctgatcaaccaagtagctctggcaaacctttctccctactctcagcaacaacaatttcttccattcaaccaactgtctacactgaaccctgctgcttatttgcagcaacaactattaccatttagccagctagctactgcctactctcagcaacaacaacttcttccatttaaccaattggccgcactgaaccccgctgcttatttgcagcagcaaatactactaccatttagccagctagctgcagcaaaccgtgcttccttcttgacacagcaacagttgctgcctttctaccagcagtttgcggctaaccccgcaaccctcttacaactacaacaattgttgccctttgtccaacttgctttgacagacccagcggcctcctaccaacaacacatcattggtggtgccctcttttagattgcttattagttgtaattcaataataaagttttttggatgatgtatgtggccaaccagaaataagaagttacatttccagaaaactttattattgaattacaactaataagcaatctaaaagagggcaccaccaatgatgtgttgttggtaggaggccgctcggtctgtcaaagcaagttggacaaagggcaacaattgttgtagttgtaagagggttgcggggttagccgcaaactgctggtagaaaggcagcaactgttgctgtgtcaagaaggaagcacggtttgctgcagctagctggctaaatggtagtagtatttgctgctgcaaataagcagcggggttcagtgcggccaattggttaaatggaagaagttgttgttgctgagagtaggcagtagctagctggctgaatggtaatagttgttgctgcaaataagcagcagggttcagtgtagacagttggttgaatggaagaaattgttgttgctgagagtagggagaaaggtttgccagagctacttggttgatcacaggtagcacgagttgctgcagctgctgtgccctgatggtttgtaccaatgactgcaccaaagatagggctggcgattgttgaaacaacaagggtgataaagatattttccctccttatgctccttgctctttctgcatgtgttgctaacgcgacaattttccctcaatgctcacaagctcctatagcttcccttcttcccccataccttccatcaatgatagcttcagtatgtgaaaacccagctcttcagccctataggctccaacaagcaatcgcagcaaacaacaagggtgataaaggtatgtgctt

SEQ ID NO: 54098 - DNA, 390 bp, Zea mays
  Clone ID: MRT4577_149338C.1
gtggtcatttagactttgtcattggaaaagatggtgcaaaggtatgcactactggggcttgacttcttttatatgaaagtcttcttctggtattgcaaaatataagttaatcactctattaagtagtaagtttattttcctttatctaaaaaagaagtaatttattctaagatggctgtggtgttatttatgcttgatcatggataaaggactcttttgcttaagcaacatcctagttttaaattaaccactgggaccttgaataatggtccctacgataactttagtaagtgatagatgataaagagatatttatcagtttaacggagttgtgccaatcggtgaaggatattaaagtgtacttaatgtatatctcaagttcctgtatca

SEQ ID NO: 54099 - DNA, 404 bp, Zea mays
  unsure (1)..(404): unsure at all n locations
  Clone ID: MRT4577_149339C.1
gcttgggttcggttataaccgtaagtgttgcttgccgtttttcggggcgctggacatggcttttagggtattggacttagtggtttangtcggtattgtcgttgttgctacggacgcggaggaagaagtaagacgaaggagtctctttgtcactcttccgttcaagtttcaagtacgggtaccggttgctgtcgtcgttgtttaagtagatgattttgtcgagttttatgtagacgatgtgagagtatgatttgctgttttttcattgttcgtattataaaaatatgaggaagagttttgttgttactttggtcagtcgtacggttacgttgatggttcttaatagtagtacgttagtacggcgggagtanatctagggtctagggttgcgcacccacgtcatg

SEQ ID NO: 54100 - DNA, 292 bp, Zea mays
  Clone ID: MRT4577_14933C.1
cactataaaagggactgagctgttctttaaaccaatcttaagattccaagtttacatctgctgcttagaggggtagagaagctgcattaaaaatgaaacaaattctgctaactccacccatctggtttctgcacaattcacctatgctggccctggggtaccatccatgctgtggtgctaagggagcgccggactgtttttattctgatccgggagtgactgccaacttgctgtattatgatgaggcctgctgcctggttttccatgtatagaatatgaccccacaccatca

SEQ ID NO: 54101 - DNA, 325 bp, Zea mays
  Clone ID: MRT4577_149340C.1
ggggaccgacattattgggggaattaaacagctttatttttccaacagacagtccatttttttaacaatgataaaacatcacgggttcatcttctccctattttgaacctaccactcttgttatacatttttcatttggggaacgagtcaactatttgacaatgcaacgggatccacagttttttacatgtaaaaaaattgaaaaagggacaccccactttaatttcctttgctttgctctctagactagacacatgcagcttttaatataaatcacattatgggcaaaatttgcggccagggggcagagctccacctcgggaag

SEQ ID NO: 54102 - DNA, 419 bp, Zea mays
  unsure (1)..(419): unsure at all n locations
  Clone ID: MRT4577_149341C.1
actatgcactcgacgtaagctctctaatctctcaattttttttatatatctaatgccatccttaaggacacctgagcatctttatttttaagacttncaccatatactccatatcttcactcactatctaatttattatcatttttaattttttacagcaatggtgtaacctccaagggtgtatatttatcatattactccaatactaaaaccaatatcctcatttaatatttgattccaaaaatttctcttaaaatcacatttaatctcaccaagttttcttttattttaaaaaatacttttataacaaatttacgccgttcaaaaaatcattacctattcctgaaatcaacaattatcctattaaagtaattttgtcttacaacattcactatgttatctttaaatcctagcaaaaa

SEQ ID NO: 54103 - DNA, 315 bp, Zea mays
  Clone ID: MRT4577_149342C.1
aaaaaaaaaaaaaaaaaaaaaaaatatatatttaaaaaaaaaaaaaaaaaaaaaaaatggccgtttatatataaaaaaatacatactaaaaaaaacctccaaccaatttaaaatctcacattctttcttccccttacttacaacctcttaccttttatttacaaccacctaaattcatttaacttaccttaatttcacatcaatccacctgcaaaaaccttctctttccctaattaaatccctttccaacacttccccctttatccatctttcttataatttaacaaccttaatcctatctcctttcccaacttt

SEQ ID NO: 54104 - DNA, 1648 bp, Zea mays
  Clone ID: MRT4577_149343C.1
acaccccgcccgccccgcgccgcgcaggcaccacccgctctcctgcggcctcctcctgtttgtgtttttaccgtggtgccgccgccactgtctcctctctccagctgcggcgaccgcgaccgacaggcggtagagggcaaaggctagcgagatgacgaaccttccgtggtggcgcgccgacgcgtcggagctggtggccgtgacggcgatgggagtgtgggaggccgtgctcgccggcggcggccggagattcatcaagcggaaggacagcgacgccggcgagaccggtcgggcactggaggagttgcgaagctccttgtacaatgaaatgcatagcgcagaaggtgctaagcgccagcagcagcgattctgtggaccaagtgttgcattgacattcaattttgctgttgctgttgggattatcatggcaaacaaaatggtgatggggagtgttggatttaaatttccaattgcactctcattaattcattatgcagttgcatttgttctaatggccacccttaagacattatccttgttaccagttgccccgccatcgaaatccactcctttctcatctatatttgctttgggtgctgtaatgtccctgtccactgggctagccaacgtgagtttgaaacataacagtgtaggtttctatcaaatggctaagattgctgtaaccccaacaattgtcgtagcagaattcatgcttttccagaagaaagtttcctctaaaaaggctgtcacactggcagttgtgtcatttggagtcgctgtagcgactgttaccgatctggagttcaacttttttggtgcttgtgttgcattagcatggattgttcctagtgccgtgaacaaaatcctttggtcaagtttgcaacagagtggaaactggaccgcccttgcgctgatgtggaagacaactccgattacgatatttttcttgttgacattgatgcctttgctggacccccctggcctcttgttgttcaattggaacttcagaaacagctgcgctgttatcatctctgcattgttcggtttccttcttcagtggtctggtgctttggcactcggcgcgacgtcagctttgtctcatgttgtgctgggccaattcaaaacgatcgtcatcatgctctccggctacctgatcttcggctccgaccctgggatcaccagcgtctgcggtgccgtgctcgcactcggcggcatgtccttctacacctacctgggtctgaagaaagaccccgcgaccagcggcaaaaaagcaccatcgagacagaactccttcatggcgagacctaaggtcgctgctgacgacagtgacgacgcggattcagagcaagatgatactgtataggttggcgaaactgtcatctaggccacttaatgcaaagatcaatctgagctcagttaattctcggttggttgtaatctgtcggtgaccgagtccatttttgtacatagatgctacctttaagccttacggattgtctattgcgtagtgacaagtagttcgagaggtattgcccctaatttatagcctgtgagattcgattagcgatgtacgcaggaacggggaacccaagtcatctgtttttttatgtcgatcatcagttatttacaatgaaaatcatgcaactct

SEQ ID NO: 54105 - DNA, 193 bp, Zea mays
  Clone ID: MRT4577_149344C.1
gtcataagcggcatggccagctatccagactggcatagttacccaggagctgcaggacacgtaactggaccataccccggtggctactatcctggacctccccatggtgggggacagtatggcagtggattcccccctggcggctaccgagctcctgaccctggaggagccgatggctaccccagtgctggag

SEQ ID NO: 54106 - DNA, 262 bp, Zea mays
  Clone ID: MRT4577_149345C.1
gggggacccaaaaatttttctttaggggcccttttttaaaggacaaaactgttttttttggttaaaaaaactccagttgggcaacaggtaaaaaaaacacccttttatccccaatggttaaattttttttataaaaacagatgggaaatttaatttcacactaaaaccccttacattccaaggttttctttttgtgccaaaaacttggggatttttttatcttttggactaagccaaaaaacttttttattggccctttttt

SEQ ID NO: 54107 - DNA, 410 bp, Zea mays
  Clone ID: MRT4577_149346C.1
gcgcgggtgtggggggttttttttttatattttttttgttttttttttttttttttttttcaaccaaaaaagagcatttacaagcatgcattttgggataccgattaacccccgtcccccccatttttttttttttatacccacaggccaaacaagggggggggggggggggcattataatccacccacatttacaaagaataacaaggggataaaaatttacagggtttaacaggttactacggaagaaaccgactaaatattaattgggaggggacatgggctgaacaacgttgttgtactgacagactatactagggcccttaattgttataagtgttacccgccccctggaaatgggtcattcactcctttaacacgaaaagggtacttagggtgtaggccagtaa

SEQ ID NO: 54108 - DNA, 630 bp, Zea mays
  Clone ID: MRT4577_149347C.1
ccctcgatcaacagcaacagtggctggtcagaagattccgttgcgacagctcccgatctcctggcgggcttcccctctcctagtcggagcggatccccaggcggaggaggtagacgagaacgcagggggggtgggccccatcatccatgagactcacggggtccgccctggatgccagctctacagtcgatggcccgcaacctcgatgtatctggagaccaccggctgctctactgcaagggacgtggaaggttcgccacgctcgaggaggaccgtgtgcgggacctcccgctccccgacggaggcctcctcccgagcctgcccccctatgtcgaggtcgagcagtgacgcacgatacccctaacgcaatggccccttcccctctggcccaaggtctgccgcagcggatgggtcctttgtctgcagcttctacaagatgactgtgtatttctacacgaagtcatgattgtacgagacagatccgctgacttccttcaacgctctgatcatcttcaccggctcatgcaagaatgttgctgccgctacgaaagaccttgcgaatgatggctattctctgcctctgtatccagcgaaatcaggagttctgaactgaccctgctttacagcgct

SEQ ID NO: 54109 - DNA, 261 bp, Zea mays
  Clone ID: MRT4577_149348C.1
gcgttctgtttataggcttcttttctgggggggtgaccgacccatataaaaccctctggcagaacatataccaaaagctgtgtgcatggagtggagctaactttcgagggtcttgttcatattggcactccaactgatgtgtgaaatctttttgtaaagggtacctttacaaatcggtgtgaggagtgcctttaaaatattatagtaaacaatgcttgtgatctgtatgcatagagtgagagctaattttgggggggtcgt

SEQ ID NO: 54110 - DNA, 287 bp, Zea mays
  Clone ID: MRT4577_149349C.1
gtgcggggccgcaggggggtgcggtggagagataatgacgacgaggttcaagacgaacaggtagaagagaggcctcgtctgcgccggtcacggtcgtatcgggaagctccgcatgcatcccggtggtcggcgtaacgccggtgtgcatgcaccaccaccgcatcctcttcgacaagtaccatcccgggttcttcggaaaggtgggtatgcgctacttccacaaactccgctacatattctactgccccatcgtcaacattgataagctatgggccctcctaccccag

SEQ ID NO: 54111 - DNA, 148 bp, Zea mays
  Clone ID: MRT4577_14934C.1
agtgacccacgcagtcgagcttcttatagaccctctttaagatttttgttcacgatgaggtcgctttaaggcgcgctcattatcggttagatctttcaagccgtcatacgattgttccgcatatagagaggcttcattaggttcctaa

SEQ ID NO: 54112 - DNA, 376 bp, Zea mays
  Clone ID: MRT4577_149350C.1
ccctcgagtaccgaccggtcgcatttcccgtacgggctttccgtctatcccggaggctgatagcacctatatccattccagtcctcatatccgctcagccggcatgattggattgcagatgatcaactgccaaacctggattcacagtcaaggcgaaatcactgtaatcaatgtgatgcgcgatcaaaacaggctgacctaaggctatggattagaagcgtctctcaactcaagaggaagcatagtaggctctaactgaaatgacatggcaactgatattatggaaaaccatcgcatgatgcatttgcgcatcgcatagaatatagaaaagcgacgtggcaagcacatggtatattagaagcgccctgttgtacca

SEQ ID NO: 54113 - DNA, 197 bp, Zea mays
  Clone ID: MRT4577_149351C.1
ttttattttcacaaagctaacggtgtcattgagtccggtgatgttttccggcagactcatactaaaaactgaagtatatacacaggtttacaataacaccagccccatcatgctcaattatttacagtgacacgggcgattgctctaggcagacccaaaggtgttttaaccactcccgacacctgggtcgaccaccc

SEQ ID NO: 54114 - DNA, 256 bp, Zea mays
  unsure (1)..(256): unsure at all n locations
  Clone ID: MRT4577_149352C.1
atcaggctggaaaaaaaaaattgggggttgtcacatncacacaaacataacaaaataaaggtgcccaacaacaaaaaaagaggatccacaaataaccaactacctggattcaataaacatttttacttttccatcaaataacaatttctaccggaggaaaccaaacacaacaacacctaactacaacaagacacccaaacatactagtgaaccctccaagcggagcccacccatcctaaaacaaagtaaacttttt

SEQ ID NO: 54115 - DNA, 282 bp, Zea mays
  Clone ID: MRT4577_149353C.1
cccacgcgtccgcagaactagattagagatctgtactattctagttcaccgacctaacgcacttgatctaccgacagagtatcaggtaaatggcactattgggtagatcaagtgcgctaagttggtgaaccagaagactgcagaactagaatagagatctggactattggattggaccctcgttagatggtgtcccaaccggccggggagtggtggggatcttgatggacacgatggggtggcaaagccaagggattgagagtggatggcggcgataatttt

SEQ ID NO: 54116 - DNA, 295 bp, Zea mays
  Clone ID: MRT4577_149354C.1
ggacagcataacatactacgatccgtgtatatccatgtccaggggcgaacccaaaaatccaaaaagtttacagccaacccaagtgggaacctgatacaagaacctaaaaaaaaaacaggggatccaataaccaattacaccgtgtcccttctaagggaacgctaaaaaaaacactgttgttgcattcctcaacaaaaaaggaaccgggggcggccattatttagttgtaagggcccatgccaattctggagcccccgaagggggcaccaccggggggttcccggaatttggagta

SEQ ID NO: 54117 - DNA, 535 bp, Zea mays
  Clone ID: MRT4577_149355C.1
gcattcgttcatggatcagatcacgacatataagattagtgtacaacacaatggcctggcacgccgtggcccggccgctagcttaaggaccctggggcgaacttggcggggtactacccaggcgttgctggcgacgggggcggggaggtggtggagcaggttcttgaggggccccttgccggtgacgatggcctgaacgaagaatccgaacatggaacaacatggcgaggcgggcgctcttgatctccttgaccttgagcttggggaaggtgacggtgtcgttgtttaggcccaccgagtcgaagaactgtccgcctgggtagaggttgatgtcctggccaacgcccacaagggcgttgatgcgtacaccctagcacaaggcccatgaagatgacctgtaagtcgatcacgggcagcatgctctgcgtgtgcaccatggtgctgatgtaccatgtagaacagcccggcctctgaaaacatctggacacgggccttgaactactctggctatttgacaaccactcgcacttactta

SEQ ID NO: 54118 - DNA, 330 bp, Zea mays
  unsure (1)..(330): unsure at all n locations
  Clone ID: MRT4577_149356C.1
cctcgagggccgccggcatccanctcacgaaacaggcagagagagaccccagctggcaaacgcctccccccccccatctattnaaatgtggatgtcgtttgtcttttcataagcaagatgagtcgtggtggtaatgtcaggtgagtgaagaggattctgggttttatgtttactagtggttagatgctcaaatcggtttgcttcgatgttgacattgttgaacgttgtggagaataaagtgttgttgagaatactgtaggggcgatcacgtttcctggtggggttatattacaatctaataattagatacggcttgttgttaacacaatt

SEQ ID NO: 54119 - DNA, 256 bp, Zea mays
  unsure (1)..(256): unsure at all n locations
  Clone ID: MRT4577_149357C.1
gcggccgncctttgggggcctttttgtgtaaaatcacggctcgcaaaaacaaattcccatacgggtgtgtgtttataatacttcagacttgaaaccacacgactacctgtactgggggccaaaaccactgacctaatgtgagttcttggccttatcctgatgggtggggggaatcaaaacccaaacatgtttaggggttaactcctaaacacgcaattttccaaaattggaatcgccgccaaaggggacacatgaa

SEQ ID NO: 54120 - DNA, 1068 bp, Zea mays
  Clone ID: MRT4577_149358C.1
gaactttttaaccgaggacaacttaaaattgctttacacggcttcataaggtgtcctcggttaaaaagccgtgtaaaggaattttactttttggcccacctggtactggaaagacaatgcttgctaaggctgtggcaactgaggctggtgctaatttcataaacatatcgatgtcaagcatctcttcaaagtggcttggtgaaggagaaaaattcgtgaaagctgtttttttcactggcaagtaaaattgctccaagtgtaatttttgtggacgaggttgatggcatgttgggaaggcgggagaaccctggagaacatgaagccatgcggaagatgaaaaatgagtttatggtgaactgggatggtctgagaacaagggagaaagaacgtgtattagtacttgctgcaactaacaggccatttgatcttgatgaggctgttgttaggcggcttccaaggaggttgatggtgaatttgccagatgcatcaaataggagaaaaattcttagtgtaatactagccaaggaagatttggcagacgacgttgatctagaaactatagctaacctgacagaagggtactcaggcagtgatctcaagaatctgtgtgttactgctgcacaccgtcctattagggagattcttgaaaaggaaaagaaggagagagcttcagcagaagcagaaaatagatcattgcctccgtcacacactagcaatgatgtccgtgcattaagaacaagtgatttcatacatgcttatcaagttggcttatatagccaacaatactttgtgcagttctgcatcctctgcctgcttatgcgcgatctcattggctgagcggtacgaagataaaacggtagctaatccgaagcgatggcttctctttttctttctacggtattttgtctctatgaattacagttacagcagtcagaacagctgatttaaaaccgcagcgaaaaggctgattgccttgcccatttttgggtgggtggaggttaatacagatttctgtaatttttttactttaatattgtttgacatattgtgcaaggcaaatgatttcct

SEQ ID NO: 54121 - DNA, 2184 bp, Zea mays
  Clone ID: MRT4577_149359C.1
gttcaaacatccatttgatgtgatagttgagtttatctctgaagaaattcggcatggccctttaatcctttttctgaaggacacagagaaaatttgtgggaataatgattcctattatggtctgaagagcaagctaaaacattttccagctggcgcttttataattggatctcaaatccagcctgacaatcgcaaagagaaggcaaatgttagttctccttctctttcgaagttccggtacagccaagctatacttggcctcacattacaggacattgatgggggaaatgataataataaagaaacatcaaaggcaatgaagcatttgatcaaacttttcccgaataaagtgatacttgaggcaccacaagctgaaatggagctttcacggtggaaccagatgttaaaccgagatattgaagtccttaaaggaaatgcaaacatttcaaaaatacgctcttttctaacaaggcttggattggaatgcactgatcttgaagcgatattggtcacggatcgcattcttacaaatgagtgtattgataaaataattggttttgctttgagccatcaacttaagaactgtacaaatccagacccccctttgggtagtgtgcagtttgctctatccagcggaagtcttaagcatggcgttgacatgttgaaaagtatccagtctggctcgaagagcagcaccaaaaggaaatcacttaaggatattgctactgaaaacgaatttgaaaagagccttcttgctgatgtcacccctccacatgaaattggtgttacctttgaggacattggagctttagaaagtgtcaaagatactctgaaggagttggtgatgcttcctttgcaaagacccgaacttttcaaccgaggacaacttatgaagccatgtaaaggaattttactttttggcccacctggtacggggaagacaatgctggctaaggctgtggcaactgaggctggtgctaatttcataaacatatcgatgtcaagcatctcttcaaagtggcttggtgaaggagaaaaatttgtgaaagctgtgttttcactggcaagtaaaattgctccaagtgtaatttttgtggacgaggttgatggcatgctgggaaggcgggagaaccctggagaacatgaagccatgcggaagatgaaaaatgagtttatggtgaactgggatggtctgagaacaagggagaaagaacgtgtattagtacttgctgcaactaacaggccatttgatcttgatgaggctgttattaggcggcttccaaggaggttgatggtgaatttgccagatgcatcaaataggagaaaaattcttagtgtaatactagccaaggaagatttggcagacgacgttgatctagaaactatagctaacctgacagaagggtactcaggcagtgatctcaagaatctgtgtgttactgctgcacaccgtcctattagggagattcttgaaaaggaaaagaaggaattgcaattgagtttcaagtggatttgctcacatgcaggagagagcttcagcagaagcagaaaatagatcattgcctccgtcacacactagcaatgatgtccgtgcattaagaacaagtgatttcatacatgcgcatgaacaggtgtgtgcaagtgttccctcggattccagtaacatgagcgagcttgtgcaatggaatgatctctatggagaaggcggatcaaggaaaaagacaacgctaagctacttcatgtagcttaggttataaatatattgggagaagtgccctggcacaaagcagcaatagttggaggcggtgcagttggaaaaaaagctatgctcatctgccagacatccatatcaaagagaattgatggttcaggtggagcggatagtatacatacacatggttgctgcctctgctctgggccatgcatctggacaggacggctagcctggcttgcagttgccctatgcagttttgagtgcaatggtcaccatctgtgaagcacggataccacagagatcctggccccaaccactcttttcacaaatggagctgaggacctttggagttctaccaaaagtgatcttaaatctttggtgctgtttggttcaaaaaatgtaacgcaaatggtaatggtaatggtttcagctcgattactggcggtaacaaatttgaataagctggtatc

SEQ ID NO: 54122 - DNA, 509 bp, Zea mays
  Clone ID: MRT4577_14935C.1
cggccgcgtcgaccttttttttttttttttttttttttcgcattttcatttcacatcttacattattcccaatttgtagttctgtacagtgtccagcacggatgatggacttgattacattttcttctactgcacacgtatatatagccaaaaaaacaacaaccggcatacaaggttgaaaaaaaagcagcatgcaaatgccacacagggatgcccaatctactgaccaccttcctgatcgccgtcctcgcctccgaccaggtagagcttctggccgtcattgaccatgtcgacgtcgagcaccctggcgccgtcctcgcacagcagccgcagccgcgacgccgccgggccaggcaagccgagcttctcctgcgccgacgcgaccaggctctcgatggtgtgcgggatccacagcaccaccccctccgcgcgccgctcttcgcctgcgctcgcccgccacgggtggtacggaaacaccgagcaccgtcgcgggtggtcgacgcggccgc

SEQ ID NO: 54123 - DNA, 3043 bp, Zea mays
  Clone ID: MRT4577_149360C.1
aagacgcattttgaatgtttgcatacaaaataatcatgtatttcatgttaaatgattctaatcaataaattagattaggtatagacatcaacactaggttaatactcctgatgctcatactgtacacttgcacaggctctaaatgtttacaacctaaataatgaattattttttaagaaacgatggaaaagggttgttgggcgatgtcgtcgccgtgcttcctgtggagtgggaacaacacaaatggtatattttcttttcttttctttcccagacagtgatatgttgcactcaaaactgttgttaggacaactgcaagccagaccatccgtcatgtccagatgcatgatacatggcccagagtggaggcagcaaccaatgtgtatactactccattccgctccacctgagccatcaattctctcaatggatggatggcaggtgaacctagctcttttccaactgcacccgatacacacccccaactgcctccaaccatttctgctttgtgccagggcacttctcccgatatacttgcaacatcagctacatgaagtagcttagcgttgtctttttccttgacccgccttctccatagagatcattccattgcacaagctcgttcatgttactggaatctgaggaaacacttgcacacacctgttcatgcgcatgtatgaaatcacttattcttaatgcacggacatcattgctagtgtgcgacagaggcaatggcctattttctgtttctgctgaagctctctccttcttctccttttcaagaatctccctaataggacgatgagcagcagtaacacaaagattcttgagatcactacccgagtacccttctgtcaagttagctatagcttctagatcaacatcgtctgccaaatcttccttggctagtattacactaagaatctttctcctatttgatgcatctggcaaattcaccatcaacctccttggaagccgcctaataacagcctcatcaagatcaaatggcctgttagttgcagcaagtactaatacacgttctttctcctttgttctcagaccatcccagttcaccataaactcatttttcatcttacgcatggcttcatgttctccagggttctcccgccttcccagcatgccatcaacctcgtccacaaaaattacacttggagcaattttacttgccagtgaaaaaacagctttcacgaatttttctccttcaccaagccactttgaagagatgcttgacatcgatatgtttatgaaattagcaccagcctcagttgccacagccttagcaagcattgtctttccagtaccaggtgggccaaaaagtaaaattcctttacacggcttcataagttgtcctcggttaaaaagttcaggtctttgcaaaggaagcatcactaactccttcagagtatctttgacactttctaaagctccaatgtcctcaaaggtaacaccgatttcatgtggagggataacatctgcaagaagcctcttttcaaactcattttccgtagcaatatccttcagtgatttccttttagtgctgctcttcgagccagactggatactttccaacatgtcaataccatgcttaaggctttcgctggatagaacaaactgcacattactcaaaggggggtctggatttgtacagttcttaagttgatggctcaaagcaaaaccaattattttatcaatacactcatttgtaagaacgcgatccttgaccaatatcgcctcaagatcagtgcattccaaaccaacccttgttagaaaagaacgcattttgaaagtttgcattccttaaggattcaaaatcggtataacacctggttccaccgtgaaagctccattcatgtgtgggggtcggatcagcaagaaggtcgacttcatattcgttttcagtagcaataaggcgaagtgatttccttttggtgctgccttcgagccagactggatacttttcaacatgtcaacgccatgcttaagacttccgctggatagagcaaactgcacactacccaaaggggggctggatttgtacagttcttaagttgatggctcaaagcaaaaccaattattttatcaatacactcatttgtaagaatgcgatccgtgaccaatatcgcttcagggtcagtgcattccaatccaagccttgttagaaaagagcgtatttttgaaatgtttgcatttcctttaaggacttcaatatctcggtttaacatctggttccaccgtgaaagctccatttcatcttgtggtgcctcgagtgtcactttattcgggaaaagtttgattaaatgcttcgctgcctttgaagtttctttattattaccatttatcgcatcaatgtcctgcatttccatagattaggttataatatggaattcaccaacaaagtagaaactagacaacatatgattagtacaaataacaagactgcagacgccctcccgtagtataataatggaagtcatagtggaagacaaattgagacataagaagataaaccgtaagctgggagtacaaaaatggatatctgggtatgacataaatgaaactttatgtagttctgtgcatgtaacaccgcaatttggggctttttggatcgtgcccggtcaggcagcttgccagccaggcaatgtgatctcaaccccaagcgaccgaaatagaatgccagggaatcatgcctggcaaagcagccttgcggcccttgcctgggaacaaaaaccaggcctcgtatttgtaaaactattatgacagcatgccaacaaatggtcatgtcattctggtcataattcaaaatccagactagtcagtttgaccatacagtatatatacaagctataaatgctcataagatcataaataaattggtagtagatggtccatcagaaaccttacaacatttgctagagcttcagatggctgcggctccagcttcttcgtatactgtagtgaggatctttcaaaatgaactaggagccagcgaacacacaaaacactatcccggccggcctcgagg

SEQ ID NO: 54124 - DNA, 3238 bp, Zea mays
  Clone ID: MRT4577_149361C.1
aaaaagattctatgatgtcacaaatttgttggatcgcactggattttacaaatattcgagagaccatgccttgctaaaaacatccaagtagtttttaccaaacagaatataatgtacaagcatcgtattcaataataagttacaaccacaaggttagttttaattcgaccattatcaacctaacgaaggcacgaagatacaaaataatcatgtatttcatgttaaatgattctaatcaataaattagattaggtatagacatcaacactaggttaatactcctgatgctcatactgtacacttgcacaggctctaaatgtttacaacctaaataatgaattattttttaagaaacgatggaaaagggttgttgggcgatgtcgtcgccgtgcttcctgtggagtgggaacaacacaaatggtatattttcttttcttttctttcccagacagtgatatgttgcactcaaaactgttgttaggacaactgcaagccagaccatccgtcatgtccagatgcatgatacatggcccagagtggaggcagcaaccaattatgtatactactccattccaaaaaacctgagacatcagttctaacctggatccacccaaaaatgggcaaggcaatcagccttttcgctgcggttttaaatccaatgttctgactgctgtaactgtaattcatagagacaaaataccgtaaaaagaaaaagagaagccatcgcttcggattagctaccgttttatcttcgtaccgctcagccaatgagatcgcgcataagcaggcagaggattcgttctgcacaaagtattgctgactatataagccaacttgataagcatgaaaccccaaccaagtgcagtaattcagttcagaaacgtttcatcattgcagttgggcggcgtttggttcgcctactttctgctgcaatgttaatagcatccgagctcagcgctaactggtacagtgaaagagatatcgtgatttgtttgatcggatgtgctaatggctttcactcccttgattgcggaaccaaacacaaacaacggcacctgatatcgccgtgaatggaatgcagcacaaatcgttcgaaacaaacacattttttgatgtgctctctgcggcgtcaaagaagcactctagaaggccaccaggcagcatttctgcctgttgaacgagttttgtatgagcagttcagtcagtaccagagaaacggaggatcaacaatccatactagcagagtggggccttccgttcacaaaacggaaagtcaaagaacaaagatttaagatcacttttggtagaactccaaaggtcctcagctccatttgtgaaaagagtggttggggccaggatctctgtggtatccgtgcttcacagatggtgaccattgcactcaaaactgcatagggcaactgcaagccaggatagccgtcctgtccagatgcatgatgcatggcccagagcagaggcagcaaccatgtgtatgtatactattccattccattctattccgctccacctgaaccatcaattctctttgatatggatgtctggcagatgagcatagctttttttttccaactgcaccgcctccaactattgctgctttgtgccagggcacttctcccaatatatttgtaacatcagctacatgaagtagcttagcgttgtctttttccttgacccgccttctccatagagatcattccattgcacaagctcgttcatgttactggaatccgagggaacacttgcacacacctgttcatgcgcatgtatgaaatcacttattcttaatgcacggacatcattgctagtgtgtgacggaggcaatgacctattttctgtttctgctgaagctctctccttcttctccttttcaagaatctccctaataggacgatgagcagcagtaacacacagattcttgagatcactacccgagtacccttctgtcaggttagctatagcttctagatcaacgtcgtctgccaaatcttccttggctagtattacactaagaatttttctcctatttgatgcatctggcaaattcaccatcaacctcgttcacattatttgaacaaagtcgtattcaatctctcgtggcctttcaaatttctttattattactactttttggcacaactgtcctctaatgccatgtcaagtctccttaagctcacttctgacttctaaggaaaaggagcaagatccacgtcgtccgcctagtgttccgtagttagtatttcactaagaatttttctcatatctgatgcaactggttaattcatcatctacctccttggaaaccgactaataacagcttcatctagatcaaatggcctgttaattccagcaagtattaataaacgttctttttcccatgttctcacaccatcccaatgcactacaaaatctctttttaacatctggttcgaccgtgaaagctccatttcagcttgtggtccctcaagtgtcactttattcgggaaaagtttgatcaaatgcttcattatcgcctttgatgtttctttattattatcatttcccccatcaatgtcctgtaatgtgaggccaagtatagcttggctgtaccggaacttcgaaagaaaaggagaactaacatttgccttctctttgcgattgtcaggctggatttgagatccaattataaaagcgccagctggaaaatgttttagcttgctcttcagaccatgataggaatcattattcccacaaattttctctgtgtccttcagaaaaaggattaaagggccatgccgaatttcttcagagataaactcaactatcacatctaatgcatgtttggatgtagcctcccatcctggaatgtcgaggcataaagaatcaactggacaaaacaaaccatggtcaggttcgcaattgcctccaagatcgtttcctttttgattcaaagaagcactctagaaggccaccaggcagcatttctgcctgttgaacgagttttgtatgagcagttcagtcagtaccagagaaacggaggatcaacaatccatactagcagagtggggccttccgttcacaaaacggaaagtcaaagaacaaagatttaagatcacttttggtagaactccaaagggccccaaccactcttttcacaaatggagctgaggacctttgtgaaaagagtggttggggccaggatctctgtggtatccgtgcttcacagatggtgaccattgcacct

SEQ ID NO: 54125 - DNA, 833 bp, Zea mays
  unsure (1)..(833): unsure at all n locations
  Clone ID: MRT4577_149362C.1
ttgggtacctcgaggccggccggggtatatcataagcttctactgtttctacagtatttttgtcactatatattacaactacagcggtcgaaatagttagctttaatccaacgcaaacagcccttacatctccaacacgcagcttgtaaaaggtgtagccagtttcttacgttctgccactagatcacagcaccaccaccactctggttaagctatctccagccttacccatcccatatcataatttaaaggtgtgtttggttgcgagtcaggacaggataggacaggacgatcccacaccctacattgtttggttgggagtcaaggtttagatgagatcatccctagaaaaatctatcactaaaatgctgtccctattcgtccctccaaattagacggataatatcgtcctccgcgggacaaggcacctcacgagcccttctcgtcctcagatctagcgcctccttcaccctgctgctggccggcgagctcctcagcgtggtgagtcccctttcccctctgctctcctcttcctccatcatgctgaccggcgagctactcagagccaggtgctttccctctgctctcttctgcgcggtgcccagagttcctttcccctctgctttccctctaatcccatctgctctcttccgcgcggtgagcccggcgcggcgagatctttcccgtcgtcgccgcgngctgctgcttcggcacggatttaataaaaaaatataattctggatcaccgcgcggngagctccggtggcgccatgatgcgcgtggcctctccctcgcgtcgttggacgcccgncgatttcagcctctctctctct

SEQ ID NO: 54126 - DNA, 222 bp, Zea mays
  Clone ID: MRT4577_149363C.1
gagagagagacaccccagccgtccgagagcggtcggtcggctgtgctggtggaccaaaaagggcgagcgaccgtgccatgcatgcagcgcgctgacgaggcgttcggcacggctccgatccgcctccgctccaccaaccgaggattaggcgtcgtcgtcctgtgccacaggcgccacgcccagatcgtgtaccggctattggtgcgcgcgcgcgctcatggc

SEQ ID NO: 54127 - DNA, 274 bp, Zea mays
  unsure (1)..(274): unsure at all n locations
  Clone ID: MRT4577_149364C.1
tctattgtaggagatcggatagaagagaatgtgctaaggaaatcgctgatgattattttgtttgtttggtgggagacatgattancgaggaagctctagctaaatactagactatgtttaacagcctcgacggtgtcagagatgagataggtggaagctccactgcctgggctggttggacgagggtatggactgttgaggagaagaggtattgtgatctgctcaacaagtatatgtacatcattgggagggtggatatgaggcagattgagaa

SEQ ID NO: 54128 - DNA, 763 bp, Zea mays
  Clone ID: MRT4577_149365C.1
cactcctataggggattgggaccctcgaggcggcgggaatgagcttcgaagagcaggaacgcattaagtccattcaaacttcctcacccgaccaactgttccaatatctctgctgctgctgctggacaatccagattaatcaacatggcttcaactacagagacaaacaactataagttcaatcattctatgattcgagtcaaggaccccaaggcctccagtatgttgcagacaccccgatgtccacactgaccctggacgacaagtctcactccatactcaccttggcactcactgacaccaatgtagctaaattctatgagttcctgggaatgagccttgtcaagaagctcgaattccctgataacaagtttgatctctacttctttggctacgactcgcccaatgccctgtctcacaataagagcacttttgacagacaaggtctcatcgagttgactcacaactacggcactgagaatgaccctgaatacaaggtgaacaatggtaaccaggatcctcatcgtggctttggccacaccttggtatcgcggtcgacaacatccaggccgcctgccagcgaattgaagatgctggttacaagttccaaaagaagcttaccgatggccgcatgcgaaacattgcttttcgtcttgaccctgatggtaactgggggccgaaggtcgtcgcccgaaacgactaccaggagaccgaaaacgtgaaagaagactgacgtgtcgacttacacatggaccaaccatgc

SEQ ID NO: 54129 - DNA, 522 bp, Zea mays
  Clone ID: MRT4577_149366C.1
ggggggggggttttttttttttttttttttttttttttttttttttttttttttttttttttttttttttttttttttttttttttttgggccccggtaggtccaggcttatttaggggaaaactttaaaacaaacaggttgtatagattgggggggggggggacaattcatttggggaaaaaggaaccatactaagacggggataaaaaacgatcgcccggggaggaggggggtcataaaagggaatattttgcccggagggctaggtcaaaggacactacaaaaaattggggaaaaaaaggggggggaaaaaaactcccaaactaagcttttgcagggggagaagggagtattttcccaatttagggggggggaacttgaacataaggggagaaaaaggacttggaaacattaggggcctccaaataaagggagatggtctcaatggggggggcaaggccaacacctttaaaaacccctttacaagagggaatgggaccataaaccttggagggggggac

SEQ ID NO: 54130 - DNA, 288 bp, Zea mays
  Clone ID: MRT4577_149367C.1
gctctccgctaccacagctccgctccggtaaattggcagcctgtccgagttctccgctctcatgagctccgcctcgctgtccatgctccagaatgccaccttcgacgacttcatgtacgccgtctccttcatgacccaccccgtcggcacgagcatccgttcacctcgggcaccgacggatgccaatctaaatgtggccatcaacggattctgccacatctgactcaacttccttcggtgctgacacggtcactgcgacacctctcccctccacgtcatctccatcaa

SEQ ID NO: 54131 - DNA, 654 bp, Zea mays
  Clone ID: MRT4577_149368C.1
atgggcctcgctgccggcgggttcaagctcttcggcaaggtcatcacgcagtgcgccgagagcgctccgccggcctccttggtcgcgcgggagagggacgatccggacgagcgcgaccagccggtggtgaagcgggaggcagcggcggcgtcggacagcgactcggccgtcgtactcgtagacaagcagcggcgctccggcgggccggccgagagcgaggacagcaaggggcagcatcacccgcgcccgcggcagccgcagcagcaggacaccgcggaggcccgcgccgcggcgtcggcgccgccgctgccgtgcccgcggtgccggagccgcaacaccaagttctgctacttcaacaactacaacgtcaaccagccgcgccacttctgcaaggactgccaccgctactggaccgcgggcggcgcgctccgcaacgtccccgtcggcgccggccgccgcaagaaccggcccctcggcgccgcacccatccccttggccgtgtccgtgccggcccagcacctgcagcacccgcagcaccccgctgcggcggcgggccacggcctcggcctccccggccagcacccttcctgcccgacgtcgccgtccccggcctacgccgggcggtggccggtctgcccggaccgccggttctga

SEQ ID NO: 54132 - DNA, 515 bp, Zea mays
  Clone ID: MRT4577_149369C.1
gggggggcccgaccccccaacagtggccgttgggaacctgtctgttcgatggcgcaccggacagtccggtgcacaccggacagtccggtgccccctgcctcgtcatcactgccgttggattctagccgttggagcttctgacttgtgggcccgcctgggtgtccggtgcacaccggacaggtactgtttgatgtccggtgtgccagcatgggcaagtctgacgtctgcgcgcgctgcgcgcgcattaaatgcaccgcagggagccgttggcgccgaagagagccattgctccgctggtacaccggacagtccggtgcacaccggacagtccggtgaattttagcggagcggctgccacccgaacccgaggctggcgagttccggagaccgcgcttccttggagcaccggacatgtccggtgcacaccggacagtccggtgaattatagcgcgccggcttccgagaaatcccgagggtgaagagtttgagtctgagtcccctggtgcaccggacag

SEQ ID NO: 54133 - DNA, 672 bp, Zea mays
  Clone ID: MRT4577_14936C.1
gcagcggaaatcttattaccaaattttacaacttacaacaaatttacattatatttatcggagtggttacaaaagtggttacataagtttgaaatatatgctagctcagtgacaatcctccataagaagtatagaagaagtacttagacttataagaaggccgtgtccaccggcgcttaacaccaatcataatcaaagtgactcgtaacctgggcagccgccgtggagggcacgaggctggcccccgcggcgcgggcggaggccgcgggggagctgaagcggttggacggcacggtgaactgctcgtagagcgccatcttgttccttggcggagcccgcgggccgccgcccttgcctgcgtcgctgacgtggagccgcgggaacagcggacccatcaccttccccggctcctccttgcctccttgtccaccgcctcccctcgtcatgcccaggagccaggggagcgcgccgtgtcaatatcacgcaggcagctcgtggcggcagcaagaagatcccgaatcctcagcagcagcttcagccaccacgtttacccagtgtcagggccggcgatgggggaggccggggtgcaggcgcacagctgctaccgcggccatggcggcccaactgaaagggaaatcaaaccgtgagagcagaggggcgcatgggattggg

SEQ ID NO: 54134 - DNA, 458 bp, Zea mays
  Clone ID: MRT4577_149370C.1
ttgttttgcgatgaaagtaaatatcatttattagatagaagctagctgcccaaaggccttcatcatttccccccacagttgacagttgttctctacgggacacataacctttgtgcatagacaagcaggaaagggggcttagtggtacttgtgagcaagggcactggccactccagctaccaccttctggaaggcagcctgtgcagacggggtgaattccttgcccaggtggtggcccaacacaatcacaatcatattgcccaggagcctgaagttctcaggatccacatgcagcttgtcacagtggagttcactcagatgagcaaaggtgcccttgaggttgtccaagtgtttcaggccatcattgaaggcatttatcacctttttgccatgggccttcacctgggggttacccataatagcagaggcagaggacaggtccccacatttagaaaagt

SEQ ID NO: 54135 - DNA, 489 bp, Zea mays
  Clone ID: MRT4577_149371C.1
aaaaatattaatttttttgggttttttggtgggtggaccattaaatctttttttaaaaagggggggggggggggccaatttttcccccaccccgggcaaaactttaaaaaaaactgggcgggccccccccttttttgggggggggggggcgggtaacttttttcgcccctaaagcaggggggggggcgccctggaaaaccccccgcaggcgggctggggcgaagaggggtctgttcccattaaaacccccctagctgcaaaccccggttgcttaggagtcgggagggatgcggcatcaggactagctaacataaaaagcccctgaaacataagggggcggggggtgggatttttttgcccccccaggagcccaaccctgacccacttttgcacttgggggggggggaatgggccggtcattctctcattgggtagctttatgctcttttccccggcccacaagccccatgcatggcctaaaaggctttg

SEQ ID NO: 54136 - DNA, 447 bp, Zea mays
  Clone ID: MRT4577_149372C.1
tggctctggaactttgggctgatttatgtgcttgtggatgtgcgggcgggaatcgaggcaaaacaattttgtaattgtatttatatttcgtgtgcgtctctctcgttttacttgtgtgttttcttcttcttattgtttgctttgttgttgttgttgtttggttgctcggcggtgacggtgcattgggtggatgatgatcatgatcattctcctaaggcggcgtctactggtgatcttggtgctggtaagcttaattcgtctctgtgtcctatgtgtaatgagcctagttctgagcttaagcttattactggtgctgagcctgttatttgtagtacttatgctgaggataaagctgctaaggtttagactcgggatattgctggttaggaaagacattgtgtcactatgaagtgtgcatcattgtgagtggcaggggtgtcggctgcg

SEQ ID NO: 54137 - DNA, 584 bp, Zea mays
  Clone ID: MRT4577_149373C.1
ccggccgggatacccataatattttgagcattagaaacaccacctagcgaagcgctctaaccgccctctcaccacagtgtatcccaatatattccccctttgtgctctttttgctttttgtgagagcagcaacatgcgcgcatattatcacacagcgctctctctcttatagccccattattacacattctctcacaacatactctaaagtgctcttaacacacacatgtgcgcgtgccctacacgctaccacacgctcttgcggagagcgttacaccacacccaagtgcacaatcacaaacacaactcttgacatatatcactacacaccctatcaacgcagcacagacaccacagtctactaccaactgtgacccatatacatatggaacactgtcgcgtacacttagaacaacatgtgtttgtataacaaccctctttctgtggaacacgtatgtgcacaccaaccaccaccacagtctgcacagtttgtgacagctctcacaactatacacgtggagaactctggcctactacactacacaacacatgtttttatcatatacccctctctgtgtgcacag

SEQ ID NO: 54138 - DNA, 323 bp, Zea mays
  Clone ID: MRT4577_149374C.1
cattttcgtgtgtgcacatttggcagcacttttgattaagagggtggagaatccctaacaaaagccctaccaaagaggaccttagagagaagggaattagggaaatgctttccatctattagcctcaagctttctgcaaatctgcaagtttagctacttggaatgacaattttggaactataggtatccatggccttctacagttttgttattcttcagaatcttcttatctgcggatttggtgcagatgaaggcaccgctatccacttagtagtatcttggactcaccatcagagtgtggtccttagtatgctggcatccaa

SEQ ID NO: 54139 - DNA, 350 bp, Zea mays
  Clone ID: MRT4577_149375C.1
accttttttttcatgatcaccgatacgccgactgtcagcagcgcatgtacatgtatatacacacacattaaaggtgggggcatttgttaccacgtgctggtctctatgtatggcttgacgcctttggttctgccaagctttttagtcttctctattcttcaaattttgtgacatttagttgtttattaagatagatagcgtggttctgccaagctttttagtctttctctattcttcaaatttggtgacatttagttgtttattaagataggtagcgtctggtactgggaatttgttgcagaatgcaatataaattccgtgtacaacttgtagcataaaaaaaaaaaaaa

SEQ ID NO: 54140 - DNA, 239 bp, Zea mays
  Clone ID: MRT4577_149376C.1
ccagacatgggggacaacccaagcccaagcccaagcccggggaaaaatttggcaatgccaggaaaggggaaaactggccggaaaagggaaaagggaaaaaaaaagatcctagaaaacaagggggacacagaaggagccctgggaagaagcaaagcccggggtggaaggatgaaaaagaccacgggcaggggcaggggcaccggcaaacgggttgcaggcagcgcaatgcacaaggcaag

SEQ ID NO: 54141 - DNA, 344 bp, Zea mays
  Clone ID: MRT4577_149377C.1
aattcggcacgaggcttggtagtagactcgcggatacgatccttgtagacacttggacgcgcccgtggtgaaggccggggcatgcgggccatgaccacacaggggcgttgctgattggctagggcggggaaggaaattgcgggaggatgcgaaaccattggggtgttgggtgtggtgggaccgggcgtgagggggggactgggtgactggggggagggggggggggcgctgggttgctagggggagggggcgggggggtggaggggagggggtggggggtgaggtggggggggggagggggggggggtgggggtggggggggtgggtgggggggggggtgtggg

SEQ ID NO: 54142 - DNA, 574 bp, Zea mays
  Clone ID: MRT4577_149378C.1
aataaataacagtatgtcagtatataaataaaacccaaaatgtgcaaaccagtccagtgacctacgaagaacatcaactgtagaaatgtaaaagggtacatttcctgttccaggattccactataacaatatcagtgggtatctggatctgaaaccttagacttaagaactagaagaatgtatctttaccaaagcctaaaaagagtactccattattcgaacacattttgacctaagtgaagtaaacaagacgctaaaccagtaaaccaccccccacatactttgacacctgatactgggcaccttccactcgtgaaaaataacaagcagaaagtccctgataagcgataacccaacctgtacaatcactgctagactggtaggaatgcaaatgtgcctgcccgctcaccagaggtcttcttctcaggctaaaaactacgcccacaatggtcttcttcgctggagcagataaatgttaaaaactaaaatgccccatgaccaccagtttcaacactgcacagagttacaacagtataggtacgtacatgcatagtctattataatatcatcaggt

SEQ ID NO: 54143 - DNA, 351 bp, Zea mays
  Clone ID: MRT4577_149379C.1
gtcggctctgcgtcgaggcgagccccccctcccctcaaccgggacttgtgtttaccccattctcatcccactgactccacccacccacccccccgctgcctccgcctgatctcgtcggactcggatccgtccgaccactaccaccccgcgccgccgacgggcagccggagcagatcacagcaaatggccggacgcggctgcttcctcttcacccgggagtccgtgaactagggtctccctgggcggctctgcgaccaggtcccagatgctgttctggacgcttgccttgctgatgaccctgcacgcttggttgctcgccagacccgcaccgggaccaacatgtgatggctc

SEQ ID NO: 54144 - DNA, 1145 bp, Zea mays
  unsure (1)..(1145): unsure at all n locations
  Clone ID: MRT4577_14937C.1
ccggccgggagccggcacatgtctcactcctgctcgcccattcgatccgatcgtcaaacagatcgtcgtctcgcctcggcgggcttgcgcgcgcgccggctggccgctggctcgaccgacgaccgccaaccgcgcggctctgcttccctcccgggctcccggcgtatatgtagcccgcttcctcgatccccggcggggccataagccatagcatcagccgcacccgagctagccagttgtatagcgacgcccacgcccgaaacacacacgtatgtctcgcgcgctcgcacttgcggtcctcctcctggccgccgccgcggtggcgccgctggcctccgccgacggcgtgaagtccgtccccatccccggcgccaaggaggccgccagcggcgccaagatgttcgacagggaggccgacgccggtcacgacccggtcagcggcctgccggccgacccggcgcccgacgcgcgcccctaaggctacgcaccgtcgtcgttgtcgtcaccgccgtcgccgtcccgacccgtttccgctgaacaccacgcgccttgtacgtgtgcttgtgatgttcggcctctgcgtgcgttttgcattgcttgcgtgcgttttccttcggctgccgtgccgattggtcgtggtggacgcagcgccatggataacggatcttaggtactcacccgtgcttgctgtacctgtacccatttatttggcatttctctctttttttttcaatatgccggaggatatataatttcttcgagaaaaaggaatatatgcaggaggatctcgaatttcttgtggaaaaaaaaaaaaaaaaaaaaaaaaaaaaaaaaaaaaaaaaaaaacagttgtatagcgacgcccacgcccgaaacacacacgtatgtctcgcgcgctcgcacttgcggtcctcctcctggcgccgccgccgggtggcgccgctggcctccgccgacggcgtgaagtccgtccccatccccggcgccaaggaggccgccagcggcgccaagatgttcgacagggaggccgacgccggtcacgacccggtcagcggcctgccggccgacccggngcccgacgcgcgcccctaaggctacgcaccgtcgtcgttgtcgtcaccgccgtcgccgtcccgacccgtttc

SEQ ID NO: 54145 - DNA, 338 bp, Zea mays
  Clone ID: MRT4577_149380C.1
cccacgcgtccgaaaaaaaaaaaaaaaaaaaaaaaaaaaaaaaaaaaaaaaaaaaggaaaaaaggaaaaaaaaaaaaaaaaaaaaaaaaaaaaaaaaacacaaacataaaaaaaaaaaaaaaaaaaaaaaaaaaaaaaataaaaaaaatgtacttctccaactaaagtcaccaactttaaattcactgaaattgaacttaaaactttttttctggtaaaactatatcaattcaaaagtcaatcgttttaaaacacatttgcctgaaaaaacctggcgtaccaaaattaaaaccctatctaataaaccttctatacccctgcagatcctatattaaaaa

SEQ ID NO: 54146 - DNA, 281 bp, Zea mays
  Clone ID: MRT4577_149381C.1
ccgtcataaatctcgttgcaaatccatacatgctcggtagctccgtcccgcagcatatgacccgcatggcctagatcaagatcgggatcaatgggttccggaggattccgaggctggtggacagggtggccctggaaagtgattatgtgggggtgtgccccctagaacgaccccttaatcagcacagactatctgacctacatgttcaagtacgacactgtgcacagacagaggaagcaccataaagtcccggctgaaggactacaaaacccttttttttg

SEQ ID NO: 54147 - DNA, 170 bp, Zea mays
  unsure (1)..(170): unsure at all n locations
  Clone ID: MRT4577_149382C.1
ttgatacaaaaaaaaacacattaaatctgttcaccatttttatacctgcggnagtggatgatgtccttgacgatattcacgatgggctcgacgtcgcggaggatctccgtctcggccccatcgccaacgattcctccgccgcaggaccgngggacgaggccgagacggag

SEQ ID NO: 54148 - DNA, 110 bp, Zea mays
  Clone ID: MRT4577_149383C.1
aaacaagaacgtaaaacccccaccacgctgtagcggatagaagagtagataggtgcgcgcgatcgatgtcgtggctccggcgatcgtcgcggcggcgggtctccaggttc

SEQ ID NO: 54149 - DNA, 436 bp, Zea mays
  Clone ID: MRT4577_149384C.1
cgacccacgcgtaacgcccacacgctcgatatcctccggtgttgtttctctctctcgcgcgcgcggagacactcggatagtctgataccgtcggcagcccctacgccagctgaccatctcttcgtaaagacattctgcgcaaacgagcaccgataacatattctgagccctttcaacgtaaacgatgggggcatttagaagcggtgcaccgaacaacaggaacctggtggtgggtgggggcctagaggccttcgagctcagagactactactgcaccatgagagccgagccaggtacggacgagctgcaggcggcgatcgacatgtttgaggagaagaagaagaagagacgctagccagaaactccagcgcacgaggatcgtatacgagggggccttctcgtctctgtactgaaaatggatctaggcgctgacacg

SEQ ID NO: 54150 - DNA, 474 bp, Zea mays
  Clone ID: MRT4577_149385C.1
gacttgtcgaccgcgaccgatctcgtccggtcctctaatgccatgttccgtgtcttactttttcacttcaagaacacacgttagagaggtgttttcccttaggaaggggtcgctcaccaatgccaaaagtttccttgaggatgttatctcccactatcatgccatcccgttccgcatgtattgtggtggtttttttctcatatctcattcttattctttccactcaaatttttcattgactctattcttttctattcttttatattcattttatgtcccttttttaattaattttttatttcaatttcattagtaattttgactcatttttttattctctttttttgtgttgtatattcttattttttattgttttttttatctctttttcttttaattatttttttcatttttcatctcttattatttcttacttttatttttcttctattccattttaatatctaattcatt

SEQ ID NO: 54151 - DNA, 883 bp, Zea mays
  Clone ID: MRT4577_149386C.1
tcgggaatagagaccctgcccacctcgacctcaacctccagcgagcgcccacctccagcttgacaatggtggaagccaagatcctggtgctggtcgcggtccttgctctgcttcaggtatcatccaccgttgcccggcggcacggcaagccggacccctgcgacgaggacgacgctaacacggacgacctgccgggcggcctgcgccacaagaggacgccccacccgcgaagccatcactgcgcaccggcgcaccacgggggtcgtggcggcggcacccccgctgtgatgacggtgaacgggttcaagcgcggcgagagcggcggcgggccagcggagtgcgacgggcacttccacggcgacgacgagctgatcgtggcgctgtccacggagtggtacgcgcacgggcgccggtgccaccgaaggatccgcatcacgagcgcgcaccacgggcgcaccgtggaggcacgcgtcgtggacgagtgcgactccagccgcggatgccggcacaacatcgtcgactcgtcccctgcggtctggagggcgctcggtctcgacaccgacatcggacaggtgcccgtcacgtggtccgacgcctgaggcggccggccgtcacgtacggagctgtcgtctatcctgcgagggcaagagttcaggtagcgtggccggtgggcgacggcggcggcgttcgttcgtgcctgaccggcagtcttgatctcctgttaccagtagctagtttgctaccgtccgcttgaatttgcgtggactggagtagcagagaataaagtgtgttttctagaataattgttcggtgtgtggacctcttgtaagatcaacttgttcctagttatatatgatcatgtctttgtgagtttgctttatat

SEQ ID NO: 54152 - DNA, 159 bp, Zea mays
  Clone ID: MRT4577_149387C.1
ctttcatgttggatctccggtccaatgcgcgcgccatgttcaaaaacttttagatgaccgtgaacctgtataggtgcatcaggacccttgaaagaattatgagcaagaacgtgtatctatgagacaacacaaaatttttcaagcatcgacgtctactgc

SEQ ID NO: 54153 - DNA, 195 bp, Zea mays
  Clone ID: MRT4577_149389C.1
cgagaatctcattgctctcgcgacaaaaggtctccagacgtccttgcttgctctacagttgagaccctgcaggcaggtgcaggtgcagagactctcctcgccagagggcagtcaaccgcccgagtatgccatggcggaagcggtgaggcggacgcttgcgctgatgaacctggcggacatcatggagcgagccga

SEQ ID NO: 54154 - DNA, 297 bp, Zea mays
  Clone ID: MRT4577_14938C.1
gtggtttcgagggcagccctatcaacctccacaggagggatattttttgggatgatgcgttatcgatagacaaaaagatgacatggccatgaataataaggctgttgcatcgacttaagaggctcatgatgcagaattatatgatcccatggacaggtaagcaattattggaatgggaacacaccacaaactgagatggatgatgaatgctaactaggcatgaacccagaataccagatgatgctcagcattgcatagtcaacgccggattgaggattatatatacaccgttgacat

SEQ ID NO: 54155 - DNA, 889 bp, Zea mays
  Clone ID: MRT4577_149390C.1
aaatcagtgaacgcgtcagtctgcttcagtaagccttgcacaagaatggcaaccttgcacctgaatggcatccgagtcctttaacaagcgagaagagagccgggggaggaaaacggagcgacgggcggagagagagagagagagaggagaggaaagtgaggggcaagtttgttcctctttgtgacttgtgactgtggagcgcggagaggcggccatccccttctccttgacccgattaaaaccccactcccctcgcacctccggctccgggaccccgacgaacgccgaggaagccactaggaggagagaagaggaaggggcagatctatgggcaactgcaagagttcatctcgtgcactcctaggaaaggcccatgttgttccggatccagaatggaggattcgggacttcggaaagacccatgttccagatttcgaatggaggattgatgacttctcatcactgcttaagactggatctaagagagcaacatctggcccttttcactgctctggttataactgggacctgcaagtgagtctaatgcataaagaagctggttctgtaactccatatgttgcccttcgtcttgcgtcatccacactaagcttggtgccagctcacacagtgcatgcggtgtttgagttgtcaatatgcaaccattcaaaaggaatgtactatggatgcaaagctagctacaactttgatttcaagaatttctactcgaaggagcattgcttgattcctcttaagaagctgctgaaatcatctgcttttctagttgatgatggttgtgtctttgctgtggagatattaaaaattgatgtctgctctcctgaaaagaaggctgttgtggttcagaagaaggctaccacagttcagaacctct

SEQ ID NO: 54156 - DNA, 828 bp, Zea mays
  Clone ID: MRT4577_149391C.1
gatgtgcatatatttcttgggcttgaatttgtttaatctaaatagattaattttttaatccaatccaaatttccaatgacttgccatatcattagcatcagaggctccataaagcagctctgctagaattaactgattcactgtcaaggtcaaacatcactatgatattgctgagatggtccaatcagtgacaatgctggtggtattgttgagatggcaggaatgagccacaaaatctgagagaacttatgctcttggtgctgctgacaacacaactgttgctattagaaagggatttgccattggttcaggtgctcttgtgtccctggtgctgtttggtgccttcgttagcagagctggagtgaaggttgtcgatgttctctcctgaaggttttcattggtttgattgttggagacatgtttttgtactggttctctgtcatgaccatgaagagtgttggaagtgtcgccctaaagatggtggaggaggttcgcaggcagttcaacaccattcttgggttgatggagtgaacaggcaagcctgactatgcaacctatgtgaagatttgcactgatgcttccatcaatgagatgattcctcggggtgctctggtcatgctgactccctcattgttggaacctctttggcatcgagactctctctggcgttcttgctggtgccctgatttttggagtgtagatttctgctttggacaaattgccatctctacttccaacactgtgctgcataggacaacgccaagaagtatattaagcggcacaggcacctaaaatttacagggaagtgaaacagaagctcaatgatgg

SEQ ID NO: 54157 - DNA, 334 bp, Zea mays
  Clone ID: MRT4577_149392C.1
aagcaagcctccaatccattcggcgggcacgtggctggcgaagtcttggtgcgtgcccacggtgccatttcctgcatcctcatcgtacaacaggaatcgctagctgagaacggagagatgtctggcacgtcggcatcatcgacttgcttcacgaacgacacagacgtgcagtctccacgatccacgcgcgtcttcgtgctgaaggatcacagccaactcggtaatgcacatctggggttagtcaaccttgtgaaagacacaacacagtttgtagctcgcactatgtacgatcttattattgatctgaacgatggcgtacttaatacactttaag

SEQ ID NO: 54158 - DNA, 254 bp, Zea mays
  Clone ID: MRT4577_149393C.1
tttttttttttttttttttttttttttttttttttttttttttttttttttttttttttttttttttttttttaagtaaaaaagacaaaatttggttggaaaccacgaacacgggcggtaaactttttaggggaggagaaaagggttcacatccaatctaaaaaaatggcaactaaaacgacattaatattcatctccgggcatttgggttacttgggggctaacgggtccttttggaggaccccctgggggct

SEQ ID NO: 54159 - DNA, 159 bp, Zea mays
  Clone ID: MRT4577_149394C.1
tcgcatctcctttccttgtcgtgctcgcctttgtcgttcgcgtccatctcgcctgtcgaacgtccctgagctttttcttcaaccaccgccgaccccatggtgagctcgtacaaactccatctccctgtgcgcccttagttctgcttcatccgttcttca

SEQ ID NO: 54160 - DNA, 438 bp, Zea mays
  Clone ID: MRT4577_149395C.1
gtgttagatctctcaacaataagattgatgcaatccaaatgccaacagaccatatcttctgatggtatttttggcgccgtgatgaaccaactgccattctatagaaatgaaaggccccatgtgaaccaaacaccatatgtaacccgggtgagccaaacaccggtagcatccattgcgaaccaaagaccagtagcaaaaggaaggcacctggtgagccaaacaccatcagcaaatgggaaacctctgacgaaccaaacatcagtagcaaatggaagatccctgatgagccaagtaccatcagcaaatgggaaacctctgacgaaccaaatagcattgccaaatggaagacccatgatgaggcagaaaacagcataatgaggaaggccccatatgaaccaaatacctgtatcatatggatggccccatacaaacaaaata

SEQ ID NO: 54161 - DNA, 497 bp, Zea mays
  Clone ID: MRT4577_149396C.1
gtccaggtgctgcagtggcttccccttgccgaacacgcccgccgggttcgcctccgtcagcttcgcgtacctggacctgtcgcgcaacgtcttcgacgtcgacgcgtcggcaacggatatctaggacctcactctgcaggactagaactaccctccgtaggagagcattatagacgcatatgatgtcacgaagagcgcctctaacatgtgatgataaccaaactcatagacacgctggtcttgctctacatcaccgagggcaccgtcatcgactacagtcaccaaacggacgcgctggcgccatgccccgacgatgcgtgcaacttcgtattacatactcgcaatctcctaatgcattaggagccaaggatcttcctgcgaggctactcgacctcagaaatctgaggagagcacatcagaccgcggcatgacctctcgtgctgtgctcagtagaagcaaggagtactaccactaacgccctgctatacttcctcgat

SEQ ID NO: 54162 - DNA, 255 bp, Zea mays
  Clone ID: MRT4577_149397C.1
gtctttattattttaatcctgaacttccgcccataagggggtttcctttgaggcggagagatgttctctgatcatatcttcaccggacgcatgcgctccatccatgaccgcctttactttgaccaacttggctgcacgatctatcgtcgaacagtttccgtcacacggtgtccaagtatttatctacagatatattgaaaaatgttagcataaactgcatatggtaagatgattgaaccagtcttcaaaatcaac

SEQ ID NO: 54163 - DNA, 481 bp, Zea mays
  Clone ID: MRT4577_149398C.1
aaacacaaaacgaccccgcacacgtaccacttattaggacagggacaggacagcacaaaagataagcagggggccgatcaagaaatacaagggggagccataaaaaagcatgatagagcgcaggccccccagaccagaccagaccagaccaaaagctttttccaaaacagagggggggcctcatgcaaaaaacgggttttccgccttgggggggttcaccaccccccaggggaaggggggggcgtccctcccaaagggcccggaggccgccgtcttgagggaacgcccgttgccgccttttttgagggcgagggtgatgaaaaacatgccgggcctgaaaacaaagttctccttcacgaacttcaagaactccttgggggggaacgcgccggggccgtacctgtccacaaacaccgaaagggggtcgggcaccccgatggcgtaagaaacctggacaatggcccggggggcgaagcccgcg

SEQ ID NO: 54164 - DNA, 527 bp, Zea mays
  Clone ID: MRT4577_149399C.1
agggaaaactttggtgttgaaagctacactggtgcgacagggtataacaattggaagaatgcgattaagtcatttgatgtacatgtgggtaacattgatagtgctcataataaggctagaagatgttttgatgattttaaaaatcaaagacagagtgtgtcacatgtaatgtcacaagtgagtaggaaacaagaagaagaatatttgagacgtcttattattgtcttaggtgttatcagatttcttctattgcaaggtctggcttttcgtggtcatgatgagtgtactagctcaaataatagaggcaacttcttagaaatgtttgaatggtacaaaatgaaggattcaagtgctaagaaattgtttgatagcactcctaaaaattgtatgttgacatcaccggagattcaaaagcaaatttgtgaggcttgtgcagaagagaccaaaaaagtcatcttagctgaaattggggataagaaatttgctataatcatcgatgaggcccgagacacatctatcaaggaaca

SEQ ID NO: 54165 - DNA, 580 bp, Zea mays
  Clone ID: MRT4577_14939C.1
tccacgcgtacgcgcgacgcaatgccccacccgcacgttcgcgccgcgcagcgcaggaacccccaccacgcggtcggcgtcggcgttgtcggcggtgctctcgtcttccctctggcttcatctttgttgtgagtttatgcagctaggaagcatgcttgttattgctcttctttgtagtttttgttttcttttctggtgacctcttttcacttcttttttttttgtttttctattttcatcttttcttttttttttcttgtttttcttttatctttttctcccttatttttttattatttatcttaattttttttctctttcattattcttttattttttctttcttttttttatttatctttcttttacatacttctttttttttctctgatttctttatttttttatttttattttttctttttcttctctctttttttttttctattctcacatttttaattttcttctatcatatactcttttctttttcatcttctatttttttttatatttttctcctcttcctttttttcttttttacattctattttctttctttatttattctctctttctt

SEQ ID NO: 54166 - DNA, 1082 bp, Zea mays
  Clone ID: MRT4577_1493C.1
caccaaaacacatgtcttttgtattttatactctattcaagtataaatgggaatcttaacaacctgcacatgactagtaaactatatgtacaactgactgacgcaaccgtttttgcatctgcaataaaccaagagagaaactcacagctaccacattgatgtgctaaatatattttttttaaagggcacttagatttatatgtccccattgggagtcagggtcatcatcaaacacggagaaatccgatacgtagacacaccactttttccttggggccaaatttcagcgattgaaatcgccaaactcagagcaaacgggcacttcacacattgagttgcgctactcctataccagtcacattcacgtggatggcaatgttcagaatgttcatcttacaaaaaactcgtgcgctgtttaaaccttttataggccgtgaggcactccctgaaaaccatggtttcagacgaccatgtcgtttgttaaaatgctgacatgaaagcctacctcttcaaccttaatcttgcatttcaacatcggtggattcaacctccatattgtttgattgaatggaggcaaccagatcctcaattctcagaggaacatgccttgccgcatactggaacaaaactttcgaatggctgtcagcaaaagcacgagctcggtttggctttccaacaaattgcagctgatctatatgcatctttccatccacgagtttcacactttcatctctaacagcaaagcggagaaggttccctggtcgcagatttgacgtctgtatgaatgcgctgtccaagctaccaaacacaacatgaggatcatctgaagtaaccacctttccatcttctagcagctccagcacaagatgttgttcgcttggtatttcacccttgttgttcgtatcgataacatactggctacaggtctcatctttccatactagggcaagaggtgtgattccagcttgataatgtgcatgcttgttgtagaacaccaaaccatctttgacataaggcatgctgcctgagtatgctgcttggagaccctcaagagtgccactcatataccggaaccggccggc

SEQ ID NO: 54167 - DNA, 1483 bp, Zea mays
  Clone ID: MRT4577_149400C.1
ctggacgcaaacactgggccgcgttgcttctccgtcccactgaaccatcgccgccggctagccgcgggagaagttcccgccgcgccgacgccgaaaccgccgtcgcgtgttttgaagctctcgaaaaaagggcgcgcagcatgagagcggccgtgaactcgccacctccgcactgctactcgcgccgccgtgccagcgccacgctgctggatgcgcgccatgtgttcgaccacgtgccgccgcagcgcctaccgaacctggccgcgggactccgcgtgcggcccatcgcccccttgctggcaatattctacccctgcttcgttccggctgcctgaagcaagcgcttcatagacattcctgcatactatttgtgatgcactgcgcattctggggttagccgttcttggcattgctgctcaagaccaacggcctattcttcaatttctcgcgtgcgtgtagccccggctgcattcttgccagcaagatacaactttgaaggctatatcccccgtagctgctccagttcgcttcagatctatagccggtcatcgatgttaaatctaccaccatcttcagctctcacggtgtcctcccagctcacctcctctgacgtagcccagcgttcagaggaatggttcgctcttcgcaaggacaagctcaccacaagcaccttcagtaccgccttgggtttctgggctggcaacagaagggcagagctgtggaacgagaaagtttttggcgcgacagagaccaagctggcggacaccgctaggtctgccatggactggggcacgcatcatgagagcgtagccatagagcagtacacgaacatcacaggaagacacgtgggcaccttcggcttcgcggtgcacgccgaggccagctccggatggctcggagcctcgcccgatggagtcctcgggtgcgggctggacggcgggatcctggaagtcaagtgccccttcaacaagggcaagcccgagctcgcgctgccctggcgcgccatgccctactactacatgccgcaggtgcagggcctgatggagatcatgggcagggactgggcggagctctactgctggacgcccagcgggagcagcctgttccgcgtgccgcgggaccgcgcgtactgggagctcctgcacgaggcgctgcgcgacttctggtggggcgacgtggtgcccgcgcgggagctggcgctcctggggaagcacgacgaggcgaggtccttcgagcctcggcccaagcaccggctcacgaacctggtgctgtacaggagcaggaagctggcctccgaggccaagctgctgtggatggatgttggcggccgtgtagagttctttcagtgagacgttctgccggtggttgtactgtgcactgtgttgtgactattctttgaattaactcattgccttccgagtgtcctgttcttttttttgtatgttttttacgagcgtatgtcttccaaaaaaaaaaaaaacaa

SEQ ID NO: 54168 - DNA, 633 bp, Zea mays
  Clone ID: MRT4577_149401C.1
tttgttgttgcctcctctctcgctcccatctcgtgatcctgcttcgtgcagactgctgcgcaaaccgctccagatatcttccggccacctgcccttcaccctcgccatgccatccgaggcgcgagctcaagacccaccggaggaaccgtcgggggcttgaccatgaatacaataataacctcttgccgaatgattggaacaaacccttccctgggtcatcccatgccacgggtattgccctgaagaatatagctattgaagccccttagccccactccgctatccgaaagtgaggtcgagctctgcttgtaaacactgccaagaagattggtgccttcacgccaaatgactggtggatgaactacattggggacaatgatgacgccctgattgctgaatgtgcgcataaggctgactctgagacgagatattgcctgtctgcccgtactcaaggcctgtcaaggagtgtaccggttgtgacatactcgcttgtctctttgtcctgcgagaattacagacaactctccggcttacattgatcttgctaccaccagtcaaaagcctggagtctatgcgttcatgcacatagatgattacaaagaatgctagcttgatatgtatacatcgcattcg

SEQ ID NO: 54169 - DNA, 450 bp, Zea mays
  Clone ID: MRT4577_149402C.1
attcggctcgaggatctacccccccgctggttgtctggctggggacttcccaattgctctacgcatggcatctgtgggccgtgaggggattggagaatttctccgccccctgcactggcgcttcctgttccaggggggagactgtggatatcctcacactcagggtcaggctgcggaccgtgttgaggtgtaccgggccagcatggttgctggagacagatcaactatggtgaagggaatccggccagaccatatcagcttcagcccagacagaccgactattgattattgcaggctgcgcatcatttaggagtgacatcttgccgcagaagcgggcattgaaccccatcatcctccatagtaaaatgctagcactggcagcgtctcacctagcgaatagtatggttgtatggtctcataagtcatttaatgcttgaactgcgaattcta

SEQ ID NO: 54170 - DNA, 129 bp, Zea mays
  Clone ID: MRT4577_149403C.1
aaggaatctgggatagacatatcaaggatatacctcagtcagctggtgctcaagtctacatatcactggttctgggaggagttcggataatagtcctgccggaggcattattgtagagaggaccttact

SEQ ID NO: 54171 - DNA, 1404 bp, Zea mays
  Clone ID: MRT4577_149404C.1
ggaaaaagaaagggaaaaaaccaaaaaaaacggggcttagggacctggcaaatttaacggtaaacttgggggaaacccccaaacccccgggggttaaggggccggtaaaggggggggtcaatttgccattaagggtgggaaatttttgggaaagggcatcggttggggcctttttccatttaccccacagggtaaaaaggggtttttttttaagaacattaaattggggaaacccagggtttttcccgtccaaaggttttaaaaccccggcccgttaatttttttttggggccccaaaaaaaaaattaaaaattttaaaaaagggggaagaaaacttggatctttaaaaagggcccccccattttttttttttttttttttttttttttttttttttttttttttttttttttttttttttttttttttttttttttttttttttttttttttttttttttttttttttttttttgaggaaagcaagttattcataaacgacaaataacttgagcaaatcgcttacaaatgataatcagataagtagagtcaacaagacaaaactgtatctggcaacgcacatcgcctcaccccagccgactacaccattattcttcagcaaaagcaaacagctccttccctcccccctcagctcaagcgataaccataagaaaacctgctacgcgactgcgtatatgataatgcatatgcatgcaaaagataactgacaggccagtgtagcgaacttcatagcacacaacggcccgagtgagctgcaagccgtgtgcctagtaccggtagtgggcaggcttgtagggaccctcgatcggcacgctgatgtagtcggcctgagacttggtgagcttggtcagcttggcaccaagcttgcccaagtggagagcagcaaccttctcatcaaggtgcttggggagcacatacaccttcttctcatacttgccagagctcttctccttccacagttcaagttgggcaatgacctggttagtgaatgagcaggacatgacaaagctaggatggccagtagcacacccaaggttcatcaggcgaccctcagcaaggacaatgatgccagtgttggtctcggggaacacccagcggtcagtctggggcttgatggtgatgcgcttgcgcccagggtaggtctcaaggccgagcatatcaatttcattgtcaaagtggccaatgttgcagacaatggcattgttcttcatctccctcatgtggtcacccatgatgatatccttgtgaccgagatcgaccccatctgtgccctccaggctctgatggagggtcttcaggtccttcccttggaggacgttgtctctgaagctgacatcttcgtgaccaccactggcaaccatgatgatatcccggacgcgtggg

SEQ ID NO: 54172 - DNA, 478 bp, Zea mays
  Clone ID: MRT4577_149405C.1
aagcttttttttttttttttttttttttttttttttttttacaagctttttttttttttgttttttttaacttcacaggcggccggtgcaaggggggaagggcaaaacaccggggggggggaaaagagggtcagggctggggcccgggggagggggaaacccggacaaagggccaccccggggcaaaggggaaaccgtaaacagtacacccaaacacaccaaacgggagagaaaaaggaaaaaccgggggggccgaaagaggaaagaaacccacaaaaaaaacggggcgccccaggcccactaaccaatcggaaaacccgaagggccagggggaaaaaggaatgggccaacccccggggacagggggaaggactatgggggcctggtcccctttccgcggcaagggccaacagcccactgaaaggcgggggtggggagcggcacaaactcacggaaaggcggaagggcggacatccgc

SEQ ID NO: 54173 - DNA, 377 bp, Zea mays
  unsure (1)..(377): unsure at all n locations
  Clone ID: MRT4577_149406C.1
tatgtttagtcagatgatcacgaccagaggtgaacccgctgaatgctgagaagggagatgcccaaggcataaggcgaattcagaaattgcggaacattacacgcaatcgaggaagcactttgaacatatcaaagggggcctgcagcgaactaaagaaccatgaggatgctgaggtgatacgccgtgacaagagatattaagctgtgtgcacgacaagaccccctagatcatgccagctatcaacaagctctttactgaccccacgtgaagaaaagccacttgggctgggcgctcatgactatcgttctgctactagttgtctttggggaatgngtaccctttttatggcaatacgcactgtgaacgaacaagacggt

SEQ ID NO: 54174 - DNA, 268 bp, Zea mays
  Clone ID: MRT4577_149408C.1
ctaacatttaccctcatttcctctacaaacctgtcttcacactccacgaaagcccaccatcagctccttacactactcccactcacccaatcacacatcccaaacctttattataacaaaccaccaccacaccgacataactcgcaactcaaaacacctacgatgaactcaacacaatatcaactcacttaaatcaaactccatttcggtaatccttctcctctcacttacacaaacaactgtcatatacatccttatcactcctgaa

SEQ ID NO: 54175 - DNA, 165 bp, Zea mays
  Clone ID: MRT4577_149409C.1
cagcacgacaaatggctttacaatatttattaagtttcggaatgggaagtttaccattgcttaatttttatttctcgtagcgaacgaagtacaaacagttgatgctcggcgacagtaattaacaaataaggttggttgtactttggggatgaataccgttaacga

SEQ ID NO: 54176 - DNA, 256 bp, Zea mays
  Clone ID: MRT4577_14940C.1
cttcagtatgcatgtatttttttccttctctgtgttttctaaacttacactaaaggattcatcaaatcatcttgttcagatggctcaggattgtatttattttgcttaccccgtgctcttgggttctatagtatttctataattatgtaacgagaatagtgttgcactgtaatctatcatatagagctatatgtatggaaaattttgatcaattttttaagaaatgtatcctgtttgcaaaggcacagtaaatttg

SEQ ID NO: 54177 - DNA, 2585 bp, Zea mays
  Clone ID: MRT4577_149411C.1
cccccggggggtgggccccccaccaaggggggggtttccagatttaagtcccgggggccaattttccaaaaaaggccggtggttgccccccatatcccctgttgggaaaaaaacccgggccctttttccctggatcgcccccgtgggccaattttttccaaaaggcttcccccccccgggtttttccttgccaaaaccaaatgggggggggtttaacaaacccccctttacccgtcaaattttaggggcccgaacccccggggaattaaaattcccccccggcgggttttcccaatttttttgccccccccgaggggatttggggggcccccccccctggggccgttggtccctgcccccccccccccccccaagggggggggcccccggtcctttaggggcccgggcccttccccccccaggcccggggccaaaaaaaaccccccccttttttttttttttttttttttttttttttttttttttttttttttttttttttttttttttttttttttttttttttttttttttttttttttttttttttttttttttttttttttttttttttttttttctttttaacgcaaatcaggatccgtctttaagtatgctcttgaggaaagcaagttattcataaaacgacaaataacttgagcaaatcgcttacaaatgataatcagataagtagagtcaacaagacaaaactgtatctggcaacgcacatcgcctcaccccagccgactacaccattattcttcagcaaaagcaaacagctccttccctcccccctcagctcaagcgataaccataagaaaacctgctacgcgactgcgtatatgataatgcatatgcatgcaaaagataactgacaggccagtgtagcgaacttcatagcacacaacggcccgagtgagctgcaagccgtgtgctggctgcccactaccggtactaggcaggcttgtagggaccctcgatcggcacgctgatgtagtcggcctgagacttggtgagcttggtcagcttggcaccaagcttgcccaagtggagagcagcaaccttctcatcaaggtgcttggggagcacatacaccttcttctcatacttgccagagctcttctccttccacagttcaagttgggcaatgacctgcatcatcaagtcaagagtagactcagtaatgtggcattgctagccaatcagtttacatatattagatcaccatatatatggcaataccaccaattccagtgcttacctggttagtgaatgagcaggacatgacaaagctaggatggccagtagcacacccaaggttcatcaggcgaccctcagcaaggacaatgatgccagtgttggtctcggggaacacccagcggtcagtctggggcttgatggtgatgcgcttgacgccagggtaggtctcaaggccgagcatatcaatttcattgtcaaagtggccaatgttgcagacaatggcattgttcttcatcttcctcatgtggtcaaccatgatgatatccttgttgccagtggtggtcacgaagatgtcagcttcagagacaacgtcctccaagggaaggacctgaagaccctccatcagagcctggagggcacagatggggtcgatctcggtcacaatgacacgggcaccagcctgcttgagtgcagcagcacaacccttgccgacatcaccgtatccgcagaccacggcaacctttccggcgatcataacgtcagtggccctcatcagaccatcagggagcgagtggcggcaaccatacaggttgtcaaacttgctcttggtgacggaatcgttgacgttaatggcagggaagaggagggcgccggtctcctgcatctggtagagcctcttgacacccgtggtggtctcctcagagacgccgacaagcctctccttcatcttgcggtacttcttggggtcagccttgagcccgtcgcggatgatggtgagcacgatcttgaactcagcgttgtcggtggactccggatcggggatcttgccggtcttctcgtagtcctcctcggccttgacaccctcgtggatgagcagggtggcgtcgccgccgtcgtcgacgatgaggtcggggccgcccgccggcgccccagtcgaggcagcgctcggtgcaccaccagtactcctcgagggtctcgcccttccaggcgaagacggcggccgagtcgcgggcgatggcggcggcggcgtggtcctgcgtggagaagatgttgcaggagcaccagcggacctcggcgccgagcgcggtgagggtctcgatgaggacggcggtctggatggtcatgtggagggagccggagatccgggcgcccttgaagggctgcgagggcccgaactcggcgcggcaggccatgaggccgggcatctcgacctcggcgagctcgagctcgaggcggccgaagtcggcctgggagaggtccttgaccttgtactcccggccggacgcggtcttctccacggagagcgccatggcggcagaggaggttggtggattggatctgccgaggagggagaggagtggtggggggaggcggcgatgggaaag

SEQ ID NO: 54178 - DNA, 291 bp, Zea mays
  unsure (1)..(291): unsure at all n locations
  Clone ID: MRT4577_149412C.1
acacaacatactactaccatacacttaccgcgatatgtcaaacgttagttgtgcgagcatatnccatgtaaacaaactactcccaagcacacaattaccaacccactcaccctcctgcaaatcacccacaatatacaccttacattactgcttctagtaatcaaccatccaactatatagacacgcaatgcttacgactcaatgctactctacgtcgaacactagatatcaccccttacctaggacaaactcctcaccaatatttatcaccataccaacgttacctataac

SEQ ID NO: 54179 - DNA, 1190 bp, Zea mays
  Clone ID: MRT4577_149413C.1
ttgggtacctcgaggccggccggggccgtctcctccctcactctcgttccatttccccatctcccagatccaattcgcgagttctccctcctctgccgccatggcgctctctgtggagaagacctcgtctggacgggagtacaaggtcaaggatctctcgcaggcggacttcggccgcctcgagattgagctggccgaggtcgaaatgcccggcctcatggcgtgccgcgccgagttcggcccgtcgaagcccttcgctggcgctaggatctcggggtctctccacatgaccatccagaccgccgtcctcatcgagaccctcaccgcgctcgggcgccgaggtccgctggtgctcctgcaacatcttctccacgcaggaccacgcgcgccgccgccatcgcgcgcgactcggccgccgtgttcgcctgggaagggggagaccctcgaggaggtactggtggtgcaccgagcgctgcctcgactggggcgaggcgggcggccccgacctcatcgtcgacgacggcggcgacgccacgctgctcatcccacgagggtgtcaaggccgaggaggactacgagaagaccggcaagatcccccgatccggagtccaccgacaacgctgagttcaagatcgtgctcaccatcatccgcgacgggctcaaggctgaccccaagaagtaccgcaagatgaaggagaggcttgtcggcgtctctgaggagaccaccacgggtgtcaagaggctctaccagatgcaggagaccggcgccctcctcttccctgccattaacgtcaacgattccgtcaccaagagcaaggtgattcttgcttgcctttctttggatccatttcatttcagatctgacgttcttgttgtgcggatctagatcctgcatgactagcagtgtgagatttacttgtttattgatgctgctgctttatatctcagtatctcactgctatggttaaactcttgtggatcttcagattcggctgctagacgttcttgtttattggttgctagatggttaataatttttacgtagtattaaacatggatcttcagatctctgttagacaggacctattttttgggattgattgtagaaggcgaagcatctcgggatattttaggtctttttttgtgtagccagattcggctgctgttatatgtttgggtccagttacttg

SEQ ID NO: 54180 - DNA, 374 bp, Zea mays
  Clone ID: MRT4577_149414C.1
acccattgagcggaggctgttctatttttttatttttttttatgcagtgaaaaaaagagaaacattgcaatttgaggttcataaaaacgtcagttctacgggcacttgctcatcccgatcaaacggcaatgtcaacccccctaactgactcattttgttctaacgcgcggtatcacatggggccacccaatatgtcagacaaggtgctgcctcttttattgcatttggggtttgcacccatatgcctgcacggctcaggcctgacgacaggccatgatcatcctcataggtgggccctgtgtgcaatgggtttgcggtcacaattttacagaacataggggcggcaagcatagactcccaacccgcctttgcct

SEQ ID NO: 54181 - DNA, 250 bp, Zea mays
  Clone ID: MRT4577_149415C.1
ctgcagtccgtccggaattcgggtcgccatgctgcatgagaacgtggtgatgaaatgtgacaattgggggaagagggtggtgcatgtcatttggtgattgggattagatagcattgatcagaaaatgaaaatccagtgatagaaagattgcctacgtaagagtgattaccagtcacaagctgcagatgggcaattttaaagaaggacgagacaattttaaggattaccattagtctactattttattgat

SEQ ID NO: 54182 - DNA, 373 bp, Zea mays
  Clone ID: MRT4577_149416C.1
tagattacaacgttcacaaggagagcaccctgcacttgagggagaacatcatggggggcatgcacaacctcaccaagacatgtgattgggacgagtatgacccttgagcgtacttttctaatccccttgacaacactaaggccaaaagccagaacaaggagggcgctactccagacaaaaagcctctgatttctgccggctggtaacctaggagcagcgcgcacgcttgaccctacaccaacaaaaaagagagcacgctacacttgatactgtgtcgcaggagggggacacggaccttggcgaagacactaactggcacgccgctggcggatgagccgacactaacaatgttgaggatgctgaaggagagtgc

SEQ ID NO: 54183 - DNA, 251 bp, Zea mays
  unsure (1)..(251): unsure at all n locations
  Clone ID: MRT4577_149417C.1
cggccgcgtgggcgcacgcgcgggcactgggcccggcgatactgcttagggctgggcatagcggggacgatccgactggtcntaaccgcagcggctggaggcgtaacgtgccgacttgtggagactcaaactagggtatggccagctgctgtgccatcaggctcccttaccagccagagcggggggggggtatntggtacacgaaggcggggaggcagtgcttaggaatgacaatgtgactggggtgtctg

SEQ ID NO: 54184 - DNA, 197 bp, Zea mays
  unsure (1)..(197): unsure at all n locations
  Clone ID: MRT4577_149418C.1
ttttctttctaggtcgtcgccaaccccnacatggtagagcttattatgcaggtgggcggcgtctgctaggctcctttccaggctgccctctccggggagctgctgtcgcgcggtacaacatccggtgtccctcgcgaggtcttcttctttgtggtcgacggtcaaagttacaagtttcttgtcgcagcctctcttgt

SEQ ID NO: 54185 - DNA, 629 bp, Zea mays
  Clone ID: MRT4577_149419C.1
atttttttctttttcgcccccagattcgcatcatgggatgtttcaaaacttgtctttgaaatgcccaactttcccttggtctactctacaatcatgtgttccagtaacagctccgtctcttgttgttgtcgatcggtgcaggggaggaagaagaagttcctgagctatttccagtgttgtactagagcgtgaagaaaactcccaagacttcttcttcctctgcggcgctgcgcagaggaacgacgtctgtggaatacaggtttgggacatgataaccatagtggatggcgtgaatggcctgaggatgcaagtggatggccaagagatggagggtcaggagttgggggagctagtgggtcaagggaaggagaagctggtggttctggaagcgggggagatggaggatcttcacgggttcggaagccgtggagaactagtttggcacaagctgcagtttggcacgacttctaggtatgttagactttgtcgaaaccctcttcgctagtggaggtaccgaccatcactcgtcactgtacctcgatggtgatcggtgatcgtgagcttctatgttatgtgttgtgatacttgagacctttattatgactatgtatgagatattgtcttttatt

SEQ ID NO: 54186 - DNA, 365 bp, Zea mays
  Clone ID: MRT4577_14941C.1
aattgtgcctctaaccgaatatcactagaggcacttttcacctcgattacacccacctcggacgggagtctacttgtatgctctccgttaaatgccagtctgaacgctccgctccagataattgctccaattctccatgaagggagccatatccaaggtcacacacaaggcgccttccaagcttatccttaaaagaaatggtgtgagaacatccttccaagaggcatctatgtgccacgttggattgtccacctcaagcctggtttcggtgtcagcgattatctcgggtttaccggcgaatatcgttagctacttcaagtgggtacagaacattccaggtttcatgctatgctgatgagaaagtg

SEQ ID NO: 54187 - DNA, 321 bp, Zea mays
  Clone ID: MRT4577_149420C.1
atcctgattaccgagatagcatcttaccccatgtacatccaggtgtatcaatgattgatgaccgtagaattgatcggatcggttctcgtcgtgaattggatctaagagatgaagagcgccgaagggacctaatactggaaagagagaaagagcttgagtgggaacgtgaacgtgagttacgggattttcgagaccgtgaaagagaaagagaacgtgaaagggaaagggaccttgaaagactactaagagaacgcgaaagagaaagggagcgcgaacatgaaagagagcgtgaaagagaacgccttcgtgagcgccgggaga

SEQ ID NO: 54188 - DNA, 392 bp, Zea mays
  Clone ID: MRT4577_149421C.1
tgtaatgcgcttccccatggatctctgttaaccacgtatgtaaaggtattatctatattcggactgcataggctataatgaatccaaaatacagaagtatttccaatgttgcagggtacgatagggtaatcaatctttctaaatctaatgcgggtgcattgcaaccatataactccatacccagcactccaattaagagtatactggaacctactgcagaatgcaaaatatacttggtagctgaatacagacgcctctttccccgcacatatataagaataagttgacagtgtattaaatctgactgccacaggatctacaaaggaaataggcctcgtgaattaagtaatcctatttgaccgcgatacgttgctatcctcaggaaatagaat

SEQ ID NO: 54189 - DNA, 171 bp, Zea mays
  Clone ID: MRT4577_149422C.1
acctcgaggacaagccgccgccgctgccaaaggggaacccgtggaccaagaagctgcctcagcacctgtccccggtgggcaccggcgtgccgccgcccgctcaggactccccggaggccgagctcagttcccccaaaattataaaagcgggaaaactcaagacaaagaaat

SEQ ID NO: 54190 - DNA, 2466 bp, Zea mays
  unsure (1)..(2466): unsure at all n locations
  Clone ID: MRT4577_149423C.1
cggccgcgtgggcggacgcgtgggtttatggtgngaggtacaaaactgttgtagaaaggattctgaaggcaagacttgtttatgggnancccnctntnctanantnnncgcgccattgntcccactccggccgggccgggggggccatccggctgccaaacgagccgagccggtgagggttctcgttcctttcttccggactacaacatctgtcaccgtgaaatctcggctacctccttctgacttctggtacctcgccgccggggacccaactccgatccccaccccaccataccaaagccaccgcggctgcggctgcggcttccgcatcatcaatggtgctgatcactctcgtccgcgactacatcgaccgcatgctccacgacatcccgggcatgaaggtcctcgtcctcgacccccaaaccgttgggatggtgagcgtggtgtacagccagtcggatctgctgcggaaggaggtcttcctcgtcgagaccatggacaacgcctccagctccagggagtccatggcgcacctcaaggccgtctacttcctccgaccctccgctaacaacgtccagaagctccgcaggcacctcgccatgccgcgcttcgccgagtaccacctattcttctccagtatattgaaggtcccgcagattcaaatacttgctgactcggatgaacaggaggttgtgcagcaagttcaggagttctatgctgatttttgtgccattgacccataccatttcactctcaacatacaaaataaccacatgtatatgctcccaacagtggtcgaccctcctggtatgcaaggcttctgtgatcgagccgttgacggcattgcttctgtcttcttggctttgaagcgccgccctgttattagatatcagaggacatcagatgttgcaaaaaggattgcacaagaaactgcgagattgatgtatgagcaggaaagtggcctgtttgattttagacgaacaggaaaactcttctttgttgttggtgatcgacagaagggatgatcctgttacgcctttactatgggatttgctaatattcctaaagaccagcaggaggttggtctatcatcggttcaagacgatttttttagagctaacatgtttgagaactttggggaccttggtatgaacctcaaaagaatggtagatgattttcaacatctttccaagagcagccttaatctccagagcataggtgacatggcaaagtttgggagcaactatcctgaatatcgaaagacacatggaaatgtaacgaaacatgtaaatttggtgagctagcagagcagaattggggaggaaaggaaacttatgctagtttacgaaacatatcaagagcttgcatgtactagtggacaagcagcagcctttgaggctgtcacttccttgctaaacaatgaaagcgtatctgatattgaccgcttacgattagtaatgctctatgctttgcggtatgaaaaagagagtccagttcaattgatgcaacttttcaacaaattagcttctcattctgcgaaatacaaatcagggcgtcctgttcaattgatgcagctattcagcattgataagagaacaggcgacttgtatgggaacggtggttcaattcctccttaagcaagctggcattgataagagaacaggcgacttgtatgggaaccgtgatctgttaaatattgctcgcaatatggctcgtgggcttaagggagttgagaatgtctacacccaacaccagcctcttttgttccaaacgatggaaggaattgttaaagggagattgcgagatgctgactatccacttgttggcaatcatttccagcagggcaggcctcaagatgttgtcatattcattgttggagggacaacttacgaggaagcaaggtcggtagccctttataatgcggcaaatcctggagtccgttttttccttggaggttccgtggttctaagttcaaagagatttcttgaagatttgggagaggcacaaaggatatcaaaatcaagcactataatatgagctgaatggttttatctcccatttgaagagtatcatagtatgatttgacagtgttgactcaattttgcatagaataaaatttgtgataaatctgtaacatagttctaggtgcataggatcaaatttcttgaagatatgtagctgctccagcttctaacaccttctcttggtgtattgtctgcaaaagcaagagaatatcagtgtacaaattgattgttagcgcttgtgaagtcctgctagcgtcacagataaacaaatggcaagggcaggtgcactaaacaaaagtttcctcctaatctttctttttgttgattgttctaaactgcagagccacatcacttgatgcatactgtcagatagaatgaaatcagcgttctactagtgcttttgctctgttttcggggggggggcgacagcaacggaattcga

SEQ ID NO: 54191 - DNA, 114 bp, Zea mays
  Clone ID: MRT4577_149424C.1
gatatgaactcttaacaatacacacagtattatacattgggcttgacagggagttactacaaacaatgcacatgccgcattttattttgatcagcgtttttacaaggtctatgc

SEQ ID NO: 54192 - DNA, 541 bp, Zea mays
  unsure (1)..(541): unsure at all n locations
  Clone ID: MRT4577_149425C.1
ccccctttttgnccggccgggttatgctttgcggtatgaaaaagagatccagttcaattgatgcaacttttcaacaaattagcttctcattctgcgaaatacaagtcagggggagttgagaatgtctacacccaacaccagcctcttttgttccaaacgatgggggaattgttaaagggagattgcgagatgctgactatccacttgctggcaatcatttccagcagggcaggcctcaagatgttgtcatattcattgttggagggacaacttacgaggaagcaaggtcggtagccctttataatgcagcaaatcctggagtccgttttttccttggaggttccgtggttctaagttcaaagagatttcttgaagatttgggagaggcacaaaggatatcaaaatcaagcactataatatgagctgaatggttttatctcccatttgaagagtgtcatagtatgatttggcagtgttgactcaattttgcatataataaaatttgtgataaatctgtaaaaaaaaaaaaaaaaaagcggcc

SEQ ID NO: 54193 - DNA, 617 bp, Zea mays
  unsure (1)..(617): unsure at all n locations
  Clone ID: MRT4577_149426C.1
ctcgaggccggccgggatcaagtttcgantgtctgctagagagaaaagaaaagggcaccgagcaaccctggccagggaggaacggagagaggcgtcagctgaccgattccggcgaactcacaggcatatgcgaggcggcggattcccggaggacaagaacatgatgatgcatgagagcctcctgcaggcgacgcgaggcgacctcttcgagcacatcgacgagctcctcgacttccccaacgaggactgcgccgccgccgagcgcctcctggacgatccggcgcccgttagtgcgctgttggcacgcatgatccaactcctccgcgccggaaatgatctcgaccaggctgctggacgcgcgcagcacgacgcttccgctatcgacttcttctctgccgtggggaactatgaggtcgacaccaaggacgtcgtcggcgaacacatctgctcgtgcgacaacgttgacatggacatggcccacctggagtgcatgaacctgactcgtcgacgacgtctccatcccgcacgagatcgaggtcacgggcgccatcgtggaccgcgaggcgcccatcatgaacatctacgcgctggcgaacaaggtgctgatgccgccggac

SEQ ID NO: 54194 - DNA, 909 bp, Zea mays
  Clone ID: MRT4577_149427C.1
cacccattcttctacagttattgaaggtcccgcagttcaatactcgctgctctgatgaacagaggttgtgcagcaagttcagggttctatgctgatttttgagccattgacccataccatttcactctcaacatacaaaataaccacatgtatatgctcccaacagtggtcgaccctcctggtatgcaaggcttctgtgatcgagccgctgatggcattgcttctgtcttcttggctttgaagcgccgccctgttattagatatcagaggacatcagatgttgcaaaaaggattgcacaagaaactgcgagattgatgtatgagcaggaaagtggcctgtttgattttagacgaacagaaaactcttctttgttgttggtgatcgacagaagggatgatcctgttacgcctttacttaaccagtggacataccaggctatggttcatgagcttattggaatcgagaacaacaaggtggaccttatgggatttgctaatattcctaaagaccagcaggaggttgttctatcatcggttcaagacgatttttttagagctaacatgtttgagaactttggggaccttggtatgaacctcaaaagaatggtagatgattttcaacatctttccaagagcagccttaatctccagagcataggtgacatggcaaagtttgtgagcaactatcctgaatatcgaaagacacatggaaatgtaacgaaacatgtaaatttggtgagcgagcttagcaaaattgtggaggaaaggaaacttatgctagtttcacagacagaacaagagctagcatgtactagtggacaagcagcagcctttgaggctgtcacttccttgctaaacaatgaaagcgtatctgatattgaccgcttacgattagtaatgctctatgct

SEQ ID NO: 54195 - DNA, 1072 bp, Zea mays
  Clone ID: MRT4577_149428C.1
ttgggtacctcgaggccggccgggaatgaatcctatgtctggcatgctggacaggcgaggggttgcagcagaaggttggtggtggcatacttgaccaaataattcagagtgtccataacaaggatgaagagcatttatattatgtcttttcaaggaacactaattactactgttctcatttaattgactacctattggctttatattggagatgaaagatggggtgcattatttgttttgccagtccttacaagtccaatgagcattaatacttttttatgcagcttgttcaattcctccttaagcaagctggcattgataagagaacaggcgacttgtatgggaaccgtgatctgttaaatattgctcgcaatatggctcgtgggcttaaggtttgcatagaagttctacgaatggatgttacataaaattctgctgcttctgatgcacttattggttgcagggagttgagaatgtctacacccaacaccagcctcttttgttccaaacgatggaaggaattgttaaagggagattgcgagatgctgactatccacttgttggcaatcatttccagcagggcaggcctcaagatgttgtcatattcattgttggagggacaacttacgaggaagcaaggtcggtagccctttataatgcagcaaatcctggagtccgttttttccttggaggttccgtggttctaagttcaaagagatttcttgaagatttgggagaggcacaaaggatatcaaaatcaagcactataatatgagctgaatggttttatctcccatttgaagagtgtcatagtatgatttggcagtgttgactcaacttttgcatagaataaaatttgtgataaatctgtaacatagttctaggtgcctaggatcaaattttttgaaaatatgtagctgctccagcttttaaccccttctcttggtgtattgtctgcaaaagcaaaagaatatcagtatacaaattgattgttagcgctaaaaaaaaccaaaaaaaaaaaaaaaaaaaaaaaaaaaaaaacccccaaagaaaaaaaaaaaaaaaagcggcc

SEQ ID NO: 54196 - DNA, 228 bp, Zea mays
  Clone ID: MRT4577_149429C.1
ggggccaaaaaggggtataaaaaagggggggaagggacaaaaaaacggcttgattttacaaaaacggggctaccctgggattccgggcccaacccgggaatgcccccccggtccctgtagggggaccaattttaccttgggggggtcatgttaaaacctgggtcctctgtgggaatagtttccccctgggggaaaacgcaaaacgctcaccgttcccccaaaaagtaa

SEQ ID NO: 54197 - DNA, 663 bp, Zea mays
  Clone ID: MRT4577_14942C.1
agagttgtcacgggagactctagagcccaaggttttagactctttagaactaaaactgaatatatgagatatgaatttggcactactacacatgagcaagatgtttggaggccaagtagtgcccatgaaagatatctttaagtatttaggaccaatgctataaagcgacgtggatatcgattaagatgttagccatgaatcaaacctgtgtggatgaagtggcttcaagcatgtggtgttttaaatgacaagagggtaccacagaagctaaaaggcaaattttataggacgatgattatacctgctatgttgtatgatgcagaatgttggcctaaaaaaagacatgtttaatagacaagtgttgcggaaatgtgtgcgttgcgttgggtttgtggccgtataagaaagtaatgagtttggaacgatgatatatgtggtatggtaagggtagtgccaattgaagaaaagaggtcgagatggtttggatatatccaatgaagtcctctagaggcaccaatgcattttggattctaaggtgtgatagcaatgaaaagtgggacaggagaagactgaaattgatatgggacgatacaataaaaggagacttgaatggacagaatatagcacaaaaattagtttgaacaagagtgcatgtaaaacaaa

SEQ ID NO: 54198 - DNA, 267 bp, Zea mays
  Clone ID: MRT4577_149430C.1
atagaggtggtcatagctggttgcctactatgttaccaagactgaagtagcatcccgccatacagatcttctaaaaccccaaaaggctcgagtgaacatagtcttgcagaatgtgtaatcatggaacagttcggacctatgtgagtggatgtgatttttttacttgcgggagtcggtggcacttgccgaatgataccagtaaagagtgttcctcgttgtctagtgactcaatgaactgttttataaccgaaatcccctccaaaaact

SEQ ID NO: 54199 - DNA, 420 bp, Zea mays
  Clone ID: MRT4577_149431C.1
aagacaagcactcatcacataatatagattattgggatgccaagtaccaggctgagagaggctacattaatatgaacttacatcaacatatccaagaagcaaaggctgcaaaaacggtctagatgccaaggcaagaatgggggctgcgtccagaaagaaattgctaaagcgcacgaccacgccgagacatcatgagacggcgctgaaacatggaataaaaaggggccgggagcaacactactaggcatcatgattaatttcccgcttgaacagactcaccaattccctaccgggctaaccccaagctttatttatgtgagagggtccagatgtcagaggggagcagcttcttgatcggctaagcagggcgaaccccggcacctgaacattgacatctgctaggccgaacctcaagtgcgt

SEQ ID NO: 54200 - DNA, 349 bp, Zea mays
  Clone ID: MRT4577_149432C.1
gagctcacttgtcggcggccgccctttattatttttttttggtcagcggtcatgtctgtgcagtgccgagcaagctactccactgaatgcactcctacagaatgtccatctagatcatcaccgaaaacctcccctagctgcagcgtctaccaatctgttgcaggacgtcgcccgcggattgctaataaacggccaagactctactacggcggtcatgctcggcactgacgccgagccatcaacgccatgcgacaacgagcagttccggagacgcgcatgcggagaagtcagaatggcatagctcgacttgcaagctcaggaatgcgacctcttccatggcagatctctt

SEQ ID NO: 54201 - DNA, 343 bp, Zea mays
  Clone ID: MRT4577_149433C.1
ggctaagggccgaatcgcaccgtactgtacggagaagcttgtgcaaggttctggagcggtcgatggacgcagcgagcatccgtgggcttctctaccacgaggagcaagaagggaagctctgctccgtgcactgcgtcaacaccgccctgcaaggccccttattatccgagttcgacctggacgcgctcgccgtctacctggaccaacctgagctcctggtgatgctcaagggctacctaagctctggtgcgggctacgctgctgcaggggacttctttgtccagcgcgagggctctcacaacgtctcccttggccaagattacagcattccagttcagcacat

SEQ ID NO: 54202 - DNA, 380 bp, Zea mays
  Clone ID: MRT4577_149434C.1
gtcatctatctcgtttcaaatacatacatcctcgttttctccgtgccgcagcatctcagggcgggggccaatatcaagagcgggatctatgtgttcggcaggatctcaaggctggtggccacagtggccctgcagagtgactatgtctagctcttctccgtgaacgaccccttcatcagcaccgactacatgacctacatgttcaagtacgacactgtgcacggacagtggaagcaccatgaagtcaaggtgaaagactccacaacccttctctttgttgagaaagaggttgctgtgtttggctgtacgaaccctgtggagataccgtggggttcggttggtgctgaatatgtggttgagtctactggtgttttcactga

SEQ ID NO: 54203 - DNA, 102 bp, Zea mays
  Clone ID: MRT4577_149435C.1
tgagagaggcgatgaaggacggagagagcacggaggcttgatcgaagatggatgccggagcacaggtggtgaagaatgccgcggcgtagcgtcgctgcgggg

SEQ ID NO: 54204 - DNA, 1683 bp, Zea mays
  Clone ID: MRT4577_149436C.1
tgggtacactccgggcctgccgggagcaagttcccggcgccgctgctgatgaacaccgtgcacttcgcgctgcaggcggggctctccaagctcatcatctggttccagcccaaggggcccgaggccgccgtcgacatggggtggaaggactacttcatgagagtcgtgccaactgctctcgggacggccttggacataaacctgagcaacgcgtctctggtgttcatctcggtgacgtttgctactatgtgtaaatcagcctccccgatattcttgttgctctttgcttttgcatttaggttggagaatcctagcatcaagcttctaggaattatagttgttatttctactggagttctgttgacagtttccaaggagacggagtttgacttctggggcttcatttttgtgacgcttgctgctgttatgtcaggattccggtggtccatgactcagattctgttgcagaaagacaattacggcctgaagaatccgattaccttgatgagccatgttacaccagtgatggccatcgccactatgatactatctctattactggatccttggagtgaatttcaaaagaattcatattttgataacccttggcatgtcatgcgcagttgcttacttatgcttatcggaggatctttagcttttttcatggtgttaacagagtatatacttatttcagcaacaagtgccataaccgtcacgatagctggggtagtaaaagaagctgtaaccattttggttgcggtattttatttccatgatgaatttacttggttgaaagggtttggtcttttcaccattatggttggtgttagcttattcaattggtacaagtatgagaaattcaaaaggggtcatataaatgaggatgacgtcagctctccatttactggtgacgtcaagtacattattatagacgacttggaatatcagaatgaatttgaggaagatacataatgcttgtcttccgcggtttcctacttctgctggtttgagcatctctagctctttttcatggtgttaacagagtatatacttatttcagcaacaagtgccataaccgtcacaatagctggagtagtaaaagaatctgtaaccattttggttgcggtattttatttccatgatgaatttacttggttgaaaggggttggtcttttcaccattatggttggtgttagcttattcaattggtacaagtatgagaaattcaaaaggggtcatatagatgaggatgatgccaactctccatgtactggtgacgtcaagtacattattctagacgacttggagtatcaggatgaatttgaggaggaagatacataattttgtagtacagcgactttcaactgccacaggtaaagaaaagatgccccctaccaccaaaaaaatgtgtgaaagttcaaaaataacaattttaaaatatctgattatggctcccctagcgtttggtttcacagtgcttcaggtctgaacattttcacttcctaccctatctgtcgttatgatagagatgaaagttaaaaggtagaaaataaaatagacatgtatcatatatgatcaattttgaaataaaattgattcgtttttcctattgtattatactttctctgttctaaattataagattttaggtttctctaaaaacattttttaaaaaagggaaaa

SEQ ID NO: 54205 - DNA, 339 bp, Zea mays
  Clone ID: MRT4577_149437C.1
ggcaaaaattagaatttacaccatttacatttgacaaagatacatcaacgaacttttttcttcaaaacaatcactcttatattcttatgtttgagtatgcgcctttctagacaaaagtgtggacattgggaggaagaacaacttgtttttccaagatttcttgctggaaacaaactggtccatactaccatttgactggtccaacctctgatctggaggaagtacattttcttcccactaagaacccttatggtgaacaagcattctgcgcggatttattacaggactgactggatattaggtaccctcataggctttccgacgcttcacatgtgaagg

SEQ ID NO: 54206 - DNA, 331 bp, Zea mays
  unsure (1)..(331): unsure at all n locations
  Clone ID: MRT4577_149438C.1
aaaggaggaatccatcctcctctccggcggccgcgcgagagagagcgatctccggccacgagaggcgggcgggaccacgagagcctccgccgcccaccaaagccgcggagaaccgcaccggacgccttgtatctccgcccatcttctcaaaggtcttgaaacatggtggccatgtcaacgcttgccgctggatcgttgccgggaactgtggtccccaatggtcttctaacaaggaggtttcaaggctcnnacaatntntcagaacaactcaagttaaccgcatctcacttgagcgggaagtttctactaaagcaacactgaggagtgtaaa

SEQ ID NO: 54207 - DNA, 1344 bp, Zea mays
  unsure (1)..(1344): unsure at all n locations
  Clone ID: MRT4577_149439C.1
ccggccgggctgcctcaccctatataacaagacgctgctgggggacaagctcggcaagttcccggcgccgctgctgatgaacaccgtgcacttcgcgctgcaggcggggctctccaagctcataatcttcttacagtccaggggcccgaggccgccgtcgagatggggtggaaagactacttcatcagagtcgtgccaactgctcttgggacggccttggacataaacctgagcaacgcatctcttgtgttcatctcggggacgtttgctactatgtgtaaatcagcctccccgatattcctgttgctttttgcgtttgcatttagggtggagaatgctagcatcaagcttctaggaattataggtgttatttctactggagttctgttgacagtttccaaggagacggagtttgacttcttgggcttcatttttgtgacgcttgctgctgttatgtcgggattccgttggtccatgactcagattctactgcagaaagacacttacggcctgaagaatccaattaccttgatgagccatgttacgccagcgatggccatagccactatgatactatctctattactggacccttggagtgaatttcaaaaaanttcatatttcgataaccgggctgatgtcatgggcagctgcctacttatgcttataggaggaactttagcttttttcatggtgttaacagagtatatacttatttcagcaacaagtgccataaccgtcacaatagctggagtagtaaaagaatctgtaaccattttggttgcggtattttatttccatgatgaatttacttggttgaaaggggttggtcttttcaccattatggttggtgttagcttattcaattggtacaagtatgagaaattcaaaaggggtcatatagatgaggatgatgccaactctccatgtactggtgacgtcaagtacattattctagacgacttggagtatcaggatgaatttgaggaggaagatacataattttgtagtacagcgactttcaactgccacaggtaaagaaaagatgnnnnntaccaccnnnnnnntgtgtgaaannnnnnnnnnnncaattttaaaatatctgattatggctcccctagcgtttggtttcacagtgcttcaggtctgaacattttcacttcctaccctatctgtcgttatgatagagatgaaagttaaaaggtagaaaataaaatagacatgtatcatatatgatcaattttnnnnnnnnnnnnnnnngatattcctattgtattatactttctctgttctaaattataagattttaggtttnnnnnnnnnnnnnnnnnnnnnnnnnnaaaa

SEQ ID NO: 54208 - DNA, 216 bp, Zea mays
  Clone ID: MRT4577_14943C.1
acccacgcctacgcttccattctgatcctgttacaatactgcacgttacaacgctatgaagctttctatcttttttagtgttttttaattccatctccctcctcctcctaagtctccaactacgcttacctacccaccatttctctaaaaaacgtattctactatccactaatgacaacctcgaagaaaagattaaagaactaaacgccaacaatg

SEQ ID NO: 54209 - DNA, 286 bp, Zea mays
  Clone ID: MRT4577_149440C.1
ggacacttgttagcctatatacaaagccccctggggggttttgtgtgtaaaaccgtggaaacgttacttcgcgcattgtccgccgccaccagcgtttccttggcggtcgccaacgcggtttggccggaataaatatccgttggccggccttccaacaagcacttatccatcttcgagacgctgttcggaaggaacatgctgcgggcttgcaaaatcgtcaacaagcgcggcttcaggcgcgtcaccggcccgcccagtggccgttcggtctttctggtgctggggg

SEQ ID NO: 54210 - DNA, 266 bp, Zea mays
  Clone ID: MRT4577_149441C.1
ttttggggtaactttaacagatatgtgctttcattcgctgttacagaagaatagctacagttggccgcttttgacaaacttcttacgatgatttttttccattgagtcccataaagcaaggaacgcacattacacgagctacattggtagcaaacattaggatccttgccagagactgaacagccttgatactgcatcacctgacgaaaagcaagttatcgatacaaggcgacgttttaactttaacaactgacattttccggatg

SEQ ID NO: 54211 - DNA, 364 bp, Zea mays
  Clone ID: MRT4577_149442C.1
ggggcccaattccaatgggggggggcaaaatttttttttccaaaatttaaagcaaatagtttgggggaggggacattcccccacccctccccccttataaaacagaggggccccattatagccaacatttttcgttgaaaacaagggggggcaaaaaaatccttgttttccgttcaccccatgctttttttaaaaaaaaactttttttttttttccaaaaaattagctcccataaaaaacaaaatctagctaaccccttcaatttatacaaaaaataccagttttaagttaaagctttcccctaaaaattgatttgccaaaggggagtaacaaaaggggggggatttacccccccagtttggga

SEQ ID NO: 54212 - DNA, 469 bp, Zea mays
  Clone ID: MRT4577_149443C.1
ttttgggttttttttttatttatttttttttttgtttattttttacatagtcttgtttttgttacagcgaacgcaaagcccgtgtataaacaaaataaggacaggcctaggtccagcgaaactatatcgagactcttgtttacccggggggggggggtttcgcatatgaagttgatggatgggacctgcaactcacttgccactatgctgcgcctaggagtgagcctgaagtgccggataactgatgaatgacttgttgaacgattggcaagggacaccagatggtggcccaaatttgggagacttgaccgattggtcattgtttacaaaggtcttgcactttgctgggcgtggagttggcacatggacggcagaagcgcttcttgccacctgtgtgcggagaggacggtgagacaaccgggggtctcttattagatagaggagttttgaggacggaactttcaacaaa

SEQ ID NO: 54213 - DNA, 412 bp, Zea mays
  Clone ID: MRT4577_149444C.1
cccacgcgtgcgcctcactcgctgcgcggtcgcggtagggaactccacaccttgccttgtgctctgactgtgtgtttccaaagcaaacaaaagatgatcaggatgtcttgcagctgcctatcaagctgcaacttcgtatcaagctgctgctgccgcatgatgctctctaacctgtaggagaacagcggcgggggcactgacgccagcgccgccgccatagggctctgagtagcctctgatacgaacaaagcggcgcacttcaaggcagggtgcaagacttgcgaggccggccaccgctgcagctgatgggacaggtggaatagtagacgctggaactgctgatcctgctgcattgttacgattgcggcatgcatagatgtaacccttttttcattgtctgctttgcgcttgt

SEQ ID NO: 54214 - DNA, 308 bp, Zea mays
  Clone ID: MRT4577_149445C.1
ctcgtaaccgtagaagcaatatcttatgatctaatccagaacaaagcaaagggaaggtgtggagctatggcgcgaggcaatggtgtccgcgaaggacggcgattgtcgctgcaacaagaaagaatgcgatttcttggagatccactgctccaatgcagtgtaggacaagatgaatcagttggtttctcatgggaagttagtacaccaacccattaaggtcccccgccgctgtgttcctaacctctgtgattgcgtacctatctgttgagagaagaccactggcaccgaaccctgtgacggatcataat

SEQ ID NO: 54215 - DNA, 570 bp, Zea mays
  unsure (1)..(570): unsure at all n locations
  Clone ID: MRT4577_149446C.1
acntttctcccccctctcagcacttcagcagcttctcctcctgcttctatatcctccctcgccccgccattcgctctcctcgtctcgccccacccccgtcctcttcccccgacgccccagacgccagcctccgcccgaggagcgggccagtctcctcccatttcgcacgcgccggagcggcttccacaggagcttttcgtcggtgtgcatatgatgggctgcttcactggcctgaggtccaagaagaagaagagccctcttgtcgcaagcaagaagcatggcgatgcaagggacacatccctgaggctcccggagccggaagctcatgtgccatctctgcagtcggcgcctcctagtttcaggaacagggcaaagatctgccaatcggccaataaagtctcttacagcagggcacgtgtgctgtctgctccctccagcctgatcctggctgatcaggatggccttccgtatgccgaattcgatgatcaggatgaccctaggggcaaggcaggacctattaaggcgcatccggactaccactccgatgccccttcctcttcccccaccaaa

SEQ ID NO: 54216 - DNA, 834 bp, Zea mays
  unsure (1)..(834): unsure at all n locations
  Clone ID: MRT4577_149447C.1
ggggtacacctcgaggcttgnccgggtgaaaatccactgagacgaatgttctgtgtagtgactggaatagctggaaggattcaattatctggtttgatggcgcaacagatgcagtggggattcagttctttctgaagaatgttcatcctagaatgaaggctgccgcgtcggctctttttggattgccaaactcattgtatgccaggcctaatacatttggtgaacttatgcgagctattatatctccatccagcaaagtccaagaagcagttgactgggctttgaagggtgtgaatccagatattgttttgcacatgcgcatgatggcgaataggccagtccgagcaagaaaagctgcagttctttgtatcaagaaagccctacagattagccatattaagggtacagctctggtggccttggtctcagacacaccagcatttgtgaaggagataaagtcagacatcagtgagtttgcagaggtacttaattttgattacaagttgttttgccaagacttctagtctggagatagttggaaatgataagcctttggattttcgatcaagagactggggatcagctccaaggtgggtggcgtttgttgatttctttatagctgcacaggccaggtacgcagtcgtcactggagcacatcgtcgtgtggggaccacctacgcacaactcattacagcattggctgcggcaaacaggcatggtcgagagccttcaggcgccaacttcacgttcctaagtagtgtccacagcaacttgctggtggaggggctgtcgacgcaggttggctggggccatatctggaacagatatgctggt

SEQ ID NO: 54217 - DNA, 261 bp, Zea mays
  Clone ID: MRT4577_149448C.1
tctgtacccactcatcctttccctatttacaaaactctgtactctattattcacaattcactttttcccagaccggttctcttattcacacaggtggctcattcaccaaccattaacaaacatcattcagtgatcctctccttcttattctaacttaccctatcactaatcatcataccattaaatattctaaacttacaaacattcccaccatcgccttcttagatactcactactctattccctatgcatacatcgtca

SEQ ID NO: 54218 - DNA, 235 bp, Zea mays
  unsure (1)..(235): unsure at all n locations
  Clone ID: MRT4577_149449C.1
ccaaataaaancactanccctanccctaacctaacagcgcacccatgacctcccacttcatgtgctcaagaaccgctattttttgcatggggtgaggaaacaaccaccccatcctctataattcaccctagcctcaaagatgatgtcatgaacgcattgaatgagtccatgtccacttcaatcccacaataccttattatgcccatcatctaccactacaattactccacctact

SEQ ID NO: 54219 - DNA, 534 bp, Zea mays
  Clone ID: MRT4577_14944C.1
atgccgccgaagaagacaacagcgccaggggctgcactgcagccactggacacaaaccaggatactctctctctccgagaagccagaagccaaaagagaaaagccaccagtccaacacttcaggaggaggagttggaccagcagatcagggacctcgaaatcattaaccagcaggtgcaaaggaaaaacgagaagatggcacggctggccgaccttcagaaaaagatcgacgaagctactgaggaacagaattgcaagctatcccatggccacaatcttacaaagccacctcagctacccatgtatgatgggcactcgaacccaaagcaattcttgatgagctatgaggcaacaatatcctcatatggaggcaatgcagctgtcatggcaaagtccttcgtcatggcagtcagaaacgtggcccagacatggtactcttctcttcggccagggacaatcacgtcatggaaaaagctcaaggacatgctggttaccagttttcagggctttcagacaaagccagtcatagcttag

SEQ ID NO: 54220 - DNA, 270 bp, Zea mays
  unsure (1)..(270): unsure at all n locations
  Clone ID: MRT4577_149450C.1
actctgctaatatctctgtagctgctggagacctgacaagcgcgtctaacctgagactgcgtgtatgcctgctttgtgtccagagatgcgtgcggcctccattagcctacctgggggttcttcgtagttggctgcgctctgcntcagctgggggggggtggcgcgattcttctgctntgactgatgatgttgcctcatgtgctggtcgctactgagttgtcctcctccctctggctttgcggcctcngntgtccgggctgtccctgcccg

SEQ ID NO: 54221 - DNA, 184 bp, Zea mays
  Clone ID: MRT4577_149451C.1
tgaccgcactcgtgctgtcgatctacaccatgagggtggcgctcgtaaccctcgctctgctggatctcgctgcgagcgccaccttcacgcatacaagcggtggctgccggtgccagccaccgccggcggttcatctaccgccaaccgtgccttttccaccttccgttaacctgccaacctcggt

SEQ ID NO: 54222 - DNA, 430 bp, Zea mays
  Clone ID: MRT4577_149452C.1
ccacgcgtccgcgagcttatgtttttgcttatgaaccgcattcggtgctgcctattggcgtttgtgcgcttgcggatcatacaggttttttgcccctgccgaagattaaggctcttgcgagtaccgcggttttctatgtgccgtttgtgaggcagatatggacatggttggggcttgtccctgcgtcgagaaggaatttttacgagtacttggcggctgggtatagttgcatcatagtgccgggtggtgtgcaggagttgttgtatatggaatgtgattcggaggttgcttttcttaaatcaaggaaaggatttgtaaagatagccatggagatgggtcaacctcttgtacctgtattctgctttggtcagagttaagcgtacaagtggtggaagccaagtgggaaattatatttacgtatttccagagc

SEQ ID NO: 54223 - DNA, 238 bp, Zea mays
  unsure (1)..(238): unsure at all n locations
  Clone ID: MRT4577_149453C.1
gaggaaaacagccgtttttcccccnggggggaaaattcatgggtgcccccgggcagaacaaacggaaagtaggtaaaaaaagcatttcaccacacaaacatacaacagggtttaaggtgcccccatcactttggtaaggtcaccaggcgcatttggcacaaaggccgttacttcttcccgttttttactgaccgcccgggaaaatggacccaaggcactgggtgcttccctttaagat

SEQ ID NO: 54224 - DNA, 196 bp, Zea mays
  Clone ID: MRT4577_149454C.1
atgccatcggacgtcccaaaccgggttttttaagaagctgcgacttttgggagtgaaaaaaatcacagcacgcacacgacattgtaatccctgcggattccgtttctcctcgtgattccgaggcccagcccaagatgtcggcccgcagcgctctactcatgtggcacgcgcggcgctgtgggcgaggaggacgctg

SEQ ID NO: 54225 - DNA, 457 bp, Zea mays
  Clone ID: MRT4577_149455C.1
cggggcatattatctgtttcactcagcttcaatcagcagtccttgattcatttggaatcgtgtggagagaggggagaaagaccacgctaactactccggaataccggaacgcaccgtgggccgcgtgaatcatggttgagcctgcagccaatggcgaccggactggtggttggagacaacatacactgcatcaccaaggaagctattcggtggctaggatcggagggggggagagaaacgcatatgggtgatcatttaccaagagacacggggattgctcaacaacttactagagaacatggtccaaaactaacataactacagcaatgacacgcgcataaagatcgtctccggcatggacgtcaagtacaacctcaaaatgcatggccaaaccctctacggagttggatgctaggcgcctattgatagctggggaatgcttagggggatacacgtc

SEQ ID NO: 54226 - DNA, 190 bp, Zea mays
  Clone ID: MRT4577_149456C.1
gccctgtatttcatagcaacggtcgaaaaggacgagttcagtgggcatctctaaaccgagaaggcccgggaggacgagatagtcactgacgaccacggcatcgccttacggtgcgttttatgtgctccgttacgaccgtacgtgaagcgcttcacccacaatctgatggcctgtaacaagagccagcctt

SEQ ID NO: 54227 - DNA, 121 bp, Zea mays
  Clone ID: MRT4577_149457C.1
acaccttccagcagatgtggatcaccaagcaggagtacgacgaggccggcccctccattgtgcaccgcaaatgcttctaggcgcacccgcgtctgtgtacgcgctgtctctcctcatgacg

SEQ ID NO: 54228 - DNA, 1548 bp, Zea mays
  Clone ID: MRT4577_149458C.1
cctcgaggccggccgggatataccatactaaaaagagctgagagattcataattcacgcagtgatcatcacctagttttgccatactcttgaggcgtccatataaaacaagtgcaggacccaaacagttgagttcagcagcggcgtgttaacttatccactccctcggcactgcagctcagtgcccttcccagcctctcgctctcccgccgacgcgcacgtcctccgcgccgagcccagaggcagacagaggacgcggccatggcgtccatcccgtgcaccttccagctgagcacggcggcgtcgaggagggtgtcgccgcgggtggcggcgcaggggagaggccaaggaggagggggagcggtgctgaggacgccgctgctgggcgcggggaggcggggcctggggtggctgcggccgtcgcggttgagccgcgtggtgccggcgagcgagagcgggcgggcgggtcccacctgctggttcaagttcggcaacaaggacgccgagggtgccggcatctacggcagccaggccagggacgacttcgaccgcgacgacgtcgagcagtacttcacacgggagtggccgcggctgccgtgctccgcttctgggaagagatcgccaaccgcgccctgctggacccgaaactctgcaggaaactggtgcacataactgtaggattagtgtttttccttatgtggcctttgttcagctcagatgatgtgtttgctccatctctcgctccgcttatcatcatcatcaacatcatgaaagtgacagtgattggacttggtttcgtgaaagctgaaggtgtggttaactccatgactaggcatggagaccgcagagaacttctcaagggcccgctgtattatgcctgtgctataactctgacaacaatagttttctggaggacatctcccatctcaatcgcggtgatctgcaatttgtgtgccggagacggtgttgctgacatagctgggagacgattcgggcatgttaagctccctcacaaccctgaaaaatcatatgccgggagcatcgcaatgttcttggcaggtttcatcgcatcagtactgttcatgtgctacttcaacattttcgggtttgttgagaagagctggagcatggttgctgcctttggtgtgatatccctggctgcagcagttgtggagtcactcccgatcagcacacgccttgacgacaatctgacggtttctgtcgcatcagtgctagttggcgcccttgttttctattccattggagccagaaacctgtgctgcatgagcagcgaagtcaggagaagtatcccagcaaccgttggaatggtgtttgcaggcagcagctgaaacatgtagccacagtccaggagcagagttgagcagaaagtgcagagaaaggagttctcttcaatcctgatgtgtgtgtatcttgtactgtaaccattttcctgtctaagcagacattcttgtaactttattaagaaagaggtaaagcgagaataagttcattacggaaaacaaaaaaaaaaatctcataagcaaatgca

SEQ ID NO: 54229 - DNA, 851 bp, Zea mays
  Clone ID: MRT4577_149459C.1
ccggccggggaactagtcctcaatatctctcaggtgctcgccacgaacaaacgtgacgcatctcgagctccgagcctccgatggactcttcctctccatccccatcgtcagcgcccagtggatcccgtgccgcctccaatgccacccagcggtggagcatccttcgccgcgcgctgcttgctcgttcctcctccgcgcgcgccctagggggaatttctagtgaccaccagattaaagatggtaccaataacatttcaagaaaggcttcacgtggttttaacctgatcgaatgccactccttgccaatttcacagctactgaaatcacttgggaattcattaaacgaaaatgattttgaatgccagaaggatgtttatgtatgttataagctgccttgtagaggttcctctaaacttgatctggtttattgttttagttcatgattccagatgtagaaaagaggattcccttgaactaaatgacattgaggcttcgaacaaatacaatatcgacactactggactagtatgttgttggccatcggaagaggttcttgcctactactgtattaaccactcggatgtgttcaggtccaagaaagtgcttgaacttggatctggttatggattggctggacttgttattgcagccagtacaaatgctgacgaggttgttatttctgatggcaacccacaagtagctgagtgtatccttcttaatataatagacttttggtgagaccaaggttaaatctttgatactgcattgggacaaagagcaagcttcagaaatgttgaatacttttgacatcattgttgcaagtgactgcacatttttcaagcaatttcata

SEQ ID NO: 54230 - DNA, 632 bp, Zea mays
  unsure (1)..(632): unsure at all n locations
  Clone ID: MRT4577_14945C.1
ccggccggggatctattgtagtagcagagtcctacaagatcaacgacaggggggacggttagatgtgccttcttttctccccgcggtgaccacactaccctgaaacacgcccctgagcagactatcgaggtgaccgcttccttccttccttctttgctcgctactccggacataccaaggatgtgtgaaaacaagtgatgagtcccacggcacgaccgacgggatgacgaccgcgaggaacgtcatggccaccatggcgtcgaacgcttcgcttcagggcattcagcatctgtacatgggaccgaccattcccatatcgactaataatacgtgatactataccagaagacatgcccacacaaactaatcaagtcccaagctatatactccaattgagctgacatggactcgttgtagctgaacatgcaatttgaataacgcacgatcgaagtcatagcaaacggatgagacagcgacctgacaagatggaagatcgcatccaaggagggcaatgctctgacagaggngatgggtcgacattgtcaacaactcaagatcaatggctaccggcaccaacatgtgtttggtatataaggtcaaactaatatgaactgatggagacaccggtctct

SEQ ID NO: 54231 - DNA, 2308 bp, Zea mays
  unsure (1)..(2308): unsure at all n locations
  Clone ID: MRT4577_149460C.1
cctcgaggccggccgggccgccaatgaaggcggcgtgatcgatccctcaacatctctcaggtgctcgccacgaacaaacgtgacgcatctcgagctccgagcctccgatggactcttcctctccatccccatcgccagcgcccagtggatcccgtgccgcctccaatgccacccagcggtggagcatccttcgccgcgcgctgcttgctcgttcctcctccgcgcgcgccctagggggaatttctagtgaccaccagattaaagatggtaccaataacatttcaagaaaggcttcacgtggttttaacctgatcgaatgccactccttgccaatttcacagctactgaaatcacttgggaattcattaaacgaaaatgattttgaatgccagaaggatgtttatgtatgttataagctgccttgtagaggttcctctaaacttgatctggtgtaagtagtctattatttgcccctagttcgctggcacactgaatgtagttatccctacctgtacccccccctcctccgggtataactgggaatcatattgttttataatctctgttgtgacaacaaattaagccatcatgaattgtttaaccaacaactcaacaagaaaggttgacatgctattttcagttgcttattgttttagttcatgattccagatgtagaaaagaggattcccttgaactaaatgacattgaggcttcgaacaaatacaatatcgacactactggactagtatgttgttggccatcggaagaggttcttgcctactactgtattacccacgcgtccggacaggatcatagggtgcgttattgtctcacactcatagcatactgtggtagtgtgtccttctaggataacctgtaagacaaatataatataatgatatataggtccttgttcctgtcaatatttttaaaagttgtttactgtggtatgaaataaatccatgagaggtttgagctgtgtatgttgtctgggttttatagttactcttgcactagttttctgtccatgatatttttcatcatattttctcgatgagatcaatcaagagcagaaaaatgaacagatatctgagtgctacattagttcatggtctttttcagttgtgtcagttgttttatgttggaaaactgactcctatttagaattctatattagtatgtaccttttgttatgccacatgaacctatggcaacagcctaattccatagcccacattaccttcaaggcaaaacctttccacaataatagtcccttgaaaacttttgccacgacaatacttcactgctacttggcccccctttggaatgcaggaattgtataggattcagttgtcacatgaaaaacataggaaagaggaagacatctcgcatttcaatggggggctataagttcaatttttattatatatatccgattaattgaatatttagttcattacaggtccaagaaagtgcttgaacttggatctggttatggattggctggacttgttattgcagccagtacaaatgctgacgaggttgttatttctgatggcaacccacaagtagctgagtgtatccttcttaatataatgtatgcacaatggagaatggagtttttgccaatattgtgaacagatcaatcattccaaaacttagcccgttttgttttgttttgtacttttcttatttcaaaaaaacatttgttggcctttgtaaaccattaacccgcagacattcagaagaacatatccatcaatgcagagacttttggtgagaccaaggttaaatctttgatactgcattgggacaaagagcaagcttcagaaatgttgaatacttttgacatcattgttgcaagtgactgcacatttttcaagcaattccataagggccttgcccgaacagtcaaatccttgctgaagcattcggcaacctcacaggccatcttcctgagccccaaaagaggtgattctctagacaaattcctgggaattattaaagagaatggtctcagttgtgagttgatagagaattatgatcctactgtctggaatctgcacaaaaaattggtggctggtgaggatagaacctggcctaattatgacaaggagcattgctaccctcttctggttagaattggctattttagtgagttctaattttcttacatttttttatcttggatgatctattttgacatgaaggaggcagcaaaatgagatttagaagtatggaatctacttaattgtctagacctgaatatatgagtgaatggaaaacagttattcatgaanaaaagggg

SEQ ID NO: 54232 - DNA, 615 bp, Zea mays
  Clone ID: MRT4577_149461C.1
ggtttgtgtttttttttttttttttttttttttttttttttttttttttttttttggttttttttccttgggcaaaacagtttccgggctcaaaaaaaacaaaactagtttgttgttacaggggggaggctggccatgcctgaatcatgaccggtgcaaccctttaggttcctttacaacacccatgcctttagctttccacaaaaaaaaactgggggggggggggagcaggtatgctgatgccccaacgttttaggggaacttgggggtggggagcacctttttgttgacggggtccgcgagggggtccaacaggttttggaacgggccaaccccggggacaagcccctggatgaaataacccaggatggggagcatggggagcctgccgttcttgatctccttgagcttgagctcattcatttccttttcgggcttgcccaaacccaacgggttgaaaaggggccccccggggtaggacgggtcccccgaccccccaaaaaacttttcgaggcccaagaaatactggttgcccatggagcccgggttgtaccaatcctggaggcgggggggctcgggaaaacccatgaacgccatgttaaaaacaaaaagcgg

SEQ ID NO: 54233 - DNA, 161 bp, Zea mays
  Clone ID: MRT4577_149462C.1
ggttgaaaccgaaaggaaaatagaaggcatttaaagttccaatttatccatttataaaaacggaaaacaacggtactgagcctctccgatcgtgtttacaaggaatgggcattcaacacaaacttaacaatttgcaagctttagaaaggaaaaatcctttt

SEQ ID NO: 54234 - DNA, 441 bp, Zea mays
  Clone ID: MRT4577_149463C.1
ggcggacgggcacaagcttttttttttttttttttttttatttttttctttactatttttttggtgatttttattatatactgtcggtcgttcataatggaggaaaactagctcacaaccaagggggaagcaagggcatagacaaaggcggagggagggggggggggggccacaaacacacacaaaaaacagagaaggaagaacaaagagaaaaaactgacggggcgaacgagggaggaaaataacaaaaattgaagggcgcccacagactgaccgccagaaaggaaaaaaaccaagccagccagaccaaaaaaagaaccgaccaaccccaagagagaggtggcgaaaagaaagcacgcccggccgcaaacacactgactaactgagcgcagaggaccgagcggcggaggcgagaagaaccaacatcacagaaggggagaa

SEQ ID NO: 54235 - DNA, 535 bp, Zea mays
  Clone ID: MRT4577_149464C.1
ccctttcgagcggccgcccgggcaggtgtacaagctttttttttttttttttttttttttttttttgtttttttttttttttttttttttttttttttttttttttttttttttttttttcttctggtttttttccttgggcttttttttttccctgcttggttttttggggggggagggtttccgggctttcggcttggggggcttttcgggtgcccttggcccgtcttttaattggggcccggttctttggtttttttttggtccctgggccgggcccccgcttggggcgttttccggcccactggcggccttttcttggggttccgggctcggtccctggttgggggttttcatggccataggtgttccctgtgggaatttgttttccggtcccatttccccagcccttgccgggcgcggggctttgttggtttagcttggggtgcctggtgggggtgctcacttcctttttttgggttgggctccctgcccgctttcccgggggggaaaccttggcggccgcctgtttttt

SEQ ID NO: 54236 - DNA, 714 bp, Zea mays
  unsure (1)..(714): unsure at all n locations
  Clone ID: MRT4577_149465C.1
ggccgcttttttttttttttttttctttnttttttttttttttaccctaaatttgagatgctcttctataaaaataaaacgccagatatcagcacataaagacaatgctcaataggcaaaacctccaacagatcaggttcaaaatgtaaaatgccattacaaaaacaaggtggctcatttgttatgcagactgcagatttagcagagaactgtatgtaattaatggcttctttcaattctttttcataaccagaacatatgtaatctgtacaagtccactctaatgtgcatgctgctaaggacaactaaaaattcagtcttagtattacctacctatcatgctcacaaaaagggtttggttcttataatatcaaccatcttacgaagtgtgtttcgccagcagttccgacagtcgttgtttttcttgtttcgatattccaggataaatcttaggaaggttgctaaggaatgatttcgcctctaccatccttccatgtctagagtagccctgcagtattgaattgaaagttctctcatttggcctgcaaccttgtgtaaccaaatagcgtattaaatcaatagcttcttcaaacattatgctgggcaacatagctcttgatgaaaatatggtatgttacaatatctggtttcacgcctgaaccttttattttagagaacaacccttgggcttctttcatctggcctttttttcca

SEQ ID NO: 54237 - DNA, 461 bp, Zea mays
  Clone ID: MRT4577_149466C.1
ttgggaagtgcttagttgtattgcataggagatggggtacatatatatagactcataaccctaaccataatgggaccggcagcccaacagtggtgtcggcctacacacatagagaacacacattgtctaacattgagccctctagaacataaagaattggattggctggtatgcatccagaacactggcaagcggcctatcaaggatcacctcctgccaacaccaactgacacttgtgccctcatgcacaagcgtccacatcgatatcacaagtgcctccacaacaactaagcttagccacctttcgtcttgtgttgtgtcagcaatggtaaccaggttgaggctctctacagggttcgacccgagtctagggctccgggctccctcacaactcttgcggtctttccgtcttgccacagttctatgacagtggcatgtgctgattcagtgtctagggcaag

SEQ ID NO: 54238 - DNA, 338 bp, Zea mays
  unsure (1)..(338): unsure at all n locations
  Clone ID: MRT4577_149467C.1
ttgacatggtaatctttcatgccacatggttgttttntttttctttaatatctgcattnatcctncttttgcaaccaaataactgcagcacatgatgcattgcatttaagagaggactgacaactggccaacgcacatactgcccaagtgcccagctttgttgcttgcttgaattaaaatacccacccatctactccatgtccttaagaggcaaggcaagcttaaaaaaaacaaaaattgcaatgccaatacatgttccttccttttacaaaaaaatataaatatggtatccctgttaatctaaaaaaaaaaaaataataataaatttttttttattt

SEQ ID NO: 54239 - DNA, 560 bp, Zea mays
  Clone ID: MRT4577_149468C.1
atctctttgctgatgccggtcggcatcgcgatggcgctcgtgggggccggattgagcacctccggcggtactctgtatacctgtactggcagtgtgctcctggatgtacaagtacctgacgggtaagacccgtcggtggacaaccagctggtgcactcctatgtaatgctggcatccaaaggccgacatacatccaggatgcatcacacaaccgcatgggccaggcgcaggggtcttgagaaaagaaccacactcgagaggaccgcgtgcgcatcctcattgaaccactgacgtggccgaggcatatggtccttaaatgaggtgggtgctgctacgtatcctgcctgagagtctcggtggccgcaataagtctagctagctacttatgaggtgtgctttgtgtgagcgtggatcatactggcggcatgcattgcaccgctgtactatatggtgtatgcacttgtcttagatacaacaggcggaggtacaacatgctcgataggcctagtatggatggcatgcttatgatgaggaataaaatgcagtgctccctcgagctc

SEQ ID NO: 54240 - DNA, 815 bp, Zea mays
  unsure (1)..(815): unsure at all n locations
  Clone ID: MRT4577_149469C.1
ctcgagccggcgggcgggtttctttacccaccaccttcctctcctcgctctccctattctggacggccgactcgcttctgtgaggtaaaaatgcggcgtggaatccttgttgcttgcgtctgattcggattatgtttagtgtccgcgtgggggatttatgtctggtggtagctgatttcgttttttaggttccgttttgttaggtttgaattttggggctaggtttgcgttgatgtattcgccggtggtgttaggttttgttgggtgttgcggtttgcttagatctgcaccactccaaatttaggttcggcgtttgattgtcaaatcatgaatcctgttgccatttcgggatcctagaagttctcggttcctatttcgggatttgggtgttttggttttgttcgtagaatttcaggtagatctcaagctgttcctcatttccctgtttttcccggatttgattggtttctgtgctggtgcttgttattcctccatggatctggttctccactcctgtttgggagcaatgtccccatcattttctcgcttctaaccacccttcagctcccctcccacctgcagctaccggccttagatccagcccatgagggagattctccacatccagggcggccagtgcggtaaccagatcggttcaaatttctgggaggtcgtctgcgacgagcatggtatcgatcccaccggacgctatgtcggcacctccgacctccagctcgagcgcgtcaatgtctactacaacgaggcctcatgcggncgcttcgtgccgcgcgctgtgctcatggacctcgagcctg

SEQ ID NO: 54241 - DNA, 210 bp, Zea mays
  Clone ID: MRT4577_14946C.1
cagataacactttctatatttccattggcagccagtttcatcacgcaggtatattcgatgatcagtctaattagagccggaatctgctagggatacaactaactccatgaatatctttagtcaattttgacgattctacttacatccttaaaactagttgtaaactaactatcatgtttcataggaaaataatgactatccttttttaaa

SEQ ID NO: 54242 - DNA, 649 bp, Zea mays
  Clone ID: MRT4577_149470C.1
agaggccagaggcccaaccctatatcctgtgtctcgtgtgtttcctctgtcgtgcttaagggaagggagacgggttctctacatcttcttgcgcctctactgctgacgggagggaagggagcggatctggtgatccgcggtaacgtagttctcaacaccgacgtccttgaccctgctctgatgcgatcaggacggctggaccgcaagattgagttccctcacccatctgaagaagcaagagctagaatcttgcaaatccattcaagaaaaatgaacgtaaatccggatgtcaacttctaagaattggctcgctcaacagatgacttcaacggagcacagctgaaggcagtctgtgtagaagctggcatgctcgctctacggcgggatgctacagaggtaactcacgaggacttcaatgaaggaatcgcgcatgttcaggcaaagaaaaagtcaagcttgaactactatgcttaagctatatgcaaaaatgtcagaaccacaagttagtttgtaacactacctgtgtggatgatcgaagctacgtttttacgtttgcgttgagatgcgagtttttaacattgcctcagatttttcttcagcctcaggctccccagaaaactgtttgcttaccaaaaaaaaaaaaaaaaaa

SEQ ID NO: 54243 - DNA, 679 bp, Zea mays
  Clone ID: MRT4577_149471C.1
gccggccgggctcggataattccattcggatttaccttgcgtgtgagatacctacacacgaatgaccacacaatcgtgcttcaccttgctaccccatcacaaaagcagcacgccacccttctggtccttttaatttatcatgcttatctacaactcgtccactcgcgcttgttcctcctcttgcatagacgactgcgacggagaggatatccatgacggagtagcgcaactccttcgatcgctgcctatcatagatgggctcaccttaacgaaccaaatagttcagcagagaaaagaaagtctcccagtgctatcgatctccgatctaccgaaacccgctcacctgcatgcacttcaccggagaaggtgtacgacaacggccatctccagggaatagagcagataggcgcgcgataccttgtacaattccacatcgaaattaattgccattgcaaagctgtctactgatgccacaactgctacaagtcctaccaagcatggccgtggactacccctgcggtgattcacggatcgatgttgggatcctgtacactgaagcttcgcgatactctgaactggacatttggactaccatgctgtactatgtgcgtcatattgcgttatgttattagtggacaatactctttgatattccatattcaggggaacgggtggccct

SEQ ID NO: 54244 - DNA, 234 bp, Zea mays
  Clone ID: MRT4577_149472C.1
ataaatccttgcatgtatagttcatatgctcagagaagcaaaagaatggcgtgccactgcaaacaggagacggagttcagctccttttcacaaagcaaaataatggccgaaaacatcacacctacttacaagctcacaaagcgaaggcacaagctacagccaaaggaagggccgccaccagcctcggtgcaccagcattgggcgaaatggcgccattggctgcgcccatgcagt

SEQ ID NO: 54245 - DNA, 192 bp, Zea mays
  unsure (1)..(192): unsure at all n locations
  Clone ID: MRT4577_149473C.1
agcgcaccgtctccgccaccgccagccggccgtcatcctcccagggctcgggaacaacacgggcgactacgcgcggctcnnnnnnctgcgggacgaccacggcctccccgcggccgtcgtgnngtcacccnnccgactggctccgcaacgccgcgggcctcgccgactgccagctactggnnggcaccctcc

SEQ ID NO: 54246 - DNA, 344 bp, Zea mays
  unsure (1)..(344): unsure at all n locations
  Clone ID: MRT4577_149474C.1
gtgggtaggaagtgaaactacataaggtgtcgatttcaaacaaaacacattttgatgggcaaaagcaacaagtatacatgaaggatcctttttgaaaacccactgttttgaataataatgcgcgacactactaaatctttgggaggaggtggaactatccttatgtagcacttnatttcattaaaattaaatgtcggatcttgactaatatgcaaagaataatttcttataactccatattttggttctgcgagttactttggaattataagcttgtcaaattcttccaagtttatttgagcatggaaataaggatgatgccgatcatttatatgttccacctg

SEQ ID NO: 54247 - DNA, 374 bp, Zea mays
  Clone ID: MRT4577_149475C.1
atgcattcatatttactttcccacggtaaatttaataaatcatgattttcatttatccaattatttcatacatatcctttatcgtatctcctctgctttatattccatgcaaattctttactcatgtattctcatactcatcaccttctataaatcaagacatgctatttcattcttgaatgcaaatctttatacacttttcaaaattcttatttttaattcatttaacttaacccaacttatatatgctttcctcatcttattgtatcataacaattttctgcttcttttgttcttattacttaactacacacatttactctttaaaaaaaatatttttattatttttttaaataaaaaaaacaaaaattttc

SEQ ID NO: 54248 - DNA, 301 bp, Zea mays
  unsure (1)..(301): unsure at all n locations
  Clone ID: MRT4577_149476C.1
acaaaataatgtggggggggggggggggcncccncanctcaagcctcaattgatccaggaccgggttactggaaggcccattttttttctttttttttctcctcttcctccccaggggggaagtcattcttgatgttgaaggtttttctaatctcttctggtgttttgcctttgntcctgcttgtccctttttgtttggttcggtctatcggtcctttttttttcttattgtctgcnctcnctttgctcgttgtaagcgtggtctggtcttccttggcgaaaaattttttttttttttttt

SEQ ID NO: 54249 - DNA, 308 bp, Zea mays
  Clone ID: MRT4577_149477C.1
actaaattgaacaaatgaagatgctctcataagcagccttggctgagtatttgccatcttgagcaaatctgaaaatgtgattgtcatccctttccgggtgcagctgaacggtgcttaaagtattccaaagggtgagatagtcagccaatacacctactgttaaggcgcccttgatgtctgctatccatctcatgtccatgagggcatctcgcacagttctactgctagctgtgcgtttagggacagcagccagaactctgggagcaagatcctcaatactttttccatgcaaccagcaatcctgccag

SEQ ID NO: 54250 - DNA, 232 bp, Zea mays
  Clone ID: MRT4577_149478C.1
aaggcaaaagggggaacttattttattaaaagttttacggggacacataaacctgccaaaatatgagccattaatgctcaaccaaccacttggattcccccaacatagtttcaaacattcccatggaaaaaaatttattttcggaagcactttttttcgggggggaagaaaacaactccctcgtataaccaaaccttgagttcttcattttaattggggcttctaatttggc

SEQ ID NO: 54251 - DNA, 541 bp, Zea mays
  Clone ID: MRT4577_149479C.1
cggtttccccccttcggttttttttttttttttttttttttttttttttttttttttttttttttttttttttttttggaacaaatcataaagccgttgattcaaaaaacatggaataacatttaacgagaatcccctttttacactggttacaacataacacaaggccaccatgcattgaactcgcaccaagagcatttcatcattgaaagaatactcaaaagtccttccccaccaaaaaaaatgggaagtttcatatatatgggccattaacctgacgatgcatgtggggtaccactcctcaaaaggctaaaaataacttcaactcctcatttgggggagaaggcctgaaaaatggtggcagggccagggtcggccaggtggccaaaaaggttgtctatggggccgggcccgggatactcagcctggaaccaggcccccattacggctaccatggggaggcgtccgttcttgatctccttggggcgcagctccttgatattttccggaaagccggtgccccaggcgagcgggtcaaacc

SEQ ID NO: 54252 - DNA, 778 bp, Zea mays
  Clone ID: MRT4577_14947C.1
ccaggactagtgggccaagcggaggcctttccagcaccaggcccaatgctgctaggggcttcttaagtcatgccttgggcgtaccggacaggcccaggcccaggcccaatgctgcgaactcgaggttgcctaccgcctcctttcaaaggcgaaagctcgcgggcgtcatatatacagcctccgcctcaccgtcctcttcctcgccctcttcttcacccttcccggagcgagaagcttgcgcgggcatcatatacagcccccttcctcggtgtgctgaacccttcctggagtggagaaagaccaggaaacagaaaatggcttggatgtctgaccagccttgccgctcctacatcattgatggatcttgcaagtatggttcagactgtttgttctctcatggacttgacttatttgggaggatagagatgcaaatcagggcacttctgcatgtgccggatgtatatcaagttccagtagagcacttgccatggagtcgccctgagttgggcataatgcttcggcaagtggggatgggatgggactcttggtcacctaatgagtttgctcgagcgtttcatactatttgtgtggtttataacagctatggatattatgcaatcctggttggagaatgcttcacactacctgggttacttaccttacaatccaaatgtgatggatgctgatagtgaagctcaccagatttatattaacttctctgctcaaagtatagaaatatgcactgaagaaaatgttcgtatctatttcagccatttat

SEQ ID NO: 54253 - DNA, 186 bp, Zea mays
  Clone ID: MRT4577_149480C.1
tcttcctgtcacaccttctcttccctctactcctttctattcaactcaccctaccattcctattaggttgcttttaaaacacatcataccactcatataactaatctaacatacaattccatacccaatatcactcccactatcactctcaaacccatactttccaaatattctatcacaaatata

SEQ ID NO: 54254 - DNA, 318 bp, Zea mays
  Clone ID: MRT4577_149481C.1
attagaaggggagcggccagacgagacgatccaagcttcccgtccctgccatgcgacagggtaggtattgtgtcacgtaacctcaattcaatggactgggcgttgcaacacaacgactggactgacaaaaccgtgacccaactcaattgaatcgcattgcatcacattctcctctgctcaggtggcatcatagaggacaggaccgaaccgactgcccaacacaacagcagcccaaactgaatatggaatgggacgcgcactggagcatgaaattcagcgcgtgtggtgtggacgttacgcgcaacctgaacactacac

SEQ ID NO: 54255 - DNA, 166 bp, Zea mays
  Clone ID: MRT4577_149482C.1
ctttctttttttttttttttttcatttttatctatgtctcatatttgaaaatagcacggggttatctaataacgggttttgttaaaattccaattgcaatgcccaaacaatcagctttccccttatccccttcttatattatcctaattaactgaaaagggaaaat

SEQ ID NO: 54256 - DNA, 399 bp, Zea mays
  unsure (1)..(399): unsure at all n locations
  Clone ID: MRT4577_149483C.1
ttgctaacgagcgccagcccacaaccttattacccacgaacctatcaccagcactagtcctcagaatgagaaaacccgaggcctcaaccctacaggagccagcaggcagaaagaggtggcatctgacctagatcacccttggtacggcaacaatcaggagacctattacngtgngacctgtgaggcacatattgacacaaaacatgaagccacagcaactacaacaacaagggctagcaaaccttaccagcctactctcatgaacagcagattcttccattcaaccaactagctgcatagaactctgcttcttatttgcagcaacgacaaataccattcagccaggtacctgatggctacccgcatgaaattctttcatgctgccaactggaagcatag

SEQ ID NO: 54257 - DNA, 266 bp, Zea mays
  Clone ID: MRT4577_149484C.1
tatcaatcgttttccatggctcgtaccaagcaaaccgctcgcaaatccaccggtggaaaggctcctaggaagcaactcgccaccaaggctgcaaggaaatctgcaccgacaaccggtggagtcaagaagcctcatcgctatcgccctggaactgttgctcttcgtgagatccgcaaataccaaaagagcacagagcttctgatccgcaagctccccttccagcgtcttgttcgtgaaattgcgcaagacttcaagaccgatttgag

SEQ ID NO: 54258 - DNA, 174 bp, Zea mays
  Clone ID: MRT4577_149485C.1
cgtgcacgcgtaacaccgctcgggattcggctcacagtcagatgaacactgccatgcctagcggtaccagccacaggtcgtgcatgtgccatgcgctaacgatagccgacgtcagttacgcaagcatccatcgacgagcgcttgattcctgctttcacactcttttacacaatg

SEQ ID NO: 54259 - DNA, 383 bp, Zea mays
  unsure (1)..(383): unsure at all n locations
  Clone ID: MRT4577_149486C.1
ctacgaagcgtcgtatcctctagagcgggcgccctcttctttttttttttnnnnnnannnnnnnnnncacccaaagcggacacatttattttttgttttattttaattgaacaacaggggcctaaaattggcaggctttgaatcaaccgtgaacccaaaaaaagcgggaaattatcaaattacaccggcacacgtttggttttttaacaaacaaaccaaatcgcccgatttgatggatcgagaggaattctcctaaacaaccaaaaggaggcccaatgggcgccactggcgggcccatatcaagtgcacccacttaggtataacaaccttgcgcttgggcccccccaggagatggccctcaatttttttcttgcggaggactt

SEQ ID NO: 54260 - DNA, 201 bp, Zea mays
  Clone ID: MRT4577_149487C.1
gagcaaaccatgggaggggggcatcacgaggatctttacacgttctctacaaaaagctatgacaacaacagctagccgggcgacatcacaaaacaccaatcaaggccatctatacataatcgccgagagagaggcttttgactagaagcgaatacacagttcgcgtccattttagagtggccttgattttgaaccccctat

SEQ ID NO: 54261 - DNA, 290 bp, Zea mays
  Clone ID: MRT4577_149488C.1
tttttttttttttgttttttttttgaggcaaagaaaaattattaattaactgttagcagcacgtattaccgttttaagaaaaaaatggggcaacatcaccaaggaggagatgaaaagttttgatggggcaggaagacactggacgaggtttacaggcgacttattactaactgcacgagaaaaaaaaatttctatgttctgtaggcagaaaaggcgtgatgctgaaacaacccagggccatgtgcgcccaccctttctgactacagaaaaaagacggctcccgagccact

SEQ ID NO: 54262 - DNA, 1747 bp, Zea mays
  unsure (1)..(1747): unsure at all n locations
  Clone ID: MRT4577_149489C.1
gcttgcatctacatcgtctccctcactctgctggtgctgctgctcgacgcgagcagacgacggagaacaaccggaggtggcagtagcagcacggaggagcacaagctgcctcctggctccctgggtctgccgttcctcggcgagactctccagctctactcccagaacccgaaggtcttcttcgcctccaggctgaagaggtacggcgaggtgttcaagacacacgtgctgggttgcccctgcgtgatcttggcgagcccggaggcggcgcggatggtgctggtgtctcaggcgcacctgttcaaaccgacgtacccaccgagcaaggagcgcatgattggcgcgcaggccctcttcttccaccagggcgactaccacctccgcctgcgccgcctcgtgaagggctggcttggcccggacgcgctccgcggcctcgtgcccgacgtcgaggccgccgtggcgtccacgctcgacgggtgggaaggccgcgtcaccagcaccttccataccatgaagaggctcaccttcgacgtcggcgtcatcgccatcttcggccaccggctggccggccacgtgaaggaggagctgaggaggaactacttcaccatggagaaaggctacaacagcttccccatcccggtcgcctgcaccagctacagccaggccatcaaggcgaggcagcggctgggcgcggtgctgagcggcatcctggcggagcggagggcgcggcggagcgacgacgacgacgaccatggcctcctgaacgccctcatgcgctcccgtgacgacagcggggcggcgccgccgctctcggacgaccagatcgccgacaacgttatcggcgtgctgttcgcggcgcaggacacgacggccagcgtgctcacctggatcctcaagttcctccatgacaacccgaagcttctggaagccgtcaaggtggagcagatggcagcctacgaggagaacgatggcgggaggctcccgctgacgtgggcgcagacgaggaagatgtccataacacacctggttatcttggagagcctgaggctggcgagcatcatcgccttcacgttcagagaggccgtcgaggacgtgcactaccaagggttcctgattcccaaagggtggaaggtgatgcccctgttcagtaacctgcactacagcccggactacttcgaggacccacacaagttcgacccttcccgattcaaggtggcgccgcggcccggcacgttcctgccgttcgggagcggcgtgcacgcgtgccccggcaacgacctggccaagctcgagatgctcgtcctcatccaccgcctcgtcaccacctacaggtgggaggtggtggggtcgagcgacgacgtgacctacagcccgttcccggtgccgaaacgcggcctcctggcgaggctcagcagggccaccaccggcagcgcggtcgtcggccgtgcgccgccgctggacattggaggacctgcaggcgctagctatagctagctcctcggaccaaaaggcaatgcatgcacccaagcacccaggagatagataggcccggcaggcggcaggggacgacgacacacacatccagacatcgtccagtcacgtggcagtagcaagctagtactactactactgtgtgtgctgccattctgcatgcatgcgtttcctctcattctcgtgttccttcatggcatgtgtttccttcccttcgtttcccctcgatcgcttatacagatataaattnctggtc

SEQ ID NO: 54263 - DNA, 319 bp, Zea mays
  Clone ID: MRT4577_14948C.1
aggactatcctactatgtacgcgtggtgagcgagtcctgcgaagcacgccagagcgtgtgggcaattcggtgcgtgactgaggcaacgcgttgtgtggtcttgatcagtgttctcagcatcccaccgtggccctgttctgtggaacggcacgcgtgaccgggtgagaaccttcccccgccttgctcttgtcgatccagtaggcccccgctatcagtcccttgatggggtttgcagaccaaactctgctgtgaactccgtagcggcctccctacggtgttccaaccgtttgccaaccatttccgcccgggaacggtgata

SEQ ID NO: 54264 - DNA, 366 bp, Zea mays
  Clone ID: MRT4577_149490C.1
accacgcgttcgcccacgcgtccgcgagatctgcaactgcgacaacctacgcgtggtaccgctcgccggcgaccagcagtgcgcgccggccgcttgcaagcggactccggaggcggtcaataccgtaaagcatcagcagcagggcagcgtggtgcctgcttcttccgctccggtcacgacggcagctgctcagtgcatgccatctgcggccacagcagcgcaagccatccgcgtcgcctaggagtcgtcgtcgtacatttcgtgcgcgtgattactagcttgttgacgacgacgccagcgcagggattcagcgcggacggtgacgatacaagcacgatggatcgacgagcgtcgagtcacggtcac

SEQ ID NO: 54265 - DNA, 1481 bp, Zea mays
  Clone ID: MRT4577_149491C.1
cattgggtacctcgaggccggccggggactgatggatcactcctgcagctgcagctgcagtgcgtcgccgctactccatcgtctattaattcctcgtgtagctccagcgctcggcttagacaagcctctccaacatgaagctcctgggttggatgcaccggaagttacgacagaacagtaatgatgtgttcaaagagttcaacaacgctggaggtgggacctgcaactgcatcaccgggctggccgcgtcggacccggccactttcctcgccaccgccaacgaatacttcgccgccgacaacgacttcaccaacaatcatccatcgtcgccggccgccgacctcttcacctttggtggcagcggcctcctcaccattggcacgctaggcatcgccgccgtcgcggtgtctgcagatgctgatgaagttgattacgacgtcgacgccgatgctgactccgactttgacgacaacgacgacaccgccggtgatgacgaagaccaggtcgacagcgccgtcacgcccacgttcacatatgcagcgccgcctccggtagaggacgccacggtcgtcgagaaggctgcagttgccgtggttgaggccattgccgagaaggacgacgacaccaccactgaggatgacctcatggtggtgagcgccgagctggagaaggtcctcggtggccgcaacagcggcaccgccggtgacctggtggcgtcggcgcgggtgagctttgccatgggcgtggactgcccgctacagggcttcctgttcggttccccggtgagcgacgccgagtcgcgcctggagcagccgcgggatagcaacggcggccggcgcacctcgctcggcgagctgttcatgcgcacgcgcttcgccgaagagaaggtggcgctcgtcgccgtcgaggaaggtgaggacggcggggacattggtgctggcggtgaaagggacgacaggaaagcagggaaaggcggcggcggccacaagacaacgaagaagaggagtgcaaaggatgaaaaggtccccagaggtgacggagcgcaggcgagtgcaacagtgaccaagagcaagtttcacaagatcctccagatcttccacaggaaagtgtaccccgagagcgcggccctggcgcggaacctgaccaagaagagccgcaagcgcggcagcggtgcctaccacaagccggagccggcggcgtccaggctccggtgcctcaaggagcagcgcgcgccggggttcggctgctgcgccagccgggcctcgttcggcggcgccgcctctcccatcgacgacgacgaggaggagctcaacggcagcaagagcggccactggatcaagaccgacgctgaatccttggtgctggacctgtagaatgagtaatcacaagagacaaaaacttttccatactgttatcggcgaagaactgcttgtggagctgtcaattcagtcttacggtgccatgaccatgatgtgtcctgt

SEQ ID NO: 54266 - DNA, 285 bp, Zea mays
  unsure (1)..(285): unsure at all n locations
  Clone ID: MRT4577_149492C.1
gtgcgggaggtggaggaggccgcggcggtgggcggggaggccgtgaagggggcggtgacggaggcggagaaggaggtcgccagcgagggcctgcagctggtggccggcgcggagctcgccggggacgggctagtgcatgccgcggtggtcgccgcctccttggcgctctgggtggnctctctcctttgcggggggggggggtgtttttgncgctcttcctccnctctttcncggcntcccttgttcccgttgngncggcttttcttgttggtgtgcccccggggg

SEQ ID NO: 54267 - DNA, 612 bp, Zea mays
  Clone ID: MRT4577_149493C.1
acggagcgcaggcgagtgcaacagtgaccaagagcaagtttcacaagatcggccctggcgtccacaggaaagtgtaccccgagagcgcggccctggcgcggaacctgaccaagaagagccgcaagcgcggcagcggcgcctaccacaagccggagccggcgcggggcaagctccggtgcctcaaggagcagcgcgcgccggggttcggctgctgcgccagccgggcctccttcggcggcgccgcctctcccatcgacggcgacgacgacgacgagctcaacggcagcaagagcggccactggatcaagaccgacgctgaatacttggtgctggagctgtagaatgagaaataacaagagagagatcaggatctgttggctggtcagcatcaagcatatatagtgagtatattgagcataatgcctgcttatgtttctgtgcttgctcttcacagaaaaaaaaaacccccatcatacatatgtttgttcatgtgattacctgacggatgagttgtacgtgtccgtctatatatctgtataaaggggaaaaggactgcgagtgtatgaacttaatgtatggtttgcgtcaagatgtgatcgctgcctcctctct

SEQ ID NO: 54268 - DNA, 2538 bp, Zea mays
  Clone ID: MRT4577_149494C.1
cctagttcccctttgtcacccaccaacggtggttcagtcaagattgtgcaaatgacaccaataacttctgccatgacgacagctaagtggcttcgtgaggtgatatcttcattgccagagaagccttcatctaagcttcagcagttgatgtcatcatgcgatagagatttgacaaatgccgtcacagaaagggtcagcatagttctggaagcaatttttccaaccaagtcttctgctgatcggggtggctcattaggcctcaattgtgcaaatgcctttgatactctatgggcagatgccagaaaaatggaggcttccaagttgtactatagggtattagaggcaatctgcagagctgagttacaaaacagcaatgtaaacaatctaactccattgctgtcaaatgagcgttttcaccgatgtttgattgcatgttcagcggagctagtattggcgacacataagacggtcatcatgatgtttcctgctgttcttgagagtactggtctaacctcatttgatttgagcaaaataattgagaactttgtgagacatgaagagaccctcccaagagaattgaaaagacacctaaattccttagaagaacaaattttggaaagcatggcatgggagaaaggttcatcattgtataactcactgattgttgccaggccatctgttgcttcagaaattaatcgctttggtcttctggctgaatcaatgccatctcttgatgacttagtggcaaggcagaatattcatattgagggcttgcctgctacaccatctaaaaaacgtgctgctggtcgagacgacaatgctgatcctcgatcaccaaagagaccatgcaatgaatctaggagcacagtagtagaacacaatttgcagacacctccacccaagcaatgccacatggtgttgactagtttgaaagcaaaatgccatccactccagtccacatttgcaagtccaactgtcagtaatcctgttggtgggaacgaaaaatgtgctgacgtgacaattcagatattcttttccaaaattctgaagttagctgctattagaataagaaacttgtgtgaaaggattcaatatatggaacagacagagcgtgtctataatgtcttcaagcagattcttgatcaacagacaacattattttttaatagacacatgcatcaacttattctttgctgtctttatggtgttgcaaaggtttgccaattagaactctcattcagggagatactcaacaattacaaaaaagaagcacaatgcaaaccagaagtttttttaagcatctatattggaagtaggaatcataatggggtattaatatcacgccatgttgatatcattactttttacaatgaggtctttgttccagcagccaagcctttcctggtgtcattaatatcatctggtactcgtccagaagacaagaagaatgctagtggccaagttcctggatcaccgaagctatctcctttcccaaatttaccagatatgtccccaaagaaagtttcagcttctcataatgtatatgtgtctcctttgcggcaaaccaagatggatttactgctgtcaccaagttccaggagtttttatgcatgcattggtgaaggcacccatgcttatcagagcccatctaaagatttggctgctataaatagccgcctaaattataatggtcggagagtaaacagtcgattaaactttgacatggtatgtctcatgttgactttgcttttgtaatggtactgttggcttcattgctggaatgctggttataatcaacctttactgctctatattgttctttttttggtttgcacaaccagggtggttggttttctgaatcaatcaatccatttcctcggacacaagataatttttgcgagataaggaaaatctgaaatgctatcaccatttaaaacattggctcctggaagttcaggttaggtgttgctgtagaatgagatggttaccatctttacaagctcaggctatatgatttcagcagcactgtaacctggggtgcaaatgttaaggccctgcaagcactttccaggccacaccaattctgcttggttcttgaagatacattcttcctatgtgccccctatataaaagccatttctggttgttatgtttatccttgacatgtcaacagattagtgttgggttgcagtcatgcggtccttaagtctcggagaaggcgagaagtcattgctgctagcattgtgatcgtcggccacgaaagtaatcaaaaagtgagagctacttgttcctagcaaatggagaagggcgatatataggtttatgatcaaattcagtgtatgcaagcagcatattttgtttagagttagcttttgaggttcatcatttcatttcacagctgattctctatgttgtaactccttagtcgtgtagaaattagaatgctatctgcttaatttttagtgaataatttgctagtatatttttgaatgtaattgcagtagctctgcctcttcattaaaaaaaaaaaaaaaaaaa

SEQ ID NO: 54269 - DNA, 592 bp, Zea mays
  Clone ID: MRT4577_149495C.1
agctaatcactcttttggtattctaagcaaacaatcccattttgagcatcccaagaacatctccactcatctcttgatttgtgcttcatccaaatatagacagttcagattagctctccatgcagactttacgcctacatgtcatcagatcgttgaggttgccaatgtgcagaactacatgggtagtttgaggagatcatgttcgaagccaatggagagcacagtctgtagattcctgcaaatattccctgaccaaattcccatcgcggctgccgcagctaggtccgccaccccaccgcgcctcccatcctgagcgagctggccgtttcctgatctgtgtttctctgcatgcggttcctccttgcattgggagctcagcgaccggcggaaataagcgaggagaaaaaaatagaaaagagaggcattgcagacatttaagcattatcatctgggaagagatattgttttactaacattttataaaaacagcttcgactgtagcagtagagctattttaggagaagcaagaaagaagaggtcgttattttacttgtgcaggccttccgtaattagtaggtggaagtcattctac

SEQ ID NO: 54270 - DNA, 696 bp, Zea mays
  Clone ID: MRT4577_149496C.1
tacgtgccttatccttcaggtatgtctcatgttgactttgcttttgtaatggtactgttggcttcattgctggaatgctggttataatcaacctttactgctctatattgttctttttttggtttgcacaaccagggtggttggttttctgaatcaatcaatccatttcctcggacacaagataatttttgtatgttacacttcccaaaattgcaattaattcagaagtctgcctactttcattcagttagttctcagcaacactgaaaggatatgaatcagtcaacccgatagatgtttatctggttattccaaacaatctgacatcacatctgtttctgcaggcgagataaggaaaatctgaaatgctatcaccatttaaaacattggctcctggaagttcaggagtcgttcttaaacagcaactgctccttcgttcagcgcttctcatttctgattgtattgaccgagagcatccacctttccttctggtatcaactgaatgagttgccgacaccgacccatctgcgcataatggcaggttaggtgttgctgtagaatgagatggttaccatctttacaagctcaggctatatgatttcagcagcactgtaacctggggtgcaaatgttaaggccctgcaagcactttccaggccacaccaattctgcttggttcttgaagatacattcttcc

SEQ ID NO: 54271 - DNA, 2945 bp, Zea mays
  Clone ID: MRT4577_149497C.1
gagaattgaaaagacacctaaattccttagaagaacaaattttggaaagcatggcatgggagaaaggttcatcattgtataactcactgattgttgccaggccatctgttgcttcagaaattaatcgctttggtcttctggctgaatcaatgccatctcttgatgacttagtggcaaggcagaatattcatattgagggcttgcctgctacaccatctaaaaaacgtgctgctggtcgagacgacaatgctgatcctcgatcaccaaagagaccatgcaatgaatctaggagcacagtagtagaacacaatttgcagacacctccacccaagcaatgccacatggtgttgactagtttgaaagcaaaatgccatccactccagtccacatttgcaagtccaactgtcagtaatcctgttggtgggaacgaaaaatgtgctgacgtgacaattcagatattcttttccaaaattctgaagttagctgctattagaataagaaacttgtgtgaaaggattcaatatatggaacagacagagcgtgtctataatgtcttcaagcagattcttgatcaacagacaacattattttttaatagacacatgcatcaacttattctttgctgtctttatggtgttgcaaaggtttgccaattagaactctcattcagggagatactcaacaattacaaaaaagaagcacaatgcaaaccagaagtttttttaagcatctatattggaagtaggaatcataatggggtattaatatcacgccatgttgatatcattactttttacaatgaggtctttgttccagcagccaagcctttcctggtgtcattaatatcatctggtactcgtccagaagacaagaagaatgctagtggccaagttcctggatcaccgaagctatctcctttcccaaatttaccagatatgtccccaaagaaagtttcagcttctcataatgtatatgtgtctcctttgcggcaaaccaagatggatttactgctgtcaccaagttccaggagtttttatgcatgcattggtgaaggcacccatgcttatcagagcccatctaaagatttggctgctataaatagccgcctaaattataatggtcggagagtaaacagtcgattaaactttgacatggtgagcgactcagtggtagctggtagtctaggccagccaaatggtggttctacttccttggatcctgcagctgcatttagccccctttcaaagagaaagccagatacttgatcaaatataaatggcgatctctctcgtatatagctcacagctccatagcagtctattcttctgaataagtgggttgactggagtgatttaactgtacatgtatgtgttagtgagaaccagcagtttataggcagcaaactgttttaaattagctttgaggttttatcaccatttccctgctgattgaacatattttagattgtaacatctgctttgtagaatgctaatgaatctttagttttcagtgggttgacattaaaaatccttatcctagttggctggttgttgggagacattcatcaaggttatatttggtcgtcaaatagtactgtacttgattcatatctttcatatttttcactagcgttggcaaccgtaaattgctttcctgactaggaacatattcttcacaagtatggcaactctaaactatttgaccttttatattctcatttttaagtactttctctatttctgctacttttgtactgtgtatttccagcttctccaccagactgattgttagagtgtatgctcctatattatccatgtatgtgtaaatgggctgctagcccattagggttaggttcccctgggtctatatatgtaaccaccctctatgcaatagaagttgaatatcagtttctatcactaatgattccatattcagtgggctgcaagtgatttgacatacgtgccttatccttcaggtatgtctcatgttgactttgcttttgtaatggtactgttggcttcattgctggaatgctggttataatcaacctttactgctctatattgttctttttttggtttgcacaaccagggtggttggttttctgaatcaatcaatccatttcctcggacgacaagataatttttgtatgttacacttcccaaaattgcaattaattcagaagtctgcctactttcattcagttagttctcagcaacactgaaaggatatgaatcagtcaacccgatagatgtttatctggttattccaaacaatctgacatcacatctgtttctgcaggcgagataaggaaaatctgaaatgctatcaccatttaaaacattggctcctggaagttcaggtaggtgttgctgtagaatgagatggttaggaatctttacaagctcaggctatatgatttcagcagcactgtaacctggggtgcaaatgttaaggccctgcaagcactttccaggccacaccaattctgcttggttcttgaagatacattcttcctatgtgccccctatataaaagccatttctggttgttatgtttatccttgacatgtcaacagattagtgttgggttgcagtcatgcggtccttaagtctcggagaaggcgagaagtcattgctgctagcattgtgatcgtcggccacgaaagtaatcaaaaagtgagagctacttgttcctagcaaatggagaagggcgatatataggtttatgatcaaattcagtgtatgcaagcagcatattttgtttagagttagcttttgaggttcatcatttcatttcacagctgattctctatgttgtaactccttagtcgtgtagaaattagaatgctatctgcttaatttttagtgaataatttgctagtatatttttgaatgtaattgcagtagctctgcctcttcattaaggaaaaaaaaaaaaaaaaa

SEQ ID NO: 54272 - DNA, 2789 bp, Zea mays
  Clone ID: MRT4577_149498C.1
cgagacgacaatgctgatcctcgatcaccaaagagaccatgcaatgaatctaggagcacagtagtagaacacaatttgcagacacctccacccaagcaatgccacatggtgttgactagtttgaaagcaaaatgccatccactccagtccacatttgcaagtccaactgtcagtaatcctgttggtgggaacgaaaaatgtgctgacgtgacaattcagatattcttttccaaaattctgaagttagctgctattagaataagaaacttgtgtgaaaggattcaatatatggaacagacagagcgtgtctataatgtcttcaagcagattcttgatcaacagacaacattattttttaatagacacatcgatcaacttattctttgctgtctttatggtgttgcaaaggtttgccaattagaactctcattcagggagatactcaacaattacaaaaaagaagcacaatgcaaaccagaagtttttttaagcatctatattggaagtaggaatcataatggggtattaatatcacgccatgttgatatcattactttttacaatgaggtctttgttccagcagccaagcctttcctggtgtcattaatatcatctggtactcgtccagaagacaagaagaatgctagtggccaagttcctggatcaccgaagctatctcctttcccaaatttaccagatatgtccccaaagaaagtttcagcttctcataatgtatatgtgtctccttttgcggcaaaccaagatggatttactgctgtcaccaagttccaggagtttttatgcatgcattggtgaaggcacccatgcttatcagagcccatctaaagatttggctgctataaatagccgcctaaattataatggtcggagagtaaacagtcgattaaactttgacatggtgagcgactcagtggtagctggtagtctaggccagccaaatggtggttctacttccttggatcctgcagctgcatttagccccctttcaaagagaaagccagatacttgatcaaatataaatggcgatctctctcgtatatagctcacagctccatagcagtctattcttctgaataagtgggttgactggagtgatttaactgtacatgtatgtgttagtgagaaccagcagtttataggcagaactgttttaaattagctttgaggttttatcaccatttccctgctgattgaacatattttagattgtaacatctgctttgtagaatgctaatgaatctttagttttcagtgggttgacattacaaatccttatcctagttggctggttgttgggagacattcatcaaggttatatttggtcgtcaaatagtactgtacttgattcatatctttcatatttttcactagcgttggcaaccgtaaattgctttcctgactaggaacatattcttcacaagtataagtatggcaactctaaactatttgaccttttatattctcatttttaagtactttctctatttctgctacttttgtactgtgtatttccagcttctccaccagactgattgttagagtgtatgctcctatattatccatgtatgtgtaaatgggctgctagcccattagggttagggttcccctgggtctatatatgtaaccaccctctatgcaatagaatttgaatatcagtttctatcactaatgattccatattcagtgggctgcaagtgatttgacatacgtgccttatccttcaggtatgtcttatgttgacttcattgcttttgtaatggtactgttggcttcattgctggaatgctggttataatcaacctttactgctctatattgttctttttttggtttgcacaaccagggtggttggttttctgaatcaatcaatccatttcctcggacacaagataatttttgtatgttacacttcccaaaattgcaattaattcagaagtctgcctactttcattcagcgagataaggaaaatctgaaatgctatcaccatttaaaacattggctcctggaagttcaggtgattaacaaacctccatctacatctgacattggcatgtatggtagagtccagcaactcttgtgatggcaggagtcgttcttaaacagcaactgctccttcgttcagcgcttctcatttctgattgtattgaccgagagcatccacctttccttctggtatcaactgaatgagttgccgacaccgacccatctgcgcataatggcaggttaggtgttgctgtagaatgagatggttaccatctttacaagctcaggctatatgatttcagcagcactgtaacctggggtgcaaatgttaaggccctgcaagcactttccaggccacaccaattctgcttggttcttgaagatacattcttcctatggtgccacctatataaaagccatttctggttgttatgtttatccttgacatgtcaacagatcagtgttgggttgcagtcatgcggtccttaagtcccggagaaggcgagaagtcattgctgctagcattgtgatcgtcggccacaaaagtaatcaaaaagtgagagctacttgttcctagcaaatggagaagggcgatatataggttgatgatcaaattcagtgtatctgtgtatgcaagcagcatattttgtttagagttagcttttgaggttcatcatttcatttcacagctgattctctatgttgtaactccttagtcgtgtagaaattagaatgctaactgcttaatttttagtgaataatttgctagtatatttttgaatgt

SEQ ID NO: 54273 - DNA, 396 bp, Zea mays
  Clone ID: MRT4577_149499C.1
gggggtgtgggggggggttgtggtttctttctttccaacacaacaaaaaataagggctttcatgcttaacgaggttctgcgggagataagcaggttcacacaaaacaaggcgggggagttccccattcacttaagatgtttggggcacaaagcaaaataggatgggcttaagcaaaacgtgtggattcccattccaaccttttattgcacttaaacaacccccttaaagaaagccttcccaggagcgcgcttgtgaagtcttccatggttaccgaacaagtttgcgttgaccccctcaggaacaattttacccttacttttgtacttcaagaaaacggggcgggtgagcttggggaacccccactttctggtttcaataattttgggacgcgttgg

SEQ ID NO: 54274 - DNA, 455 bp, Zea mays
  Clone ID: MRT4577_14949C.1
acaccacgccgccgtcatgctcgaactgaggttaagttaggtaggtgctgcacaacatgagtacgaggctgctgcctctaccgggggcagaaacaatggtgaacgtgcgctgacaacaaagacgacaagaacctatacatcatatccgttaaggagatcaaaggtcgacctgatccggctcctgtacgcctgtgtcggcaacataaacatgatcagccgtaaaggaggggaagaccgacctgaggaagaaagtgatgcccaacattatctatcgccagtgcaagccgagcagtcacaaggacggcgactacatgaacttggaagataatgatgcagtgattgagaatgccaaggttgagatgaaaggttgtgcatacagtggacctattggtaaggagggggctgatcttaggcctacgatcaacagggcagcgaatgccatcgttggagatgtt

SEQ ID NO: 54275 - DNA, 1589 bp, Zea mays
  Clone ID: MRT4577_1494C.1
cctgccggatccgttttctttgcgcgtctcccttcccgagtcgcaggctcgcagccctgcgctgtcgccgtctgccgagcccgagcccggaaaaggggaaggcggctacgcaaacgcaaggcaccccaccccgttcaccgcagccgaatcaattaaaaagccggcggcgagaaggtgggttggggaatctgaagcgatcagagaaggcaagcttgcttgcttgcttctccaccgaatcccccatctcgcgccctccgtctctcgccgcggagactcgcccccccgctgatggaccagctcgtcaatttcatcatccgcccgcccagagctgactacagtccaaatgatgatctattagagcaggagtttatgctgaagggaagatggttcctgaggaaggatttggaggtaaaaaatggtcagggcaagaagttacaatgtagtcactacatgcctgttgtgattcctgaaggaaaagctcttccttgtgtcatatattgtcatggaaacagtgggtgcagggctgatgctagtgaagccgctattattcttctaccgtcaaacattacagtctttacactggacttttcagggtctggactctctgaaggagagcatgtcactttaggctggaatgaaagagaagatctcaaagctgtggttaactatttgcgaacagatgggaatgtatcttgcattggtttgtggggtcgctcaatgggtgcagtcacaagtctaatgtatggagcggaggatccatcgattgcgggaatggttcttgatagcccattctccaacttggttgacttaatgatggagctagtggacacatacaaatatccactgccaaaattcactgtcaaacttgcaatacagcatatgcgaaaaattgtcaagaggaaagctagtttcgacatcatggatcttgataccattcaggtagcaaaacaatgttttgttcctgctttgtttggacatgcaactgaggatgattttatacttccccatcattcagacaagatatatgaatcatatattggcgacaaaaacattataaaatttgatggggatcacaattcaccacgtcctcaattctactttgactcaatcactatatttttccataatgtgctaaaccctcctgaagtggcagaggatcattatttcatgacaccacatggtagccttggtcagggtcattgggatacagaacaagacatagagtatcggttctctcaatcacctacagggacagccaatgctactacaacagaagatgccattgcacagttgcgctctagaaggctcatgagtagaatggaggtcccatctggtgccaccaccgaagacaggactgatcgaactgagggtttcgatagtgatcttggtccctcttcatctagtgtatcaacagcaactcctcccaatggtcgcaacggaaggctgctgactccaacctctgatgatggcgagtatgtggagtactcatttgatagcttgtcagatatgcctcacaccgtggaagatgaagatagaatgctaatgcaagcaattcttgaatcactgaaagactatgaacagtcgaatac

SEQ ID NO: 54276 - DNA, 325 bp, Zea mays
  Clone ID: MRT4577_149500C.1
gaccatagaggtcagcatgggctcgacgcatggtcaggtggaacataggcataagattgccaagatgaaagacgggtacagcaatgcgcctgacttggaggacctgttcttaatgctcaatgtgggttcagcttgcacttggacactgtacaccagggtccggatacagtacgaagctcacatccgctatgactccacatgtagccgataacagtatctggatcatgatagccgctccgacttccatgactaccataactacgtgatgaatacaaagatatggtgatactgctaagcatgaggacacatggactggccagtccac

SEQ ID NO: 54277 - DNA, 516 bp, Zea mays
  unsure (1)..(516): unsure at all n locations
  Clone ID: MRT4577_149501C.1
ccatgttggcgtgcatgctcaaccactagcgcgtcctctaccttcgcgtcccctaccgtatcaacgccacctccgcgccgcggcagcggacagtgtcccgtctccttattcccttccacgacgttcccagagacgacgccctcctcgccgccttccgctcatccctccgcggcttgctgctcgcgcgccaccgncagcgccaccgccgaggtggcgacgacgtcgggggcgccatggtcgaccttcccgccctgctttttggccggtgccggcgccggcgcttcccgaccttcggtgtttttttgtgcnggttttgttttttggttttttggggtggttgtctttttcnttgttttttttgttctcttttttgtggtgttttttttttttgggtggggtgctgtgttgttgtttttgtctcgttttttttttttttttttgttttttttttttttttgtgtgttttggcgttttttttttggtggtattatttttcttttttttttcctttttttt

SEQ ID NO: 54278 - DNA, 185 bp, Zea mays
  Clone ID: MRT4577_149502C.1
gctcggccccacgcatgctgcagacgcgttacgtatcggatccagaattcgtgattatttaatcaaattgtctttttcctgtttgagagtcaatatatattccttttaacgcacgtagatccgtcgaatctcttaatattctccgcttcaattcttgccggtttttctaaattataagtgtgacc

SEQ ID NO: 54279 - DNA, 234 bp, Zea mays
  Clone ID: MRT4577_149503C.1
gaggactagtatacacgcacacattacggtgcaaagtttgatggattacggtggtctgcaaagaaacatgcacacagttacttggtgaaacgagcgcaaacttggacgatctcagaaacagtgatattgcatgggatattgtctaaaagaggcatgaacacgagggacaacagcgccacgaggtgtcgatgcaccaagccaaccttgggcctggcaggcatgcatctgccgcag

SEQ ID NO: 54280 - DNA, 2306 bp, Zea mays
  Clone ID: MRT4577_149504C.1
gaccaacccaactcgtctcgtaccgtccaagacggggcaatgaatacctggggaagccggcgagctggagcctggcggcagcttggcaccgatcgtcctccatccccgtcgctggcccggcctcctcctaatttaatcccacccggcctccccgttcgccccgaccgcatccccccttaacctcccttcctcctcctcctcctgcggtcccaactcccatacttcggttcaggaggcaggcaggcaggaaggcaggttcgaggggggattggctccgctcctgctccattgcgcgcgatccggctcgttcttgtgatctatctagccgtttcttgggtcagtgctggaaggtcaaactgttggtggaaacctcaccggggtgcttcaacgaacgcgaaggtgtcgctgtcatttagcgcgtcttgattggatttgacctgttggcctggtggcgtgttgtcgttgattgagctcgaggatgatgaaatgggggctcagcagcggcacgcccgcggattcctactacgaggtacggtcagattgcacggacggtgtgcccaagagcaagttcaagatcaaggctggcaaaacattaagtgctcggaaatggcaggctgcatttagtcccgatggctgtcttgatattgcctcagtcctaagccggatacaaagaggaggtgtccatccgacagtcagaggagaggtctgggaattcttacttggttgtttcgatcccagaagtacctttgatgaaagggaagagatcaggcaaatacggaggatacaatatgacagatggaaggaagattgtcgacagatggattctcatgttggtagcggtaaagttatcacagcaccacttatcactgaggatggcagacctattaaggatcctctggttttacttgaggctacttctgacacgaacacttcaggagatgctccaactaccagcataaatggaaatgaaattgatgaatctgcagaacgcattaccgataagcaaattatcgagtggaagctgacattacatcaaattgggcttgacgtcctacggactgatcgcaccatggtattctatgagaacaaagaaaacctttccaaattatgggatattctagccgtgtatgcatggattgacaaagatgttggttactgccaaggaatgagtgatttatgctcaccaatgatagttctactaaaggatgaagcagatgccttttggtgctttgagaaattgatgcgtagattgcgaggaaatttcaaatgcacagatcaatctgtgggagtatccaaccaacttcaacatcttgcatctattattcaggttcttgacccaaagctacatgaccacctagaaactcttggcggaggtgactacctttttgcgttccgaatgttcatggtgctatttaggcgtgaagtatcatttggagactccttatacctctgggagatgatgtgggctctagaatacgaccctgacattttcttcgcaacatgcgaagaacaaggtgcagtacataaaaataaagtttctaaatccaaactgaaaggactgcgccattttggcaagtgggataaggacaaggataaggaagatgataagaatggggctgaggacggtgaagatggtccggttccgatttcagtcttcatggttgcaagtgtcctcaaggagaagagagaaaagctgttacaagaagccagaggactggatgatcttatcaggatattgaacgatgtaaatgggaacttagatgctaagaaagcttgcgctggagcattgaaacttcacaaaaaatacctgaaaaaggtacaagcaaagaaaccttaaacgtgccatggaacacacgtccccaatggggctatcgttaccatttcaacatacacgaccattttctacacacaactttgagtgaagatttatcggacacaggtggtaatcgtctgacatgtcctgagatacacggagactgatggtgccaggctagtgggttgagtacaggatgagcgcaaccggtagtgtgtatatcacgttctttgtactcaagaattttgtacagacagaaggcggtgcggatagcatgccttgcatacataataatttcaatacaggttgaaaacttgaaatcaacacaccttgcgacagaattcagcttcaagaaagttcttctgcacatattgtaaagctgtaaaagtgtacgatctaatgttttcattaatgtacacataccaagagaactaataagatgacctggcatgaggcgttccctaaaaaaaaaaaaaaaaaaaaaaacagaaag

SEQ ID NO: 54281 - DNA, 235 bp, Zea mays
  Clone ID: MRT4577_149505C.1
tgacagacagtgttaatggcgaaagatgtggtactaataactgtaggaatggccattctctagagaaactacggtcttgcatatctgaaggggctctcatagaggacagattactaatgggtgcggactactattagacacaaactgctaaaaaactaaatgcccaaaaaggtggcattcttattggtttagtgaaaaattcaagcataactagagcaactattcacaagaatgc

SEQ ID NO: 54282 - DNA, 194 bp, Zea mays
  Clone ID: MRT4577_149506C.1
cttcagcagaggtgggaagtcactcaactattgttcattataacccaggaaactcatatgtgcatcacacctgcacttgtgaggtagctataggagtttcaaatcaaggtctctctggaatttcagcttggacacctgccaacttgtgttttgtgtgtgtcagaggttgaggataagggagtgcaggccactgt

SEQ ID NO: 54283 - DNA, 514 bp, Zea mays
  Clone ID: MRT4577_149507C.1
ccttcaggtatgcccatgtgtagacggccgatcgatcactaaaatgaaaatggctttcggcaacagatgggacccttctatatcaccccgaccagtgcatcagcaaagcctgctcctagccaacttgatgtactgaaaatgcctggctgacaaggaaacctctaactccttgtacagagaacatgccatggaggataacgtcagaaatgacaatgacaaagaaataaacttctcctcaaacatgtcgataagattcatgaagaacaccttacagtgccaggatgctaacaatagggaatgtgataatactctcatcaaggacgttgggatctgcaatgacatatataatttcaatcacaacatttaagaataatacccggactgcggaaggacacaacctgaagctgaagctacatacaagctggtgactgcattggaggagaaataccagaaagaaaatatcaaagagtacgataacgccagcttcaatctagaagaagactacctcgaacac

SEQ ID NO: 54284 - DNA, 896 bp, Zea mays
  Clone ID: MRT4577_149508C.1
ctgttctacttcgccggcatggagaccacgtcggtgctgctcacgtggaccatggtcgtgctctccatgcacccggactggcagcaccgggccagggaggaggtgctccacgtcctgggtcacacgacgacggcgccggactacgatgccctgagccgcctcagaatcgtaatacaagcagtgctgcagtgcagacccatcggcacattctaataaccgctaaccgctccatttattgtggttgtaacgcaggtgacgatggttctgtacgaggtgcttcgtctgtacacgccgctgacggcgctccagcgccagacgtacaagccgatggagctcggcggcgtcaggtacccggccggcgtgatgctgatgctgccgctgctgtgcatccaccacgacatggacgtctggggccccgacgccagcgagttcaggccggagaggtttgccgagggggtttccaaggggtccagggacgcgcccgccttcttccccttcggatggggaccgggcacctgggtgggccagaacttcgccctgctcgaggccaagatggggctcgccatgatcctgcagcgcttcgcgttagagctctcgccggcctaaaggcaggcgccgtttccccacggcatgctgcagccggagcacggtgcgcagatcgtgctcagggccagggggctcccctgaacccctgacatgatggcttcatatatctgcatgtacagcatatctacactacgtagtagatgcaaatcaacacacttggatttggaaggcgcgattgtgaagagttagggagttcctaaattatataaaaaaattggaaccataaaaaaaaaaaaaaaaaaaaaaaaaaaaaaattaaaaaaaaaaacacaaacaaacgggcggccgtt

SEQ ID NO: 54285 - DNA, 232 bp, Zea mays
  Clone ID: MRT4577_149509C.1
gccgcggaaataacgtatttattaaaaaatgggtccaagcttacaacaggagtacaatatatatgatccccagttggttaaaaaataaattgattcaaaaagattatatggggaatggataaaacatttataagctttaagggactggctaggctaaggtgaccagtcctaaataaagaagctaagaaggggactctctcacataaaaaggcccagcccaggggcactgagg

SEQ ID NO: 54286 - DNA, 658 bp, Zea mays
  Clone ID: MRT4577_14950C.1
catgaggaggatcatgtgaatgacccacaggaggcatggcaagaggttgatccagacgagtactcctatgaggagctagttgcattgggtgaagtagttggtacagaaaacagaggtctctctgctgatgcacttgcttctttaccttcagtaacatacaagatgcaaagtgttcaggatggcaacacagagcaatgtgtaatttgccgtgtggaattggaggagggtgaatctttgattgcacttccctgcaagcacttataccatcctgaatgcataaaccagtggctgcaaataaataaggtatgccctatgtgcagtgcagaagtatcaacctccagcaacaaggagccatgattgctctcggatggccatcttgggcatttgatgggattaactagcggcaccactgcagcatctttatgcttcaagcaaaagcataaaggaacgtcttacatacatgcaaggagatcaggaaataatcctcttgtcaatctaaagttttgtcctggttttctgctcactggatttattggccctgcagcttatatggtcttagttcccttcggacgccttatgatccataaaacatgccaattatattatattgttagttattctttttactaaaaaaaaaaagggcggcgtgcatcagaac

SEQ ID NO: 54287 - DNA, 115 bp, Zea mays
  unsure (1)..(115): unsure at all n locations
  Clone ID: MRT4577_149510C.1
cancccccgagcttagcttaactccaaatccagctncaatcacagtcgtgnccanaacngcganagcttagctaaaaggncgttaaaatgccgattnataagnttggccttgggg

SEQ ID NO: 54288 - DNA, 196 bp, Zea mays
  unsure (1)..(196): unsure at all n locations
  Clone ID: MRT4577_149512C.1
aaccccgggccgacccacgcggccgaaccgggccaacactnncacgctcaggcgctcagctctagcaanggctgcctccaggatggcgatctcctacacggcgatggccggtacccccatcaaggcgggctccatcggcgagggccccatgagcatgcgcaagaccgagagcaagcccaacgtggcaccggccaga

SEQ ID NO: 54289 - DNA, 409 bp, Zea mays
  unsure (1)..(409): unsure at all n locations
  Clone ID: MRT4577_149513C.1
accgaaccccaataccctggacgacccacgcgaatagtttcgcgcccggggcgancccaccccggggcaggagaaaatcaaagacccgggccgacaaaacaaacnnnagctggacaagcacaagccccagccagcaacaagccacacggacgggaagccaccagcccacggaccgccacccaaggccacagccgaggaccagaccccgaccgccgaggcgaccgaagaagcgcccgcggaggagaccccggcgccagccgccgacgagccccaagaggccgcccccgccgcccaggccaagggggacgagccagccgccccggcggagaccgagccagctgcccaccaagagcccgaagccgcccccgcggaggccgaggaagaaaccccaaaggaggcagagcccgaa

SEQ ID NO: 54290 - DNA, 341 bp, Zea mays
  unsure (1)..(341): unsure at all n locations
  Clone ID: MRT4577_149514C.1
cccggggggacccacgcgtacggacccaactcggttcttgcccgttcgcctaacagaggccattgggatgtcggaaatggtggggcgagtgaggcgtacnctgtctccgctcatgccgtgatcctcctccagccccggctccggctccaagcgcatcctggggagggcgatggccgcgatcctggcgctgccgctgaccccgatcaccaaggccaagctcggcctgctgcttcaattccttggtcgatcggggcagaaccagtcggttgtcgctgctatcttagctgcacttcggttaaatctctgcgtgtcttgcatttgcgtcgatccatgtttttttt

SEQ ID NO: 54291 - DNA, 228 bp, Zea mays
  Clone ID: MRT4577_149515C.1
aaaaaaaaaaccgttttgaaccgggtgggggttaaaaactaagggactttgcgggatggggaaccctcgggcaaagggtttttcgggccatttttaacagggttaaaaaagggaggggggtcctgaaagggcaaacagctccccttgggaaacccagggggttttgtttgcccccaaaaggggggggtttacaccattttggataccccgggaggcacaactttgaaa

SEQ ID NO: 54292 - DNA, 371 bp, Zea mays
  Clone ID: MRT4577_149516C.1
tgaggagggggggcacatccagcaacacctacccccaaatccccattaccaaatacccaatcctcaaaccctaggatatctgcgcgccggagctatggcggcggctgacctgaagaaggggaatgcgcgcctccctgccgaggtgaaccgggtgctctatttgcggagcgtgatgttcaacatctccagcgaggagatggactacttcttcatcaagagcggcgcgatcctgtagatccgtatgggcgcacgccaaggacacgcacgggaccgattacgttgactacgaggacatctacgacgcccagaacgacgtggaccacctgtacaggtactacgacgacgaccgctaccttatcgtgctctactac

SEQ ID NO: 54293 - DNA, 350 bp, Zea mays
  Clone ID: MRT4577_149517C.1
cccacgcgtccggtcgcgccctccgatgcggatttggctcgcgcggcggcgtcgggctccggttgctcgcgccaacgccaatgtcgtcgtccgatggcggccagtcgcgcaagaggctcgtggtcggcgtcctctctgtgtgcctgctcgtcgccatggttatcgggacggtcatgttcttcgtgagcgagaaggccggctacgactcggagctgaggaagcgcatcatgagcaagacgatgcgcagcgtggaactcttctgcgcgcccgcggactaccaaggcacgtgccacgagacgctggagacggcgctgtcgcggacggacccggccaagcacccgcacgccgcc

SEQ ID NO: 54294 - DNA, 260 bp, Zea mays
  Clone ID: MRT4577_149518C.1
caccattctcgcgccggtgaattcgcctaataccgatggaattgacccgggtagctagagaccagttagcttcctttgacgctgagaagtgagaagcacatgtgtctgattctgaatttcattgcctgtgcgtgtgtgcagattcttcctcgcgtgtcaagatcgaggactgctagatcgtctccggcgacgactgcgtcgccgtcaagaacgggttggacgaatacggcatcaaggttaacatgcccgacgagcacatc

SEQ ID NO: 54295 - DNA, 176 bp, Zea mays
  Clone ID: MRT4577_149519C.1
ctgtatagaaaacctaacaccattataacactatagggctgccaggttttaaataaagcgggcgcgtatatcgtcccgcgttattcgtcctatatcaacctgacgtacctgcattccatacacacgggtgagtttagtcataaacacaattttctcctaaaaaaaaaaaaaacaaa

SEQ ID NO: 54296 - DNA, 1108 bp, Zea mays
  Clone ID: MRT4577_14951C.1
gcgcccacgcatccactcactcatccccacgctttccctttactttaccaggtcaataaatatatgctcaggtgtcaattctaaggatacaccacatatatcaatatgacaatcatccactcatccgctactactacttcatcatgtctactacctttgatataaaattctcacctactgtctactactgatgatctgcatatctacgacgtttcttgctgcaaatcttaatttaataatgtgggcagtcggcacgagtccggccttccgggccactacttatccctcgtgttccgttctgacacccggcgccgactgggactgagaagaaacctccaaacacctacctctctacgaactacctgccgccggaaaaccctagagcgctcgaccatggatccgcagcagccggagcctgtcagttacctctgcggagattgcggagctgagaacaccctgaagcccggagatgtcatccagtgccgtgaatgtggctaccgcatcctctacaagaagcggacccgccggattgtccaatatgaagcgcgctgaagagtgaagacaagggaaaacactgaagatggttgatctattactcgccacattacctatgtaaacagtcttctgggggaaatgaaaatgtcagacttaacgtttgtatgtcgtgtgcctcctttgaacctgagctgtataatttgtaacgcttgaactggggactgatttgagaactgagacactgcagcaatatgttgatggatcctaagtggcgaatctaatgcatgcgtgttatgccagcgaaaaaaaaaaaaaaaaaagcggccgacaaagaaaccaaaaaacggccggcgacctagcgtcggtcatgcggagcctggaggaggagatagccagcttcgacgaggccgcggaggcgccggcgccggagctgggcttcctgctcgaagcctcggacgacgagctggggctgccgcccgcctcctcttcggaggaggaggaggccgggcgcgcgggggcgcatgagccgccgcccgccctcgacggccagatctggggcttcgaggacgagatcgtggacggaggcggcttcggcggctactcgccggaggcc

SEQ ID NO: 54297 - DNA, 591 bp, Zea mays
  Clone ID: MRT4577_149520C.1
aaaatagccgcaactcctccaccagaaagggaagggaagcacgccggagccccatctccccggccgtcaaaatggtgaacgttccgaagaccaagaagacctactgcaaaaacaaggagtgcaagaagcacacacttcacaaggtcactcagtacaagaagggcaaggacagtctatctgcccagggaaagcgtcgttatgacaggaagcagtcgggatatggtggtcagaccaagcctgttttccacaagaaggcaaaaaccaccaagaagattgtgctgaagctgcaatgccagagctgcaagcactactcccagcgtgccatcaagaggtgcaagcattttgagatcggcggagacaagaagggcaaggggacatctcttttctagactgctttcacctatctggagtggtggtggtcacgaagtattactacttgtgttaagggttcgttgttaggagttaaattaatcagaccttgtcatgtatccaaactcctgtgtcttgcatttaagcaagaggcgagttttggctaagtgaagttttgtagcttgaatcctctttcattccgtataatgtcaatcaactcca

SEQ ID NO: 54298 - DNA, 955 bp, Zea mays
  Clone ID: MRT4577_149521C.1
ccttggccccaacttgagacagcaccggttgcggtagtgccctcctcagcaattgtctcaagccctgaatgcactgaattgtgcagataagaggcgtggagctgctgctgctgctgtgcataccgagtgctgttgtccagcacctgagctgcattcccagttgaatttacactgtcgtcaagctggtaccattgctgggaggcctcatcatacttccacccagggtacatggcctccaaagacatgggatctgctgaatccactgcagtgctgccgccgccctggtcgtgctgaccactgacattatgctgattggaggagttgctcccggcgaagaagtcctggtccgtcacctcggcggccaagctctgggtcccgccaaagaaggcgtgatccgaggccgtctgggtcccggccgtggtcacgaggaagccgtcgtcgtcgccggcgcctcccgagagatgagcaaatgggtcaggaccgtcgtccgcgccacctccgaaggaagcccactgcacctgcttgaccgcagtgtggacgccggcgccgcccttgcctgaaccctcgggaggcgcctgcggctctgggatgggtgggtcgtcggggaggctggtggcggggtcgtcgtcgtcgacgagcttgtcgaagaagtcggcgtcggtctggtcgtcgggggcgaaggaggaggaggaggccatgcggaattagatcggagaggtctatctctccctctcgtgtggcagaagcggtggatctagggttggttgggtgcctgggttggttcctccgcctctcagttgaaatgaaaaatgggtgccgagggaacagggcggaggcggggcttaccggccggccggacagggcggcggatcggaatcgcaggaggaggtggaggcgggaaggcgcggctgcggtccgagccgacagccgacgtcgcatcgcgcccccgtggtct

SEQ ID NO: 54299 - DNA, 527 bp, Zea mays
  Clone ID: MRT4577_149522C.1
tttttacgccataaagagagtatcatagtcaactatgactcattgcttgcaacagaagagagaaaaaaatgaccgggacatgaaacgggatttttataccacatcattcttaagccccttttaatttagagttccacatttatgactgcatgtggtggaagaaagtaagacagctgctcaactcaacaatatatagatgcatacttaaaaatgctcttattatgtcatagaccaaagaaatttacaaactgaatagtaatactgcctaagttgcgtggctgacaaagatttgtctaataaaggtctgcatacttagtctgccatttcagaaagatgaattgaactccatctctgtcacaattatacagaagccggaaatttttgttctggtaacggagaacctttagacagtggtagtattgggggcactgcataaaaagaacacagattaaagtaatagattgttcaaatgctttggtccactgttccaccttctttcatcttctttcgcattttgtattgcaatg

SEQ ID NO: 54300 - DNA, 302 bp, Zea mays
  Clone ID: MRT4577_149523C.1
ctgccggcggagaaacttctagcctccccggcgccgaactctgaccttcgtctggccggcaagacggctcgcgccttcaagatacttcatctcgtccgccccctcctgggctctcttaccaaacgtgcaaaccgccagataagaacataccactccaaagaaaagctatctacactgttatcttctctcttcatttttctggtcagcagccatctcccactccatggcattcattctaccactgaacctagatcctttctactgcatgccggttatcctcctatcaaaccataggactgacg

SEQ ID NO: 54301 - DNA, 551 bp, Zea mays
  unsure (1)..(551): unsure at all n locations
  Clone ID: MRT4577_149524C.1
ggaaaaccacgtgtccattccatgcagtgctggagtccccaaatttcttgatcgcgaggttctggccaagcaacaacactcgtttccttatccctttgcttaggtgctggtccagtgcaacctgctgtcttcgagctctagcagatcgccttgccttgcgtagccgtgaccacgccggcgctgcagcactacagctttacctcgccgggtttagggtcctccgcacaagccgcgccgacctccactccagcttagatcgacgacggacatgtgccttcctgtcctcgcgttcggatcgacgtcgctcagtgtgccacactgtcatgccgtgatcagtcgtccccagctctgcctcgtcgtacggtggtgtcacagcaggctcgtcttcggtcctgggcctcgtctcctcgncatcgattgacggattcgtcacgttcgagtttcagctcactattccaagctcctggtattttggagcttcggcaattattgtcctgtgcgtgtcgtgtggggctccctactcctacctagtgagctcccaaataagagtg

SEQ ID NO: 54302 - DNA, 475 bp, Zea mays
  Clone ID: MRT4577_149525C.1
atcaaagctctacttctagctagctagcaaagggggtgaaaatggctccacttctcgctgctgacatgaaccacgctgcaatccatgctgcgcttaggaaccacctactacggatccaacaatgacactttctcacggcaccacctgccgtcttcttctccacagagcatcaagagaatatgtaaccttagatttactacacgatctggagaagtacaccaccgaaatgaagggcaaatgttgagaccctgagaattccagaaaggtactggttcccctctgacttcaccgtatcccgcctccacttcatctgacctatgtgagtgcttgaatgagatatagaaagcgcaatcacttgatcacttctgcacacatcgaaactatgacggagatacgatttgtcattcaaccgaggtccacacgacgtccattacaaatcaaatgggattgacgcatatgggttctctatctcttg

SEQ ID NO: 54303 - DNA, 301 bp, Zea mays
  unsure (1)..(301): unsure at all n locations
  Clone ID: MRT4577_149526C.1
atcgtgtgcacatgcacaaataggtgataaaggcagatgatgttgttggaccagaagtgganaagttggtgtctgcattgccaaacggtaatgttgtgctccttgaaaatgttagattctacaaggaggaagagaagaatgacccagagtttgcaaagaagcttgcctctttagcagatctttatgtgaacgatgcctttggaactgctcacagagcacatgcgtcaactgagggagttaccaagttcttgaagccctcagtcgcagggttccttttgcaaaaggagcttgattaccttgt

SEQ ID NO: 54304 - DNA, 294 bp, Zea mays
  Clone ID: MRT4577_149527C.1
tgggcctagcataggtatgagccagggatcctttcctggtccctaagatcaaaccccatggagcagccagcgttagatgcccccacccacctgtactctggagagactgtgctgggaacatgtaccactgagcctgagatggggatgagggcagagagaggggagccccctcttccactcagttgttcctactcagactgttgcactctaaacctagggaggttgaagaatgagacccttaggttttaacacgaatcctgacaccaccatctatagggtctcaacttggttatt

SEQ ID NO: 54305 - DNA, 622 bp, Zea mays
  Clone ID: MRT4577_149528C.1
gtcgtgctctcttcaccgaggatggcttgactgcgcgcaagtagcgggtcgttgcaaccgtcgctctctcctatggatatctacaccgtgcgctcatctaatccttgactcgcgttcccaaactcggccatgatttctgccataaaactgcgtgtcctcctcgtcatctcgtccgccgccattgccgagccgatagagagaaagagagcaagaaaggagggcgccgccgtgagcttaaccctgtcgtgccaccggagttcctgcgtggggtgtccctggggagctcatggttgtatgggccgaccaagcgctcgccggaggacagcttccgccgtggtacgtggtcgcgattgtctgcatcatagctatagcgcgaggtttcgaggatttgaagaatcaccttggtaactggaatctcaagtgtcaggagaagaacaggtggttcaagtggagccacatatcgaggagttcaattcgatctaggtggtgtctcccagttgacttgtgccaaggatgatccttagttcgtgttatatttatcctttatatttgtaagacttccgctatgtaataaatattctgattattgtgacatttatctctatacactctattattatag

SEQ ID NO: 54306 - DNA, 563 bp, Zea mays
  Clone ID: MRT4577_149529C.1
gggggggggggggttttttttttttttttttttttttttttttttttttttttttttttttttttttttttttttttttttttttttttgggagcggacccaaaagggggggcccccgggaaaaaaataattaaaaaaccagttcttaaaagggggggggggggacacccacaagccccgggtttcgagcaacggggcccgggggcccggcagggcgttttaatctggaacaatttcaaggggcacacccaaagccccgagccccgctagggctagggggccaaacaaaaccccaaaactagggttcaacagttcaaaaccggggaagaacaaaatattcataaaaaccatttagggctggtcccaaaacacaggggatcccggggatggggggccaaattagtcaattcccacccaatctctaggaatgggaaaggggattaaagtttcaaaaccaacccttagtatgaaaatacacacggggggcaaacacatggaaaaatcgccccagggctttttgggaaaccaaattcccccaagggattcccattttcccttgaaaa

SEQ ID NO: 54307 - DNA, 563 bp, Zea mays
  Clone ID: MRT4577_14952C.1
cctccaccggccacgaccttcctcggacccgacacggaaccccaagacatggatttcatgcccgtcggccgcggcggcgagaaaggcgtcctcgccgtggactgcgagggttgtgccgccctctactccgcctcatcgcagaccctgagcaccatccccacgctgcgcgctccaaaggtccagcccatctttttccccgtcggtgacagccgcctgtacgtcatggaccggaaacctcggcgagacccccgccgctgcttcgtggccctcatccgtgggcgcgaatccggcctccgctgtcggatggcatggcactggcgatctctccagccgcccccctacctgcccccgacccgctgggacgacgacgacgacgacgacgactctgacttgaacgatgacaggcaagccatggtagacgacgggtccaagtccagtatggtggtggagggcgagctgggcgacatagcggggcacacggtcgtgggcgactcgaagatctggatatccacggccggcgccggcacctacaccttcgacacgggcaggcccgtcgatggagg

SEQ ID NO: 54308 - DNA, 375 bp, Zea mays
  Clone ID: MRT4577_149530C.1
ggaaaccccgcggcgacccacgcgtccgggatgactgtgttcactatgctaagatgacttaagaaatcggagagcaagtgcggatgtttgtttatgaccttctcgtacaccaaccccactaggttatttaaggctatcaaggaaaaatcatgcaatgcccttatgcatcaaggttaaccaaattcgcatctattgactgatagttttgacgctattaatatttcaacattctaccatttgttgttttaattactatttatattaaatgtttattctgagatcactatcatttctgatcttgcatttttttttaccatcatatcacatattatatctgttttattatttatataaattctttttagacataattca

SEQ ID NO: 54309 - DNA, 760 bp, Zea mays
  Clone ID: MRT4577_149531C.1
gtttgtgtcgtggtagactgtctatatgcatccgtaatgaagttaacttgctcgaatcttagagcacgccggtaagcatgtacgccgtctgatccatgcatgtgtgtttgtgtgcgtgcagggaggtgatgcacgcgatgtggcggccgcagaagttcaaggcgatctacctgctggcgacgctgtacgtgctcaccctgacgctgccgtcggcgtcggcggcgtactgggcgttcggcgacgagctgctcacgcactccaacgcgctctcgctgctgccgcgcgacgcctggcgcgacgccgccgtcgtgctcatgctcatccaccagttcatcaccttcggcttcgcctgcaccccgctctacttcgtgtgggagaagctcatcggcctccacgactgccgcagcctctgcaagcgcgccgccgccaggctccccgtcgtcgtccccatctggttcctcgccatcatcttccccttcttcggccccatcaactccgccgtcggctcgctcctcgtcagcttcaccgtctacatcatccccgccatggcgcacatggtcaccttccgctcaccacagtcccgcgagaacgcggtggagcggccgccgcggttcgccggcggctggacgggggcgtacgtgatcaactccttcgtggtggcgtgggtgctcgtcgtcggcttcggcttcggcggctgggccagcatcaccaacttcgtgcagcaggtctccaccttcggcctcttcgccaagtgctacca

SEQ ID NO: 54310 - DNA, 821 bp, Zea mays
  unsure (1)..(821): unsure at all n locations
  Clone ID: MRT4577_149532C.1
aacctatcaccagtcaccaccattataaaccaacggccagctaggtagctaaagtgacctcctgcgagctagaaaagctcaccaagatcagtagtgctaagcgacaggcactgacccaagccggagcagcgaaagatggcgtccgagacgagcgtcgccgacgagaaggcgcccgccgggctgagccgctacgaggcggacgcggaggacgggcaagacggcggcggcggcgacggcaagtcccggctgtcgggcctgctgtggcacggcgggtcggcgtacgacgcgtggttcagctgcgcgtcgaaccaggtggcccaggtcctgctgacgctgccctactccttcgcgcagctgggcatggtgagcggcatcctgttccagctcttctacggcctcctgggcagctggaccgcctacctcatcagcatcctctacctcgagtaccgcacccgcaaggagaaggacaaggtcgacttccgcaaccacgtcatccagtggttcgaggtgctggacgggctgctgggccggcactggcggaacgtcggcctggccttcaactgcacgttcctgctgttcgggtcggtgatccagctcatcggctgcgccagcaacatctactacgtgaacgaccacctggacaagcgaacgtggacctacatcttcggcgcctgctgcgccaccaccgtcttcatcccctccttccacaactaccgcgtctggtccttcctcgggctcctcatgaccacctacaccgnctggtacatcgccgtcgccctcctcatgcacggncaggccgccggcgtcaagcactccggccc

SEQ ID NO: 54311 - DNA, 2183 bp, Zea mays
  Clone ID: MRT4577_149533C.1
tgccagcacacacaagcaggcaaagctctcgaccatcgctctgagggattaatggcggcgggaggaggcggcagcatcgccgacgagaaggcccccgttgctgaggctttcggcgggcacctggaggcggccgagatgacggaggcggaggaggaacacagcggcggcggcggcgtcaagtcccggctgtcgggtctgctgtggcacggcgggtcggcgtacgacgcgtggttcagctgcgcgtcgaaccaggtggcgcaggtgctgctgacgctgccctactcgttcgcgcagctggggatgctgagcggcgtgctgttccagctcttctacggcctgctgggcagctggacggcgtacctgatcagcatcctgtacctggagtaccgcacccgtcgggagcgcgagaaggccgcggacttccggaaccacgtgatccagtggttcgaggtgctggacgggctgctgggccggcactggcgcaacgccgggctggccttcaactgcaccttcctcctcttcggctccgtcatccagctcatcggctgcgccagcaacatctactacgtcaacgaccggctggacaagcggacgtggacctacgtcttcggcgcctgctgcgccaccaccgtcttcatcccctccttccacaactaccgcgtctggtccttcctgggcctcgtcatgaccacctacaccgcctggtacatggccgtcgcctcgctcgtccacggacaggtcgagggcgtccagcattcggggcccacaaggatcgtactctacttcaccggggcgaccaacatactctacacgttcgggggacacgcggtcacagtggagatcatgcacgcgatgtggcgtcctcagaagttcaaggccatctacctgctggcgacgctgtacgtgctgacgctgaccctcccttccgccgccgcctcctactgggcgttcggcgacgagctgctgacgcactccaacgcgctggcgctgctcccgcggacgcccttccgcgacgccgccgtggtgctcatgctcatccaccagttcatcaccttcggcttcgcctgcaccccgctctacttcgtctgggagaagctcatcggcctccacgactgccgcagcctctgcaagcgcgccgccgccaggctccccgtcgtcgtccccatctggttcctcgccatcatcttccccttcttcgggcccatcaactccgccgtcgggtcgctcctcgtcagcttcaccgtctatatcatcccggcgctcgcgcacatggtcaccttcaggtcgccgcagtcgagggagaacgccgtggagcggccgccgaggttcgccggagggtggacaggcgcttacgtcatcaactccttcgtggtggcgtgggtgctggtggtcggcttcggcttcgggggctgggccagcataaccaacttcgtgcagcaggtcaacaccttcggcctcttcgccaagtgctaccagtgcccgccgcatctcactgctgccccgccggcggccttcatgccgccgccgccaccaatggccgcggcgccctccatgccaccggcggcgacggcgttcaatgccaccggcctcttcttccctccgctgccagccccggttccggctccggctccgtcgccgatgatcaacttcttcctccgccaccaccaccgtgggcaccacggccgccacggcctgtgacgtcgtcgtcgacgcgctgtgcattgcatgcatggtcgctagcgctgcgcctctgtcacgtacggccgattactccctgtcgagtttgctccacagtagttttagctagttatatatcttggtcatcagcacgcagcaaaggtgcaagttaattagctactagcctgattagtaaaagttgtgtgtcgtcaaatgccctgttgtacgttcatcagataaaagagatcgaggtacgtacgtggatgagagtctggacgtacgtacgtacggtcataaggctaggtaactctgcctacatgatcgtcaggatacgtttggagtcccttgtcctgtaccgtgtccttgtgtgtagctgctttcgagaaagaagctgagcagaaaaagaaaaaaaaaagagaatggattgttgttacgttttcaaaaaaaaaaaaaaacacagaaaggaagcctataacaaatctgatgacaccatcacattgaatccg

SEQ ID NO: 54312 - DNA, 885 bp, Zea mays
  unsure (1)..(885): unsure at all n locations
  Clone ID: MRT4577_149534C.1
attgggtacctcgaggccggccgggaataaaacacgccgccaccatctccggcgatgtcgcgcttcgggcgctccgggcagccggagaaccgcgaatctttctccctcctcgtcctcaacgtctccttccgcactacggctgacgacctcttcccgctcttcgatcgctacggcaaggtcttagacatctacatcccgcgcgaccacaggactggggatccgcgagggttcgcgttcgtgaggtacaattacgaggatgaggcgcaggatgccattgacgggcttgatgggatgaggtttgatgggcgtgcgctcatggtgcagtttgccaaatacggacccaatgctgaaaagattcataggggtagaattacagaagaaaatccaaagccaaggggtcgttgcagaagccgcagtctaagacagaggtatcgagaggattattgggatagagactatagaaggcgaagccagagcagaagtagggagcgatatgaacaggccgggtacagagatggtgatcatcgtcgccataggactcacagtattagtcctgattatgacaggaaacgtaacagacacagggcacctcatgaaggaatacctagcaagcccagagatggccgcgctgcatgttctggaagcccttgaccctgagctgtggctgaatatcacacagcttctcctggacagcttgaggcatctaagcagntctcatcatttgtattttcttactaagatggcctttgttttagtccaggttgagtagactgagctttggcaaaaacacaatgtctgcttggttactgaatctacatggtggacatgatggnaatattgtgtggcacagcatttcacttccagtactgcgttttgtaacatcta

SEQ ID NO: 54313 - DNA, 1250 bp, Zea mays
  Clone ID: MRT4577_149535C.1
ctcgaggtcattggccgcctcgaggccggccgggccgggacgccgcaatcaaataaataaataaaaacacgccgccgccatcaatggcgatgtcgcgcttcgggcgctccgggcagccggagaaccgcgaatctttctccctcctcgtcctcaacgtctccttccgcactacggctgacgatctcttcccgctcttcgatcgctacggcaaggtcttagacatctacatcccgcgcgaccacaggactggggatccgcgagggttcgcgttcgtgaggtacaattacgaggatgaggcgcgggatgccattgacgggcttgatgggatgaggtttgatgggcgtgcgctcatggtgcagtttgccaaatacggacccaatgctgaaaagattcataggggtagaattacagaagaaaatccaaagccaaggggtcgttgcagaagccgcagtccaagacagaggtatcgagaggattatcgggatagagactatagaaggcgaagccagagcagaagtagggagcgatatgaacaggccgggtacagagatggtgatcatcgtcgccataggactcacagtatcagtcctgattatgacaggaaacgtaacagacacagtggctctcctgtacttaaacgccccagtcatagcagaagtcgttcgcctcgtagggcacctcatgaaggaatacctagcaagcccagagatggccgcgctgcatgttctggaagcccttgaccctgagctgtggctgaatatcacacagtttctcctggacagcttgaggcatctaaacagttctcatcatttgtattttcttactaagatggcctttgttttagtccaggatgagtagaccgagctttggcaaaaacaacaatgtctgcttggttactgaatctacatggtgacaatgatggaatattgtgtggcacagcattcaacttccagtactgcgctttgtaaacatctaagcctcatttgggaactatatgcatgttggatattgtcatttcttaacgtccagccaggtcgaatacatcgtcctcacaacttcggcagacatcatggaccacaaagagaccctccacaagagcgcaggacgcaaggatctaggtttcttctattgaagaagctgacaatctttgttatggactgcctgcctgtcttactctctcagactacagtacctgctattttactttaatatgtctctctcacaccagagcgccttcttttacttgcata

SEQ ID NO: 54314 - DNA, 1119 bp, Zea mays
  Clone ID: MRT4577_149536C.1
caggcgccccaccgaagccggacgcgtgggccgcgctctgcatctcctctccactcctgctatttagcgccggcctgcgcctcccactaccgaattcctctcacctccctgctcgaatccagcgctcacccgcgccgcgtcgagacatgtcgaagaaaatcgtggtgaagctggacctgcacgacaacaaggacaagcagaaggcgctgaaggccatctccgtgctcgtcggcatcgacgccgtgtcggtggacatggcggcgcacaagatgacggtgatcgggacggtggacccggtgcaggtggtgagcaagctgcgcagcaagtcgtgggcggcgcacatcgactccgtcgggccggccaaggagcccgagaagaaggaggagaagaaggacggcggcggcgagaagaaggacggcggcggtggcgagggcaagaaggaggaaggggacgggaagaaggacggcggcggcggtggcgacggcaagaaagacggcgagggcaagaaggaggacggcgacggcaagaagcaggacggcgagggcaagaaggaggatggcgatggcaagaaggacgacaagaaggacggcggcggcggcggcgcagaggagaagaagcccgccgccgcggtgcccccgattttgccgttcccgccgctgcaccagctgccgccgcagtacatgcacatgatcaccaacgactacatgagccagtaccaccaccgccccccgccgccgccgcccgtggcgtaccacccgtacgcggcgccgcccccgccgcccccgcagtactactacgtgcgcaacatgagcatggaggagaacccaaactcgtgcgccatctgctgaagcaatcgatcccggccgctttgtctctcgcgtcgcgcgcgcgaacgtgagtacgtacgtgtctcccggcccggcccggcccgtccatcagtccatgtgtacatccgtcgtcgtgttacgttattattacgatgagaagacagacgaatcaaactagctactcgtagcttttattattttgtgagtcaaaagtccaaaccgtatagctgccagttcgtgaatgaatctgtaactaatcctccgtggcaaaaaaatctctaatttctgtcct

SEQ ID NO: 54315 - DNA, 228 bp, Zea mays
  unsure (1)..(228): unsure at all n locations
  Clone ID: MRT4577_149537C.1
ctcatgcagaaatatgcccgtgatattcttcgtcgcgctgacatggagaattgcaagtcagtcccgactcccttatgcnttactgacaagctttctcgacatcatggcaacaagctaggtgacaaagacgcttttgtttaccgcagtatagttggggctcttcagtatcttactctcactcgacctgattatcttttgcggnaaataaagtatgtcaggttctcgctc

SEQ ID NO: 54316 - DNA, 244 bp, Zea mays
  Clone ID: MRT4577_149538C.1
aatggacaattgagcgagcaaattattgaggcactgttgcaattgtgtgctcgtcatgctggcattcagcactaaaaacttttcagaaacaaaattgtgaaacaagacaggtaatttcgacaagcatcagctaagagtatattataaggcgcgcctcgacatctaattcagaccttatagccggttaaggtgaatcctctggctgcaatctcgcctacgcagaaacatgcataaagctcaaccc

SEQ ID NO: 54317 - DNA, 141 bp, Zea mays
  Clone ID: MRT4577_149539C.1
cgagggacgcaaccacccctggtgtcagtggtttgttactatggccagcattaccattgtattgccttcaagtctggacgctgcgtcatgtatgatgaccagacattcaaggttatcggtagttgcggtgattcgctcgta

SEQ ID NO: 54318 - DNA, 604 bp, Zea mays
  Clone ID: MRT4577_14953C.1
agatttctcaaaacgcaacgacagcactgaagcccacttcctgtactcactgtgctagctgatcaaaccgtaataataacagaccatcaccaccaatggatcccactgctgcgctcttccttgccctgagcctcctgttagctgccacaccgcatggctgcgaacccaactgatctggaccagtcgtcccatcaccaccagtacgtgccaactcgccccaagcacatcttgcagcgctgcccgatcgacatcctctaggtcaaggagtgcgccaacgtgctaggactcgacaaggtccgactaccccagtacgagcaatgctgcccgctgctggaggctctggtggaactcgacaccatattgtgcctctgcaccggcataaagggcaacgaccgcgatatctacctcaaagtgccccttaacctctaattcatcctcaacaactgcggtaggatatgcccatagtacttcacttggcccaactaagctcgggatctcttgtgtgctccatctcgcggttctatttacgagcatgtcagcctcttgcaatattaacgaataagtttgtcagctacgatttcttacgctgtaccatcgacgattg

SEQ ID NO: 54319 - DNA, 841 bp, Zea mays
  Clone ID: MRT4577_149540C.1
atctttccatcgttcatcctttcttctccaacacccgtcgctctcttctccaactcgaagatgtcggccgccaccgccctgcttcatcgaggcccaagacccgatctctgtttttgataaagaaaccaaacaacaacctagcagtcttccttcacttctctgcttccgacctcgtagcgaatcagatcggggggctagggttccggtgcgcctccacaactggacgcgaggctaggctgggcatggagggaatcgtcacggcctgaaagaggtcccggccggagacgacgaacggggttgcagccgccgggaagcgctacaaaggtgaggcatcgctatcccactagtcctgtccgctatccgcctcgattgttttggttctacttgatgttggttgccctcgctccttgcgagaagtgtttcgtcgactggatttacgtgtgtaccatgggagcagagcgagagtgttctggttggtcatttgattatgcttatgcgcgcaatgagatgcacatccggggtgtttgtggtaggggactggtagtggggcctggagggttagagattttcttgcttgcttcaagtgatgcgtggattggtggaatgatagcttactgccaccaaaattgaaccccctctatacttaggatgttagtctgttactctcttaactttgattactcacttggaccttaaaggctagcgttgtatgtggcttgaagatggatcaaaagaatacaatgaaatctgaaggaatgtatcacagttatatctgctacctatgccgaagctatacacatttttttctagctactgataaaaaacttcaccagtgctaaca

SEQ ID NO: 54320 - DNA, 567 bp, Zea mays
  Clone ID: MRT4577_149541C.1
cctcgaggccggccggacaagaaaccattaatctcttcagtgtgaagaaaaagagcttagctagattcatggcgctgctcaagacaggctccaagagcactctggttgtcgccgtcgtatggctgctgatagcaacccttgctacggctgatggcgctactcaaaagaagctccaaggggcctgcgaaaaaatagtgaaaggcgcctgtagtgagaaggtctgtggcggaatgtgcgctatgataggctccaacgctgttgggtcatgcaaggtcgatggccgggtctcctactgctgctgccaacaaaaaacccccacacacatcggtgtccactagctgggatctagcttgctttttgatccagacgtatgattgttgaactttagtagggctgcaaacttgcaattggggggaaatcgtgatttttgtcgaagagttgccatagttaacatttgtaaaaatgtgtgtattacttggtctgattttcccccattcaatggggtttattcattgtcaaaagctgctgccacacggcctccccaaaaaaaaaaaaaaaaaagcggcc

SEQ ID NO: 54321 - DNA, 106 bp, Zea mays
  Clone ID: MRT4577_149542C.1
ctgacgcgtggggccaccacagcgtcttgatgttcgttttcagttcaagcaagcgaagagcaccccttgagatctattcctccccgtgccgccatggacgcagttg

SEQ ID NO: 54322 - DNA, 216 bp, Zea mays
  Clone ID: MRT4577_149543C.1
gccgacggcgtatccggacgcagggaggcatgttgacgccgcggccatcgacgtcgttgtggtcagccactgttagtgcgcagtcgggatgcgcccggaccttagcggcggccggtggacggccacggtgctgacggcccacgcggagcgttaggcgcccgcgctcgctgtgttactgaccatccgggagctcaggctgggctgcgcctattcgtt

SEQ ID NO: 54323 - DNA, 935 bp, Zea mays
  Clone ID: MRT4577_149544C.1
cattgggtacctcgaggccggccgggcgataatgtcatgcacaaggacaagactcatgacgaccccaccggccctcacagctcacataccgccagcactgctgaccctaccgtgcacaacacctccacaactcacactggctctactggccttactggcaacagccatagcactcatggcaccacaggctacagtgaccccactggcccccacgactctcacatggccaacaaggctgacccaagggtcgactctgaccgtgtcggtaccgccggcaacctgggatccaacacccacgccactcacggaaccactggtactcacggagtcactggcactcacggagtcactggcacccacggctcaaccggatacagcgaccctactggtcctcacgactcccgcatggccaacaaggctgacccaagggtcgactctgaccgtgtcggtaccgccggcaacctgggatccaacacccacgccactcacggaaccactggtacccacggagtcactggcacccatggtgtcactggcactcacggagtcactggcacccacggctcaaccggatacagcgaccctactggtcctcacgactcccgcatggccaacaagaccgaccctagggtcgagtccgaccgtgtcggtactgctggcaacatgggaactggtagccacacaaccggcagccatggacttactggcacccacggaaccactggcacccacggaaccactggcactcacggaaccactggcactcacggagtgactggaacccacggttcatccggatacagcgaccctactggtcctcacgactcccacatggccaacaagcttgaccccagggtcgactctgaccgtgttggcccgctggcaacaagggagtgccgcctatggaacccagaccggcactggcaacttggctc

SEQ ID NO: 54324 - DNA, 576 bp, Zea mays
  Clone ID: MRT4577_149545C.1
ggccaaaaaaattggattcctaagatacccccccccccatactttttgggcaccaaaaaaaaccctcccggtaaaattttgaaaccgccccccccaaaaaagacccccccccccccattgggcccccgaaaaaaatttcccccgggggggggaaatcaggggggggacccagggggctccccccaaaaaaaggggggtcaacttggcggggaaaatccatcactgggggggctgggcgggacaaagaaggtggcgccgttccctttaacacaaacaacttggaaaaccaagggggtaaaaaataattccccccccccggggcggaaatctaaagtctccccttttgggaggaggcccccccggggatcacaaaaaaaaaggtaaaaggtcccaaaccctgggggcaccttggaggtccccagctggggtccctggggggggcaggaaaaaaaaaaaattgggccccgcgaaattccccggggaaagaatcttcccccgccttggccctggtggtggaaaaaacactggcataaaatggatagggggtctcaaacatctctttcaaagggagccccc

SEQ ID NO: 54325 - DNA, 626 bp, Zea mays
  Clone ID: MRT4577_149546C.1
cctcgaggccggccgggccgggctcttttgaccatccattctgaacgggagaagacaccaagagggagaagagatgggtgcagaacggaaccacgaagcaatacaaacccgagagccacctggagaggaagagagtgttgttagcattcgggagccatccaccggaatccaccgctccttcggccaagcagcctacagaggagatccatggctggattgcccttcccgaacagcagacagtggcggcgcgggggacgacgacggaacgcagccaacctcgccggagccggacggcggggatgcgctcctacttcggatcccagctttcagcctcttcgacaaggacggcgacgacgagcaagccactgtggaaactgaggttcaacaagtagagatagctgagcaggagctcattgaaggagaagagcaggtggttcaggaggagccacaaggcgaggagtatgatctgatctaggtggcgtttctcagttgacattggcgccgacgatccttagtttgttttatatttatctttattttgtaataagtcttccgctatgtaataaatactctgatgatttatgacatttatctcaaaaaaaaaaaaaaaaaagggccctagggcc

SEQ ID NO: 54326 - DNA, 576 bp, Zea mays
  Clone ID: MRT4577_149547C.1
acgggactgggatgcgtccgtgttcaccgatttcgggccgatggttgtgcttgtgcataacagatataagaggccgcaggagaatgagacggcgagggctgagcttactaaggcaattgagatgttttgggaacacaatctgccgtcaccaaggtgtgtggctgtagatgcctgtgcggagcctgacctcgtggacgctctgaaagtttctggtttccctgagattctcttcaccaacgccgggaggataatacaccgtgagaaagttgtccggtcggcggaggcatggtcgaggatgatggcgttttttctactacaaagcagcgaggccaccgttcttgtgtgaagcagatgggaagggtcaagaaaaggtccctttgatgtcatgagcacaacctgaaggctttagctctgtagtagaaactaattttgtgcttctaagttcgaatcgatttttttagaaaggtccctttgatgtcattaggaagttttatgctgttaggacagagttggaacttgtaactgttacgagaacacattagccagcctcttttattacagcttgttatgcagtgt

SEQ ID NO: 54327 - DNA, 493 bp, Zea mays
  Clone ID: MRT4577_149548C.1
caatccacctacccgactactgacgaggctaggaaagcacatccctagccacgggcgcggctgcagaacactggggccaccacctacaaggattactccatcccacaccagaagtggctggcacaccgtatctcggctacgcgctctgctccacgatgagtctatggcctctctatccgcctaacgacgatgctgctactctcttgctccagaggctaccttgccacgaacacggtgaccactctcctgaggatgcacgccggcatgaagcatcaacatcctcatcctcacattaaatcccttactggctgcgaactgatgctgtgatatgttccaacagctaaagatagagtcaataacattctatcaacctgcatggcactctatgttgtttgcaactagaacataacacgaactgcaccaggtacgattgcgataacgaatatgatacggagaatcaaataagatgcagggccaagcaatctgctactat

SEQ ID NO: 54328 - DNA, 798 bp, Zea mays
  Clone ID: MRT4577_149549C.1
aatcccaaggatctcccacataacaggtttattacagaaatcacatttgatccacacacattggaaatagagcggaaaactttaacaaagtacactttacattccagaactcaagttttacatggtagaaagcgatgtatttattacaagtcctgatagtactcgaagggcataacttaactacaataattggaagggtgaagcctttccataagagatatatataaaaaccttctaagcttcaagtcctccacatgaagtaactaacccaaagataggggaataaaacttctccttactacaggaggaaatatgatatcttctattacgataagcagttagatggaatccaccactggatcagtagaactggaacaggctccttggtgtggcacttgacgacgaggacaaagatggcgcaagacggtgatagagcgagacgatgcgtgaactcgtagggattttctgctgcacgcctactatcaacagagcgtcacaacgaattgcgacacagcacagggagaagtttgcagggatccacggctggacccggaccggcttgctggcgtgagggcggatgacgacggtcggtgcggggccagtggacaacttggcgagcgcgactataggctatgttcagcgccgggagctcttgaccacagtgccgaggtgagggcgagccatgatgcgtgcacgacaaattttactagaggtcgagagatagattgcaagctcactgagccgaagaacacggcatcaggaagaagaaaggagaaggtttgcagcactttggataat

SEQ ID NO: 54329 - DNA, 420 bp, Zea mays
  Clone ID: MRT4577_14954C.1
aattcggcacgagggagagaactagacgcgagctatactaattctttgtattctttttgtttcttctgccagaatgtgtgttctctggtgtcgattgaccttcggagcattcaccggtcctctacctagaacggcgagctgtctcactagtatgcttcaaggaatcttgctgtggttgccaccctatgctgttcatctacttctgaacgacgcacgctgaccggagaggcggcgctaaagcctgacaacaccgcctattccgtgtcgacctggcaccgctcacagacgtccctatgcgccgcggaaccaccaacaaggcactgcagcattgctacaccaccccgggccttctactgatgacaggctgccctgccgccaatgatctactcccggggcgtgagcaaccttgcgtgccccaca

SEQ ID NO: 54330 - DNA, 471 bp, Zea mays
  Clone ID: MRT4577_149550C.1
gtacaacgcgcccctaatctccaaccccaacccaacggtacccagtaccccctctccgtgtctctctgcacttctgcagactgacggtgtccggccatggccgcgcgcccacgagctcgtggacgccgaacctcgtcatggagctcctcatagaggccgccgcggcactggtcgccatggtgagaggcggaaagtgtgcccgacgacgaggggaactggcacagaggaggagctgggcagggccgtggttaggcatggcggccgggcctacctgggctatacgaaagaaaacatcctttgcacatacacctaacatggcgtaaaataactggaaccaattaaggtagtgctataacgagaaccttataaagtatacagatgatgcactaaacaacacaaatgtgagaaaactggtctacatagtctgtcaacatacatgattagctaatctaaatctgacaacaactacca

SEQ ID NO: 54331 - DNA, 868 bp, Zea mays
  Clone ID: MRT4577_149551C.1
aaaaacatgaccaaaactgttagcaaacagtcaatcatcagctcaagcttagtgcatcttatttttgggaaacagaaacgactgcttgttaggttatcatgtctcagttatacaggactgcgcctccgcacatataactcactatcgaaaacaaaccgcaatgcatcagtctggcaacacacgcaacatgttaaaacgcaacgctctaactgttgtatgcctgggaccctctcagcgctcaaggtaaaggctcaactgaatccgagcagcatactctgcatcgagtgagggcacaagcacgcgaaacttggcttgtgacagcacaagagccaccctaaccagggagtacaggagggctcagtacgtgtgctgatgctgccagctcggatgagatggctgagacggtgtgacctggaagccgttcaggctgccctcagcaaggttctgggggtgctcctgtccctgagactggtagacagttgggtacccatggcctccaaattgggaaggctgtggctgctgcgcccgagcaaagccacccagctgactctgtccctggtaaccatagaagtggttaggcggaagcgtcgaggccgctcttgaaccagagccatgaacccacattccagagttgtcgccctgctggagagccatgtattgactggtgtttttgtactgtctgctcaatgcttcatcaaacccaagagctgatgcagtgccggtactctgattaagggtaaaatttccttgtatattgcttgagcttccaaagcctccataaccagagatgactgatgaaggtggttgcgcggacgcgtgggcggacgcgtgggcggacgcgtgggcggacgcgtgggcggacgcgggg

SEQ ID NO: 54332 - DNA, 354 bp, Zea mays
  Clone ID: MRT4577_149552C.1
ggggaagtctcaaattttactcaccgtacccaaaatggaacccaaaaaagtgccgggcaggagattcttaggtctgatcaagacggacgattcggcagggcgcatgcatgaacgacaaggcgtacggcccccaggagctcatcgccaagcacaagaagatattggaagggcgtctaccgcatcctaagaatacagaatgcccatactggaagggtcaggatccaagaaggaggcccaccaccctgatttggggaaaaacgtatgacgccctggcatttatagaagcctgggggggcacgtataccacgcaagaacgggcaccctggattcatggatgacagagccagccgcact

SEQ ID NO: 54333 - DNA, 304 bp, Zea mays
  Clone ID: MRT4577_149553C.1
cctcctctgtatagggggagaaaatctcgcctggcatgcacgcgatcaagggcttgggcgtctaccaggcctcccggtcgatggcagaagaccagaagctgggtcgctgcggacggcttgcgctgcatgagcgacctgatggtgcactacctgaagcagcaccggatcatactatgttgtgatgcctgatagggtccatatagctccccgtgagcctgatagccaacgacgatgacatctttgaagacttaggtaacaccgccgtggacaatctcatgacaagttccatcagcggacctgggct

SEQ ID NO: 54334 - DNA, 207 bp, Zea mays
  Clone ID: MRT4577_149554C.1
gcacgagccggagccatggccgactccttgacgaatgtctctacgcgttcttacaaggcgaatcagtctccatggatgggcactgggcggcccgttgcgaacagagagaccgtagtgggcgagcgagccgctcgagcacgtcggcaagacgggaggggggctgtacggaaggaatggtaccggcaggcggggcgcccgcccgatggc

SEQ ID NO: 54335 - DNA, 3478 bp, Zea mays
  Clone ID: MRT4577_149555C.1
ccggccgggaccgctctcgattcacaaatacgtacgtacatgtacaaaactatagtgagctgtgtgtgtgtgtgttcgtcatttcctcgatcatgagcgaatgtgcaggcgatgggtggccggcgaggttcatgatggaggcgccgccgccgcacgtgatgtcggtcatgcggcggatgatggtgcctaggatgctgagtaccatctccgatgacgacagggagatgctggcgctgtgcgggtcaccgttcggaccacggccactcgcttgctcaggtgtcggcgaggttcatgacggatgtggcgtcgccgcaggtgtcgtcgttcatgcctggaaggaatgcttcgagtagcctgtacaccatcgccgaggacgacaggtatcagctgcaggcatccgccgctgttttggaattaggccgccggacgccgttgcgtgggagagagcaaagtgaaccaggccgaaaccgaagctaccgccacgcccaccacccccgcccactgcagcaacgccggaccctcgtctccctgtccccgactaccaggaggggatcccggcggcgaggatgagcggcggcggtgccggagggaagggggcggcggcgcccgtcccggccgggtcgaggaaactggtgcagcgtctcaaggagatcgtgaaccgacccgaggcggagatctacgccgcactgcgcgagtgcggcatggaccccgacgaggcggtcagccgcctcctctcccaagatactttccaagaggtaaagagcaagcgcgacaagaagaaagagattaaagaagttcctgagacaagatatcgatcggcaaatagttctactaatcgaagccttagaagtggtgcagatcgtggtggacgtagcaattctgtgcactccagctctactgataacatgacctcaaggccaccagtctcagggtcttgtacggcatcagttaattccaatcaaatgcagacaattgcaagttcctctgcaaacaaacatatggttactgatggactagctgtatcattgcaatcatcgtctgggtttcagcatggtggttggtctgggacacctggtcagttgtcgatggttgacattgtgaaaatgggccgccctcagggaaaggcttctagcaaacctgtggtcacagctgacagaggttatgctggacagtacccatctttgccaagcacaaaccagaacctcaaacaatctggaagcatggtttccccagcagagcttgacaaggggttacaacctgcccaaaatttggttcaggttaagaatcatggtcattttactgctgatagcaagctcccatatggtactgactggtctccacaagacggcccaacatctgagaaccaatcttcccagcctgagccgtctggtgatccatctttgtatgaatcatcatttcagtcatctacattggttactgatgtagttaattcacatgaaaattcacacttggagttggatgaaaacaacacctttgcaatgagatcaacacctgcctctgagagacacttggaacctagtgacagtattcctgaatacaatgatggaatattgaacaactcaagttcatatcagcctcataattactcttacacagaacaagatgttgaggattccagtgctgatgtatcagcagcagcagaaaatttccagagtttaagcctacataatgatgagttagctgcaaaaaagactgctgaagataaccctgcagtgataattcctgatcatttgcaagttaccaatacagaatgtgttagtttgagctttggcagttttggatctggtgcattttctgggctactcccacaaaataccactgatagcaatgtggaattccttgttcgagaggattctgcaacagtagatccaatagatgccaggaatcaagattactatgaaagtggtgcagtaacttcaccagcagaagaaaatcttgaggccatgctaggaactaacatggagaatgtcgatgcaccttctgtttcacaggctaatgagctcagccaggacgtacttgatccttctgaacttaaatatgacgtgccatcagtttcaagtcatgcttattcgaacatgaacactccacaacctagcaaaatagaggacccacaaggaaacaaccaagcacatactctttcccatttgtcaaacatgatgcaagcaaatcctttgagcactagcagcctattggggtcaaatcaaaatcatccatctcttcatggcttagagtttgatttgccttatcttgaagcaaaatataacgcaggctcgactacaaatcctagaccagccatatccatgcaggaggccctgaaagcaggggttttctccaacgctcggtctacgcagtctcttccaagtactagcattccgacggggcatcctctccctcagcaattagcacatcacccttactctcagccgactttagcacccatcacacattttccaaatatcgttggctatccgccgtatttgccacaaaactatgctgcttacctatcttcgggcaccttccagcaagcatacccgagcaatggagcattccatcagtctgctgccgctttgctcggatctggtatgaagtactcggccccagagtataagaacaacctgtctgccacaggcttacaacagcaacatcagccacaaccgcaaccaccttcatcagtcatctctggttatggaggctttggaagctcaagcaatatacaaggaaattttacccttaatcagagtaccggcactggatcaactcttgtgtttgatgatgcattgggcagacagtacaaagacaccagtcaacacatagctctccagcagcccgacaactctggaatgtggcttcatggctctggttcaagagcggcgacgcttccgcctaaccacttttatggttaccagggacagagtcagctgggtggctttggtcaggcgcagcagcaacagccttcccaattcggaggccacgggtacccgactttctaccagtctcagggtgggctgacacaggagcaccacccccagaaccttgctgagggcagcctgaatggcttccaggtcgcaccgtctcagccgtctcatccgagctggcagcatcagcacacctactgagcattgttctcccttgttatggtctgtctctttcgccgtcacaagccaagtttcgcgtgcttgtgcccttactcgatgcagagtaagctgctcggattttagctgagcttgtaccttcagcgctgagaagggtcccaggcatacaacagtcagagcgttttaacatgctgcgtgcgtgcgtgtgtgtgttgccagaccgatgccttgtggtttttcgatagcgagttatatgtgtggaggcgcagtcatgtattactgagacatgataacataacaaccaatcgtttcgcttgcatttttttggtcatgcacacatgcggttatcgcttcaggaaggggca

SEQ ID NO: 54336 - DNA, 240 bp, Zea mays
  Clone ID: MRT4577_149556C.1
ccatattctaaggcacttgttaccactactgatgccattgactaccattaactcatctatgcaattctgattgaagcaacaatggttctccaacttgctatctgtgccgaccctaatgctacagcaactattcacctcaccgatttatcccagccatatgctacttattatcccacgatttatgccacatctgacaataattccaattccaaaaattaagccatctataataatacccac

SEQ ID NO: 54337 - DNA, 572 bp, Zea mays
  unsure (1)..(572): unsure at all n locations
  Clone ID: MRT4577_149557C.1
cgactgcaaccactacttcaacaactcgcaggctttccgcgccagcatgtgcttcatgctggacccacgcgacggccggaacacggctttcgtccagttcccgcagcgcttcgacggcgtggacccgacggaccggtacgcgaaccacaaccgcgtcttcttcgacggcaccatgctctccctcaacggcctgcaggggccttcctacctcggcaccggaaccatgtttcgccgtgccgcgctgtacggcatggagccaccgcggtggagagcggctggcagcgtcaaggtgatagacgacgacnacnacnagggcaaggagtacggcagatcgacattgttcataaacgcagtactagacgacgccncgaaccaagaacgatctatcacgccagtgtccctcgatgacgacnagacgacnacngtgagcagcgaggtggcgtcgctgatgacgtgcgcttacgaggacgggacaacatgggggagagacgtcgggtgggtgtacaacatcgcgacggangacgtggtgaccgggttccgcatgcaccggcagggctggcgctccatatact

SEQ ID NO: 54338 - DNA, 183 bp, Zea mays
  Clone ID: MRT4577_149558C.1
gcgtacctgtgtagtcaccggcaagtggtgccttgacgggcattgcccagccgtggagagcaagaactccgacaccagagattaagactgcatgatcgtgtccaactcgctggtgatggacgtcgtgaacaccggggatagatccgggatcacgctgctcaactccaagttcttccacagtac

SEQ ID NO: 54339 - DNA, 559 bp, Zea mays
  Clone ID: MRT4577_149559C.1
ctacatccctcggttcgtggctcgggagaaggcgtgggagtggttcgactacctcgacaacgccatcccctggacacgccccgaaatccgcgtctttggccgctctgccatccagcctagagatgtgtgctatgttgcagatgaagggttgacagatttgagatatagtggccatcagcatcttccacattcttgggatgaattccccgtgctcaaggacatcttgaaagtggtccatgaagcccttcccgggagctattttaacagcttgctcctgaacagatacaagacaggttcagactacgtttcatggcatgcagacgatgagcccctctacgggccgactccagagatagcatctgttacctttgggtgtgaacgtgacttcttacttcggaagaagcctaccaaatcgcaagccacttctggatctggagaagctggtcgaaagcggctcaaggtcgatgcacctcagaagccacatcattttcttctgaagcatggctcgctgcttgtgatgagaggctacacccagcgggactggcagcactcggttccg

SEQ ID NO: 54340 - DNA, 493 bp, Zea mays
  Clone ID: MRT4577_14955C.1
gggggaaaattaaaaccttttttttttttcaaaagggattacaaaaaaacccccttttttggcagggggggggggtttattttttaaaaaaaacaattttttctaagcataccatttaaaaggtgggggggggaaattttaaaaaatttttttttttttttgaccggggggggaacatttttttttttttgccgggttgccaaaaaaaaaggtttccccttgcccaaggggattggtttcctttgacccatttttaatcaaacttgtccggagcatgccttttaaactggagggttttttggaacccctgtacatggttttccaaaataatttgataaccctggccccctgaaatttttcactccaaagcaagcctcttgaaaaattgaaaaaacctgggtgctgtttatttccccatgggtggagtttccaaatgggccactggggggcccaaagcttgaaaacttgatgctgttgaaaaccgggctttttt

SEQ ID NO: 54341 - DNA, 202 bp, Zea mays
  Clone ID: MRT4577_149560C.1
acccacgcgttcggtcaagtgtgagcctggacatggttttcctgcacgtttcccaggctgcctgggggaatcaaagaagtggcggccttaagttgtaaagttgtgacagaacttgtattggaacctcttatcgaaaagggcggggatacaacatcgatctgtgtttcaataaagagttggagctgccacacacatcgtaaac

SEQ ID NO: 54342 - DNA, 285 bp, Zea mays
  Clone ID: MRT4577_149561C.1
ctgggatctctatagagcgcgcgccctttattgtttgttttttttgggggaaaaaacaaagcgagcgccattgggtaaaacgctgacattgggcgcaggtacatattcacaaacatgcagctgcactgtatagcctatgccaacgtatctagcgctataacccgaatgccttacacacgaatggcgagcataagttgaattcgtccaaaagagacatagtcgatcctgtaagttagagctcataggcagatcttatagggtcaacgaactatatgatgggtactg

SEQ ID NO: 54343 - DNA, 634 bp, Zea mays
  Clone ID: MRT4577_149562C.1
cggccagggttcccagccgccgcgccctccgttgtccttcctttcttcccagccggcgctttccatctccagtccgagctccttttcccttcccatggccacgcgcccctggttttcccagcacgcagccgcgcccctgctctgctcgtcggggacgcaggtccctgacggtgctcagctccagttcggattggtccatgccacgcgtgcgcgtctccctctgcgcatctctctctgctcgctcgcgatcagcggagctcgatccctgctgcgcgctgagtcctatgccgctccctccttgctcgttcctctctcaagctcgcggtcgccttgctcgcgccccgctcttgctccagcctatcccgcgccttccctgtcctctgcacacgcgcagttcgccccaactctcgtccgtagtggttgccagtcgtcgatcctgctcggattccatctcaccagcgcctgctcctagtcgacgcttgctcgaattcgtgtctctacgcccagcctgctcgtcgtggacgcgggccgctgcccatgtccagctcccgtgccgaatcctttttcagctcgcccgtgatgcccggcgtcctgcctgctctgctcgcgcggctttcggcttgccagcatgccc

SEQ ID NO: 54344 - DNA, 539 bp, Zea mays
  Clone ID: MRT4577_149563C.1
acgcatcaagaatttaatactgttactatgttttggctataatgttgctgaaacaaatctctgatgcaggattgaagacagcttgagtttatcagacctcaggttagagaaacctatggtttactggccaagttacatgttaaacatttttttggattataaaaaatcatatcaatatttttgtaactcgtcaagaatttaacactgttaccatgttttggctataacattgctgaaacatatctctgatacaagattgaagacatcttgggtttatcagatctcagattagagaaacctgtggtttattggccaagctacatgttaaacatttttttggattataaaaaaattgtatcaatatttttgtaacgcatcaagaatttaacactgttactatgttttggctataacgttgctgaaacaaatctctgatgcaagattgaagatagcttgagtttatcagacctcaggttagagaaacctgtggtttattggccaagctacatggattataaaaatggtgtcaatatttttcg

SEQ ID NO: 54345 - DNA, 110 bp, Zea mays
  Clone ID: MRT4577_149564C.1
tctaacaaagaaatacctaccctaaccggcggcgacgatcgtatacctgggcggtgcctctaccgaagacaaggtcacgtactagggcatagcaaccggatatacttttt

SEQ ID NO: 54346 - DNA, 1027 bp, Zea mays
  Clone ID: MRT4577_149565C.1
cacgcgtccgcccacgcgtccgcgagggccgcgacgacggcgcgctcaccgacgacgagctggtgacgctctgcgcggagctgtggaatggcggcaccgacaccacggccaccgcgatcgagtggggcatggcgcgcatcgtggacagcccgtccatccaggcacggctccacgaggaggtcatgcagcaggtcggcgacgcgcggccggtcgacgacaaggacaccgacgccatgccgtacctccaggccttcgtgaaggagctgctccggaagcacccgcccacgtacttctcgctcacccacgccgctgtgcagccgggatgcaagctcgccggctacgacgtgcccgtggacgcgaacctggacatcttcctcccgaccatctccgaggacccaaagctgtgggaccggccgacggagttcgacccggacaggttcgtgtccggcggcgagacggcggacatgacggggtcggcggggatccggatgatcccgttcggcgcggggcggaggatctgccctgggcttgccatggggacgacgcacatcgccctgatggtggcgcggatggtgcaggcgttcgagtggcgcgcgcacccgtcgcagccgcagctggacttcaaggacaaggtggagttcacggtggtgatggatcggccgctgctggccgcagtgaagccgcgaaacctcgcgttctgatcggacgggcggacggacgcgcgcatgcatggctacagtgtgcgcgtgtcaggtagcgtggcagtacgacatcgctcgtacgtgtgctctgcacgcccagctgcaccacgcatcgccgtttggccatgcatgcatgcatgctagccgcccatgagttgtggatgccactactgtcgtgtactcgtgtctgtatgatgtaacatacacggaaatgctagacgtcgtttgcatgtgtgtgtggatgtgtacgtactacgtatataagaatgaactcttttgtgtaaaaaaaaaaaaaaaaaaaaaaaaaaaaaaaaaaaaaagcggcc

SEQ ID NO: 54347 - DNA, 336 bp, Zea mays
  unsure (1)..(336): unsure at all n locations
  Clone ID: MRT4577_149566C.1
ttgcgactacttcgagggcgtcncctgcgacacccgcggcagggtcgggaccatgtcgctccaggggaaggggctcgccggcgccgtccctcccgcggacgccatgctcccggccctcaccggcctctaccttcactacaacgccctgcgcggggagataccgcgcgagctcgccgcccttaccggcctcgccgagctctacctcggcgttaacaacctctccggccccgtccccgccaagctgggccgtctcggtagccttcaagtgctttagctcggctacaatcaggtcacagggagcatttcaacccagctgggtcagctaaacaagctcac

SEQ ID NO: 54348 - DNA, 2418 bp, Zea mays
  Clone ID: MRT4577_149567C.1
gggaaaaaatcctaacatttactcgaacaaacatttatatttgggcattgtatggtcaaatgggacggggctgaattccaatttctttgggggttatctatccttgtgctgttccattcctgccaatcaatgaagaataattctttgaagatcaaccttgactttaaacaagacaaaaactttggggaatttattgttcatggacttgatgacaaaagaccgggtgatcaggtcttacgcgtgctttcgtccctcacaacagaagtctttttcagcaataattttatttcagtggatatttgccagcaactcctccaggcacttacatatgcagattgttcaagcgctcctatcatccacctattcacccagattatcagattctgccctgacaatttttttgaggttgaagcctttgtcttctctgcaatagagttattgtctcagtatctgggtctgatacttcaatgtagggatgggagttctcagaataattcaagtaacactttgatttctgagttgtctattgcaagcgagacgatggcttatcggatcaaaggagagtatttgtggaagctggtgatgttagtggtatctacttcacaccaatcatttcaacaagtgtcggctaatttatgcttctcaaatattatatgcttcctccaaaatatcttccctttcatgaggaaaatttttagagaaagagtcgaatcagatggtgagtgcacaagtcctaaagttgtctttggtgctatggttggcctagtgggatacttctatgtagagtgtgataaaaagatctcattgctcgaaaacaagatttctgattcctacaagctgttgaataagatactacttttttgcttgggagaagccactgctcttgcaaaacttgttcctgagatcatttatcgaagtgaaaatgtaagtaacaatgatgtgctcctttggggcagcttcaggctgtgcgtacaggttattcaaggttcatttcgtagtaccaacatacaggtgcacatgctgggtctgcaagtactgagaagctatgcacagaaggagctaactgaaggttcagaaacaaagttggattcttttatgatgttgcttacggaattgttgggagacttgtttttggtgatggagactacattgaaggaatgttcaaacaaaaaatctgtcagtgtcgttgatgaatgtttgaaacttcttttcctcttccacacactagcacaatcaaagaaataccgacaagatgctacaactcttctgctggaggccttgctgatggttttctctctgtccagtgatactgtttcacaggagcttgctgaagtgaacaccatttccagaaagttgttctctcattttattcagattccgtctgtggctatacagatcaaagacataatgctttctgcaccagctgaaaggagactacagcttcaggacatggtccgagcttcagtcagtcaagggcagataacggtgccagtggctacgagtgcacactcagaacagaatattcaggatagttgcagtaaaaaccctgggtccacatctgaagcttctgattgtgttgcaactcacgggaataatgacaatgaagttgttgatgatgactgggatgacgattgggatgctttccaatctcttcctgcaattgcaaatgatggtgttgattctggagaaatctctcttacaactaggtacaatgaacagatccctcaagaaaatagcagttacggttcttgtaatgcggatattacagctcgtgctatggaagacataacttgtgtggacaaggaacttgaggagccctctgatttgcaattctcaagtactgaacaacagcctaaacatgatttaccagggtcatcccacgaaggttgtgctaaacttgaaagacatccatctgttgattgcaaagagcaattagctgatgatgagacagcagatgaactgcagcagcaggttcatgaagacactgatcatgtaaataaagatagcgaagttctctctgcagaaattcatggggttaaattggatatccttgatgaagatgttgaagatgattccccaatgaattcaaacaatctatcagatatcgcagaggaagagtcctagggttggtacaatgcaacgagggtggaccgcaagcttgtcgagatagtagagaagagctgtccggttcctctgatgctggcataccagattttagtatgtcaggacacgtgatgagcaagagcggaggaaatgagcaaaatgttattttgcctgtatcaatatatattgcacgagataaaaataatataaggttacaaccatgatttttatttaaaaaaaaaaaaaaaaaaaacaaaagcaaaaaaaaaaaaaaaaagggggggcgaagaggaagtgggggtttgtgagcggggt

SEQ ID NO: 54349 - DNA, 129 bp, Zea mays
  unsure (1)..(129): unsure at all n locations
  Clone ID: MRT4577_149568C.1
gggtggaacgggctgtttatttattttttatcngattggncctttaagtctagttgggaaccattttttaangagtgttggatccttnttttgnagaatggaattatggggggggatgatttaagttga

SEQ ID NO: 54350 - DNA, 231 bp, Zea mays
  Clone ID: MRT4577_149569C.1
ggcaagcaagctgacaggttttgtttaaacgtaactacaggatgagaaagttttcaataaggaacaaattctgttatgccaccaggaattacccctattgagagaaaattctcaaaataaaaaaaaaaaaaaaaaaaaaaaaaaaaaaaaaaaataaaaacaaaaaaaaaaaaaaaaaaaaaaaaaaaaaaaaagggcagcctaaaaaaaaaggggcggcctatttaaagg

SEQ ID NO: 54351 - DNA, 1044 bp, Zea mays
  Clone ID: MRT4577_14956C.1
gggtccctcgaggcctcgagggcggccgggaggcccaaacggcgaaaccctccctcaccggccagtcggcaacccaagcgcccgccgctctcctccagccctcgccggacgtccacgcgcgagctcgtcgttggtgtcgtttctaccgtcaggttcccatctcgcttccccacccgctcctttctcccccgccctcgcctcctcctgcggcgacagcttccctagcccccttcttaagaatcttctagacgcggaccgaaggacccggccgccagccgcagcatccgttggtgaaggcgaagtaggcaggctcgggttctaggggcgaccttgctggcccggtatggaccagaggaaggccatcttccgcgcgaagctccgcgagacgaaggagaagcaacagcggcgcatcgaccccgcgctcgtcaggtataacgaatttgaccagcccatatgcagagtatgcaatattacactgaagtctgaagcactttggcctgcacaccaagtgtcacggaagcatcatgaagcaaaagccgccgctgctgataaggctacaacacttacagggtctagaggcagcaatgcaaagctagagcaaccattggagcctcaggaacgaaaatcatccacactacctaccaagttttttgataatcagggagctaaaaggaaaagtgatgatactatatctgagggaaggtctgtgcgccatgaagttgctgttattcaaccgaagaccataggagcaagcactgataaatcatctgttcggatggatcaaatgtcaaagaaagggagtcaaagcaacaccagtgtccaaggaatccttccagggaatttttttgactatggagaagatgaagctccagctccagctccagctccaaaagagcttagtacatctcaaattcacactaaggtgaaaggtgtccctgatggcttctttgatcacaataaatctagcagtggcatgcaacccaatgaaccaagttcagaagctgctcagtaataggatcgttgcctgaagggtttctttgatac

SEQ ID NO: 54352 - DNA, 349 bp, Zea mays
  Clone ID: MRT4577_149570C.1
cccactcgttcgcccactcgtgcgctagaccagctaaagcctaggatgtacttgggtccaggctatattgacttgcctgagaagcttagaaactctaatcgctcagatcagaccgaagctgacattacatgtcactgcatggtaatgtataatctatctattgcactgctttggaattgcatcattgtatgcatcttccaagatgttcacttcatgacttcggatggaaacagtacggttcacactatatggacaggtgaaatcgacttgatgacacgataactgaatgcaacttcacggcatagcagaactgtcatatgatgttactggagtacgatctaatagatcc

SEQ ID NO: 54353 - DNA, 1832 bp, Zea mays
  Clone ID: MRT4577_149571C.1
caggccggggttccgtccgctccacgcctcgtcgtacgttctgtctgtctttctcgccccctctcgctctccgacggctggtcggccgccgccgccgtaagccgccaggtgctgaggctttcgttggtctcttcgccggggacgagcacccactagtgattcctgaacagtttgttttagatggcaaatgaagagaagttgttcaagatgggaaatgcagatacagatactgctgcactgcacaatgaatgggatgatgctctctgtccgatatgcatggaccatccacacaatgctgtccttctgttgtgcagctcccatgacaaaggatgccgatcctatatatgtgatacaagctataggcattcaaattgcttagacaggttcaagaaaatgaaagtgaatgatggggacagtccttcacagtcaagctcatccatgcctaggggtacaagaaaccaaaatgttgtccacagatctcgttttggtcttactagagagagccgcagactacacatagacatatctgaacccgatgaagcttccgatcatcaagatgccagccacagacctgctgccatagttggagaacaggaagaaaacagctacaatgaaggcccagatttgacattggaaactcacgaggttgggatcaatggttcttcagtgtcaagcgacgtgtcaagcttaaatcaattgttgtgcccactgtgcagaggggtggttagtggctggaagatcatcaaagaagctagacagtatttggatgggaaatccagagcttgctcacgagaagcctgcatgttttctggtaactacagggagatccgtagacatgccagaagggtgcaccccacaacaaggcctgctgatgttgatccatcaagacgtcgtgcgtggcaccacctggagcatcagcgggattatgctgacatagtaagcgcaataaggtccgctatgcctggggcagttgtgcttggtgattatgctattgaaggcggagaaatattttcacatgaccgggaaaccagtgaaccaagtgggtctcttctgacaacattctttctatttcatatgctcagcagtagtccgattagatcaggtgatgagccaagaggcacatcaaggggcctgagaaggcagaggagacgctatctgtggggagagaatttgttaggtctccaatatgatgatgatgatgacgacgacgataacgaaggggaggaggatgaagtggatgctgtggatgaagttcagagaccaaggagtcgccggaggttcataagatcaagatcagaggagcgggcctaatacattggtacggtggtacctgtggtaattacattctgtactgctgtgaagttctattaccatgaactcatgatgactccttgcatgatctttgcatgccagtggagatgtggatgatgtgcttccttgcttggttaaaatgctgtgcgcatccctgcaatcaaagaccaaaaggcaaatggacctcaagttcaagtttagatgatttggatgcgtctgacaccatccatgtgccctctttaatctgacgatcataagaaacactcattcttagggcaaagctggactgctctcagaccagaactgacatggaagctagcgtttggagatgctcgctccatcacaacagctggtgccgtcactcattcaccatgcctttttacctttgcactgcgtgtcatctgcatctgtagtatattctttccgtattacgtctcattgagtccatgctgctactgttctggttgatatccttgttcaaaggctataaaatttattatattttcatgtgatgatgttgt

SEQ ID NO: 54354 - DNA, 1496 bp, Zea mays
  Clone ID: MRT4577_149572C.1
gggatttttagggaaataatggaggtgctgtaagtacccttccgtctgtctctccctcactcccttcgcgacgactacgcccggtgctcttcttcggccccaggtagctttcgctgccgtcctacggcaggtgcccaagtcttcttcgggcccttcaacgacgacgagcactaccagtttgttgaagatggaaaataaagagttgttcaagatgggaagtgcagatacagatactgctgcactgcacaaggagtgggatgatgttctctgtccgatatgcatggaccatccgcacaatgctgtccttctgttgtgcagctcccatgacaaaggatgccgatcctatatatgtgatacaagctataggcattcaaattgcctagataggttcaagaaaatgaaagtgaatgatgaggacagtccttcacagtcaagctcgtccatgcctaggggtacaggaaaccaaaatgttgtccagagatctcgttttggtcccactagagagagccccaggctacacatagacatatctgtacccgatgaaacttccgatcatcaagatgccagccacagacctgctgccatagttggagaacaggaagaaaacatctacaatgaaggcccagatttgacattggaaactcacgaggttgggatcaatggttcttcagtgtcaagcgacgtgtcaagcttaaatcaattgttgtgcccactgtgcagaggggtggttagtggctggaagatcatcaaagaagctagacagtatttggatgggaaatccagagcttgctcacgagaagcctgcatgttttctggtaactacagggagatccgtagacatgccagaagggtgcaccccacaacaaggcctgctgatgttgatccatcaagacgtcgtgcgtggcaccacctggagcatcagcgggattatgctgacatagtaagcgcaataaggtccgctatgcctggggcagttgtgcttggtgattatgctattgaaggcggagaaatatttccacatctccacaatgtattaggcccgctcctctgatcttgatcttgatgaacctccgatgactccttggttgacagtggatgatgtgcttccttgcattcttaaaatgctgcgcacatccttgcaatcaaagacctaaaggcttgtggacctcaagttcaagtttagatgactcaaatgtgtttaacaccatccatgagaccctcttgaatccgacacttacggggaacgctcgttcttatggcaaagctggactgatctcagcacaattacacaagtgatactagaagctagcttttggagatgctcgctccatcacagttggtgctgtcgctgggacaccatgtctttttaccttatgcactgtgtgtcatctgcatttgttgtatattcttcacatattacattccattgagttcatgctgctactattctggttcatatccttgttcagttgaagcattgcagttgcgtttttttc

SEQ ID NO: 54355 - DNA, 3305 bp, Zea mays
  Clone ID: MRT4577_149573C.1
gtgcagcaggaaacgcaaaccggccaccccgcccgcactcgccgccccatctcttccgctcccgtcctctccgatccatccacgacgcgggaaccagcctccgaacagcagcttcccgccgccggcccccaagcctctgcgggcgtggttgcgtctccgcggtggcgccaccggagcggctcttgcgtccgagaggcgccctcgtgcgcgcgattttggccagatccgaccagcaatatttgtcgattctgaacaagcaccgtttgatgggcccggcaaaaggttctcgaacaattaacaagaccacagtaaaaggatatgaagatcaacagcagcatgatgacccatctagttcaagcaaagctaaacagaaaaagaggaaaatttcagatttagatcccaaatggagcaaggatgaacttacacgcttttatgaagcctaccgtcaacatgggaaggattggaaaaagatcagcatagcgataggcggtaagtcgtcggacatggtgcggtctctttacagtgcacatcggactttcttatctcttccagaacatcaagctactgccatggggtttatcgcgctggtgactggtcatcacaatgcttcggagaaaaccacgagtcatagaggatatgatcacatagccagagcatctggaaaggcaaggaaacatggagaacaacagaaatcaattgatggacctgacctgcacaactgtcatgaaggggaaattactggattttcagcttccttcaaaaaacgatactatggcgaattggtcaggaacagccgaaatcatgctgttcagaggcgtactcctcttataccagttatagctcctgcagacaggagtaccattgatgagcccacaccaggaattgaaaacgtcatcaattttaattctaccaagagaaaatatgaagcggccaatcatggctgtgctgttgctccaacaaataagtactcttcggacagagtttctggattcgctgaaacatacaaggctgatcaaggccatagttacttggataccatggaaattggggacatagcgatgtgtcaacaacattttaagaaaacacgaattcagcaaactgtggaggaaagtcagactggtatagttgagcatgaaacaacgatggcatctaaagaagggaataagctagtctcttctgtaaacaacaatcagatacttatcgacagtatttctgaagatgatatgttggtcttggatgtattgaatagcctggtgaatgcaccctctaaaatgtcagaactagagattaatattccttcaggttcgcttggaaaaactgactctgtgttaagggaggaaggccaccctaccattgatctgtctaaacaagggaagccagttcgtaaatccagtgcttccaagactaggaagaaaaaacctaagaagatattaggtgcagaggtgcctgctgaagcacaaaaaaaatgtgacgataatttagtcctgccggaaacactgagggttggtatcactgatgattcttccttgtgtactgactctggaagagcgaggacaccggaagcatctgaagatatttctgctgaagtccccaatacacaaacagaagccaagcctgaatttataatgtctggaaggaccaggttgaaatctcagatgcattgcaaaacaaagcctatgtcgtgcaatgaaggttcagataattttcaggcaaagaagttgctgcactgtttgtcatctgaaccacttcgtagatggtgcacatatgagtggttctacagtgcagttgattatccatggttttcaaataatgagtttgtgcactacttagatcatgcaaaattgagtcatctttcaaggttgactagatcagaatggagcgcgattcgaagctcccttggtaaaccgcggcgattttcaaatcattttctggcagtggaaaaagaaaaacttgaggattatcgggagaaagttagaaaaatctacgctcaactcaatgatggttcacgggattctctacctgcagacctagctaggccattttcaattggtcagcaggttattgttcgtcatccaagttctagggaactttgtgatggcaaagtggtgatgatggggccggattgttacaaggtccattttgatgatcctgaccttggtgttgatactgtgaaggacactgattgtatgccagttaattggctgcataatcgtcctgacaacatgagaaggaactacctttcaaatgatgtgtacaacatactggagatggatcacattcctgaccttacaccaagtgagaacgggaatcatgctataaatggaactactgtattcgaggagctcaaaagtctgcgcttaacatcagatagacagcctaaggcagaatctattatacatagtgaacggccaccatataggagtacatctgatggccctacaagttctagtggtttctcttgcccagacaataatgctggtcacaacggtgaactagagtcatatgtagctgcattttttgaaaactcactatcacaagccaggcagatggttgacgattatatccaggcaaactctggtggtagtgatgatgaaaaggtatgcatgttaaatcaagtgacaggatgtctaggctcagattctcgtggcgtgcaacttccatctgacctgatatcaaactgcatcgcaacggttatttcaatcaagcgccttagcgactcgcgacatccatttggtaacgtagcaggcgtcttggagcatgctttatcaatgctgcgtccaagctgtccacagaacctcggagtttacacagaaataaagagagacctttgcaccatagcgaaccagatttttgcacttgtgccaacagcatcgggcaattgcagccctcctgtctcgcccatgtaactgggacctgccccggatagacccgttgccttcttgcaggccctgcagtagacacgctgcttcctctgctgtgagttcaaaacagaggttttgctgctgttgggagcttgatgttatgaagtccggttgaatggtagcatacggaggacgcaagtctgatgtgctgacttgagcttgtatatgcagcgtgcgatcattaattggctagcctccttgtaacctgtgtatatacctgaatgaataatttataggtccatatacagattcaggatagttaatatctgatatagtagtgaataaagatgtatttctgcagtcatgattctcgtcttatcgatatagtatggcaggaacgtttcttgataggaaatttacataataatattaggatagtgagct

SEQ ID NO: 54356 - DNA, 342 bp, Zea mays
  Clone ID: MRT4577_149574C.1
gggggggaaagggcctttttcccctaaaaaaccgaaaaatgccccctggcctcggagggggggcccccccccccccactgaagataaattgtttggggcaggactcctccgacaaacacttccgatgataatgggctttaccgggcaaacccccaacaaggctggcggcccccagctttaactaacagggggattcacaggggtttccctcccggagcggggtcccgtttttgacctcttgggccccctggacaagggttggcccttttattccttcctttccgggtgcccggagctgggaaatagcccccccggggggggggggggcgaacttggaggggg

SEQ ID NO: 54357 - DNA, 545 bp, Zea mays
  unsure (1)..(545): unsure at all n locations
  Clone ID: MRT4577_149575C.1
caccagacctcatctcactccgttaccccctcatcctgccatgcaccagaagcagtgcaagcatatggcgcgccgtgccagcctgctcctcgccgcggcgctgctcgtcgccgtcgctgccgcgggggcgccgccgacgcgcgagcgcatcgagtgcccggcgtacgacgtggtggaccgcgccaacgcctttgaggggcgggggcacacgtactccatgtgngccagctgggcgccgctcccgcgcactacctgacgggcgagcacccgcaccacttccgttctgccacccgggtgctgtcagggtgatgccggagaccttcgccgagaaccgagagctggaggtcatccactcccggtgggccatgctgggcgcgtcgcactgcgggctcccggagctgctcgcccgtaacggtgcctggttcggcgaggccgtgtggctcaaggcccgttcgcatctcttcagcgcgggggactggactacctcggntccccgggcctggtccacgcgcagggtttgctctgcttgtggccgtggcaggcgg

SEQ ID NO: 54358 - DNA, 250 bp, Zea mays
  Clone ID: MRT4577_149576C.1
ctctaacgatgtctatggtgtttcagtttgctgagcctgactcactagtgtgactcagaagacggtgcaatgcagtcatcatgttagtggcctgtgagcaaggcatactgctcttgagcatttcaaagaaaggtcaacagagcctccattcttggatctgcaacttggtctctgtaagaggtcttctttaaatccaggacccaggataggaaaagggtttccctgacagtttacaggaaacctgcaggaa

SEQ ID NO: 54359 - DNA, 632 bp, Zea mays
  Clone ID: MRT4577_149577C.1
agaacacacataccgtcgacgctgctgttattgatgctggaacaacagccagacacgacaagtatgagatatttgttgaaacactgaagggaacacatcgccatcaaaggacatatgagtaccaccatcgacgatgtctaggccaagatctatcacaacgaacggatcccgccgtatgatgagcctgtgatatttcgcggtaaactactagatcatgcccatgaccttgcaggactataaaataccgacggacgctacactccacctcgagctcttgctccaaggtggcatcgttcaagcatcgctacctcacgttcttcgaatgaacaaccatcacaagatgagctgtccgaaatgatatgcacgagttgatgctaggggtgacgattgacgaaacaacaagtgtggtaccagcgactagatgaggaggcccacacaacagaaacaactgacgagctgcttctagtcggattgatggaccatgcagtttgtgtgccgaaacgggaatcgtttacgagctgtattatagcttggataatgtaccgagtttgctgtaacgagcatattgcgcttatgttatcgttgtaccatgctgtccgatgaattactatatgacgacaacctctatgcta

SEQ ID NO: 54360 - DNA, 3906 bp, Zea mays
  Clone ID: MRT4577_149578C.1
atgagtgatgaaacaaaaaatgaattgaagaaacgtcgtgcgtcacacaacaaagaaaatgttgtacaccatgagtattcaaaagtgttagatccaaaggaacgtaagagaatccgagaaagagctcgatgtgcaactcaaactaaggaacaaaggacgttgcgtaatatgaaaccatttcaaaagagagcaagggaaaactatagaataagacaacaagttatgctaagtaaggactcaatcgccattgagaaccctacttttaccccggagcttgtgtggagttcaacagatgctgaagcacctactgggtctctatttagctccgagctcatggctattcctgaattgatcccaacaccatttgttcctactccatcggtgactgaggatgttgagacaaagaaactgacaaagtctcctagacgacaaagacatctgtgtacagtccctgccacaaatagtgacaaaatgaccgaaggagtagacgttgggaagcagcacttgacatcttcgactattaccaccaatgaggatgctgatgagactgtactttttaaaaaagatgatgatgacgaagaaggatacctattcgctgggcaagatggtgaatctggtgaggatattgagattgatgaaacccaagatgcctttactgtcaaccctgacgtacctgacttgtacgacaaggtgtatagtaacatacctaaagaaacacatttgctgagcactgttgctgactgcgattactgcaaagcgaagaagtttcagtatgaaccacctggattttgttgtcgtaatggacagattaatttagccgcattcgagacaccgctccagcttaggaggctgtgggagttttcagatgctgatgcgaggcactttcgtgataacattcgattttttaacggccatttctcgttcacttctatgtactgttgtcttgacagtatgactacaaacatggattgtggtatctatacgtttcgtgcacatggcatgatgtaccacaacgtaaggtcgttcggtagggaagttggggcggaacataaacaccttgaactctacttctacgatgatgatcccagcctcgagcatagatatcgtaaatgtcgtcaacaacaatttgagaaagacaaggtagttattaaacaattggttgaaatacttaagggaaatccatactctgagcaccttaggagtatggggcacgttgataacattgaagactaccacatcgccttgaaccttgatcaaacgctgaaccagaagttatataattcacccattacttcggaggtagctgcaatttggattgaggggagtgaacgtcgaggtcaattcagtaatagtgttatgctacatgggaaggataggtcaagccacggcatccgttcatatcatggatgctatgatgcactatcatatccattgttcttccctaaaggtgaacttggatggcatgccaatattcctaagtccaatgtttccatggacgaagtagacgcgtaccgcgatcaacataggagaagtgatgcaaacaatgatgatacagaacgacctagccatctatgcgtgtctgtacctgactattactgctacagattccaaatttgtccaagtatattcaatccaatacttcatgggaagcagcttttccaacagttcgcggttgacacctacatcaagattgagagctctcgtttggatttcatatgtaaaaaccaagacagattaagggcggatctatacaagggtttggtagatagcttgcatgaaggcgagaacagagcagacaaaattggaaagcgaaccgtgctgtctacatcatttatcggtggtcctcgtgacatgagacgtcggtatatggatgctatggcccttgatcgtccggaccttgttgttcgcatattccatgcaaaactagaggaactgaagaagagattgactaagcatcatattcttggaaaaatccgagcttatgtctatgtcatggagttccagaagcgaggtttgcctcatgtccatttcctactcatcatgcagagaaagtacaagctaacttgtcctgatcagtatgatcaccttatctccgctgagatccctgacaagaagaagtaccctgaactatacaagatggttatcaagcatatgatgcatggaccgtgcgggttgctaaatcctaaatgcccatgcactaagggtcgtgcttcatgcgaaaaccattatcctagagcttttagcaatgcaacgtctcaaggaaaggattcatatcctatttataggcgtcgtgatgatgggcgtaaggaaacggttcgaggttgtgaattggacaacagatgggtcgtcccttacaacccttacctcctccggctcttcaactgtcacatcaatgttgaggcgtgtgggagcatcaaggctgtcaaatacttgttcaaatacatatacaaaggccacgatcgtgcgtctgtggctgtgacagacgcaaacaaggctgatggtgacgttgatgagatcaagcagtatagagatgctaggtgggtgacccctctagaagccctttggaggatattcagctttgatctaagtcaaaactctccaccagtgatgcaactgcagctccatcttgaaaacatgcatatggtgtcatttcacgagcgtgctaaagtaaatcatgttgtccaacgtccaggtgccgataggtcaatgcttacggcatattttgaggcaaatgggctacacaaagaggctcggggcatcctttaccgtgattttcctgagtggtacactttgcagcagggcaaggtgtggcaaaggaggaaacgaaacacgggtggacaggttggtagaatagtctctgctcatccagctgagggggagcgcttttatcttcgacttctcttaaaccatgtgacgggtgctacctcctatgcggatctaaggacagtagatggtgacacactaccaacttttcgtgaggcagcacaaaggaggggactgcttgaagcagacgacacaatagatgagtgtctcaacgaagccgctatttaccaaatgccgtcagcactacgaaggttgtttgcaacaatattggtatactgcgagccgaacgatgtggcagaattatggcagagacaccttgactcaatgtcagaggactatcactgtagtactcaaagcaaaatccatgtgcagcagatggtcttgattgacattagaaacattttgcagtcaatgggtaaagacataaagacattccctctccctgctatcattgatagatatgacgatttacatggtactgatagagagatttatgaggaggaaagtatagtgccgacgacagaagacgttgctctgaaagaaaccctaaacgaggagcagagatctgcttatgataagatcctatctgtcgttgacaccaataacggtggagtgttctttgtggatgggcctggtgggactggaaagacctatctgtataaggcattgcttgcagcactacgcagtcaggacaagattgcagttgcaacagctacatctggtgttgcggcttctatattgcctggggggaggactgcccattcgcgcttcaagataccacttactattgatgatggtgcttttaaaaggaagcagtttccgataagactaagttttgccatgacagttaacaagtcccagggccagacgattcctaatgttggtgtgtacttgccggaaccagtgttctctcatggtcaactttatgttgctctatcaagggccaccgctcgatcgaaagtgaagatacttgccattccagtccacgatgagaagaagaagaagggggttgaaaggaactcagcgataaatggcgcaacatacacaaagaatatcgtttataaggaggtccttacgtcgtaa

SEQ ID NO: 54361 - DNA, 318 bp, Zea mays
  Clone ID: MRT4577_149579C.1
aggatgggacatgcggggcaatttggttggttcaaggaaagtgaatcgcacggattgtctgcacggcgatttggtgtgtagttcagacaccactcaccaggttaggagtttccttcgtccaagaatactataccccaagtggctccatccggggcaaataacaaacgcatcccttacacctgaacatcctggtctaccactgtccatggcctacctttgcctagagtagcgctaggccgacccccacacaccataccagcctaaatacagccaacgccttcgacccaaggccggacgtgctggggtatgacgagaacg

SEQ ID NO: 54362 - DNA, 475 bp, Zea mays
  Clone ID: MRT4577_14957C.1
gtcaaaagtcctgtgcagcatgttgcgtttagcccaaaggactccaatatgttcgccagtgcccaggacaaaacagtaaagatatgggattggcattctggtaactgcaagtctacattgtctgggcattcagatttggtgttatgtctggattacttcagtcagggtgatcagctatacttgatcactggttcacgagacaaaactgccaagatatgggattgcaagacgaggagttgtgttcggacattggaagggcatacagatgttgttaatgttgcatgttgccatccagatcttctaatactaattacaggttcattgaacgggtcagttcgtctgtgggatttgaatcgctcaactacgttccgatatgacctcttcgacatgaactacatgttcctgcaggtggtgactgcaccgactgctaccgcactggcggggagagactcgatgtcctgtgctgactactact

SEQ ID NO: 54363 - DNA, 5316 bp, Zea mays
  Clone ID: MRT4577_149580C.1
atggatccgttcaacaataacgatgttcgacctccattaagagaattgtctagcaacacccttgaagatgattgtccagatgtggctataggcgacggaagcatcattgattgtactataccgtgtggtatcactctaggatataactggttaggtggatgtgatgatgcgagacaacgtaagagggaaagagaaagagcacgatacgccacgatgagtgatgaaaagaaaaatgaattgaagaggcgtcgtcagtcaagcaaaaatgaaaatgttgtgcaccatgagcgttcaaaaggcgcatcagctcagacgggtcatcaacatgattccaatccaagttcagaagttttagatgcaagggaacgtaagagaattcgagaacagattcgatttgcaactctaacaagggaacaaagggcattgcgtaatactacaccatgtcaaaagagtgcaagggaaaactatagtagaagacaacaagcaatgctagctcaagactcgatcgcaattgagaatccgaagtttacgccggagcttgtgtggagttcagcagattctcaacctcctactgtgtctctatctagctccaaggacatggttatctctgagttgagtgcaacaccttttgtttatgcttcattgcagactaaggatgttgacatggacaaaatgacacagtctcctagaagacagcggcatgagcatcatgtgtcgtctggtgaaagacagagcctgatatctcgtcaaaaccagaaatttcaatctgccattagaagaaactttgctactgcaactagggatcacggaatggaaggcgaaagtacaagcccatgtccagtcactgctccacatagtgacataatgactgaaggagcagacgttgggatgcaacgacagataaccccgaatgtcaccaccaatgatgccgatgaaggtgtgctctttgtagagaatcatgacgaggatgtactttttgaagatgatgacgaagaagatggatacctattcgctgggcaagatggtgaatctattgaggatatcgagattgatgaaacccaagatgcctttactgtcaaccctgacgtacctgacttgtacgacaaggtgtatagtaacatacctgaagaaacacatttgctgagcactgttgctgactgcggttactgcaaagcgaagaagtttcagtatgaaccacctggattttgttgtcgtaatggacagattgatctagccccgtttgagacaccaccccaacttaggaggctgtgggagtgttcagatgctgatgcgaggcacttccgtgataacattcgattttttaacggccatttctcattcacttctctgtattgttgccttgatagtatgactacaaacatggattgtggtatctacacgttccgtgcacatggcatgatgtaccacaacgtaaggtcgttcggtagggaagttggggcggaacataaacaccttgaactctacttctacgatgatgatcccagcctcgagcatagatatcgtaaatgtcgtcaagagcaatttgagaaagacaaggcagttattaaacagttggttgaaatacttaagggaaacccatactctgagcaccttaggagtatggggaacgttgataacattgaagactaccatatcgccttgaaccttgaccaaacgctgaaccagaagttatataatgtacccatcacttcggaggtcgctgcagtttggattgaggggagtgaacgtcgaggtcaattcagtaatagtgttatgctgcatgggaaggataggtcaagccacggcatccgttcatatcatggatgctatgatgcactatcatatccattgttcttccccaaaggtgaacttggatggcatgccaatattcctaagtccaatgtttccatggatgaagtagacgcgtaccgcgatcaacataggagaagtgatgcaaacaatgatgatacagaacgacctagccatctatgcgtgtctgtacgtgactattactgctacagattccaaattcgtccaagtatattcaatccaatacttcatgggaagcggcttttccaacagtttgcggttgacacctacatcaagattgagagctctcatttggatttcatacgtaaaaaccaagacagattaagggcagatctatacaagggtttggtagatagcttgcatgaaggcgagaacagagcagacaaaattggaaagcgaaccgtgctgtctacatcatttatcggtggtcctcgtgacatgagacgtcggtatatggatgctatggcccttgtgcggaagtttgggaagccagacatattcctcactatgacgtgcaatcccaattgggatgaaataaccagagagcttctccctatgcagtcaccacaggatcgtccggaccttgttgttcgcatattccgtgcaaaactagaggaattgaagaagagattgactaagcatcatattcttggaaaaatccgagcttatgtatatgtcgtggagttccagaagcgaggtttgcctcatgtccatttcctactcatcatgcagagaaagtacaagctaacttgtcctgatcagtatgatcaccttatctccgctgagatccctgacaagaagaagtaccctgaactatacaagatggttatcaagcatatgatgcatggaccgtgcgggttgctaaatcctaaatgcccatgcactaagggtcgtgcttcatgcaaaaaccattatcctagagcttttagcaatgcaacgtctcaaggaaaggattcatatcctatttataggcgtcgtgatgatgggcgtaaggaaacggttcgaggttgtgaattggacaacagatgggtcgtcccttacaacccttacctcctccggctcttcaactgtcacatcaatgttgaggcatgcgggagcatcaaggctgtcaaatacttgttcaaatacatatacaaaggccacgatcgtgcgtctgtggctgtgacagacgcaaacaaggctgatggtgacgttgatgagatcaagcagtatagagatgctaggtgggtgacccctccagaagccctttggaggatattcagctttgatctaagtcaaaactctcctccagtgatgcaactgcagctccatcttgaaaacatgcatatggtgtcatttcacgagcgtgctaaagtaaatcatgttgtccaacgtccaggtgccgataggtcaatgcttacggcatattttgaggcaaataggctacacgaggaggctcggggcatcctttaccgtgattttcctgagtggtacactttgcagcaaggcaaagtgtggcaaaggaggaaacgaaacacgggtggacaggttggtagaatagtctctgctcatccagctgagggggagcgcttttatcttcgacttctcttaaaccatgtgacgggtgctacctcctatgcggatctaaggacagtagatggtgagacactaccatcttttcgtgaggcagcacaaaggaggggactgcttgaagcagacgacacaatagatgagtgtctcaacgaagccgctatttaccaaatgccgtcagcactacgaaggttgtttgcaacaatactggtatactgcgagccgaacgatgtggcagaattatggcagagacaccttgactcaatgtcagaggactatcaccgtagtactcaaagcaaaacccatgtgcaacagatggtcttgattgacattagaaacattttgcagtcaatgggtaaagacataaagacattccctctccctgctatcattgacaaatatgacgaatcacatggtactgatagagagatttacgaggaggaaagtatcgagccgacagcagaagacgttgctatgaaagaaaccctaaatgaggagcagaggtttgcctatgataagatcctatctgtcgttgacaccaataacggtggagtgttctttgtggatgggcctggtgggactggaaagacctatctgtataaggcattgcttgcggcactacgcagtcaggacaagattgcagttgcaacagctacatctggtgttgcggcttccatattgcctggggggaggactgcccattcacgcttcaagataccacttactattgatgatggtgctgtatgtagcttcacgaaacaaagcgggacagcaaagttgctacaaaaagcatcgctcattatctgggacgaggcatcaatgactaagagacaagcaattgaggcgctagacaatagcatgcgtgatataatgggacggcctgggctgccctttggtgggaggactgttgtgttcgggggtgatttcagacaagtactccctgttgtacgcaaggggtcaagggctcagatagttgctgcctctctacggagttcttacctctgggaatccatgtgccacctaaagcttgttcaaaacatgagggcacagagcgacccatggtttgcagaatatttgttgcgcgtcggtggtggaactgaggaagcgaacaacgatggtgatgttcgtcttccagatgaggtatgtgtgccatatactggtaatgactgcgaccttgatagactgatagatgacatttaccccaatctaaatgcaaacatgtctaacacaagctacatcacttcaagagcaatattgtctacacggaatgactgggtggatatgataaatatgaggatgatcgatcgtttccaaggggagcagatgatgtaccatagttttgacaccgcggtggatgatcctaataactattacccatcggagtttctaaacacgctgactcctaatggactacccccgcacgttctgaagctcaaagttggatgcccaatcatgttgcttaggaatatagaccctgctaatggactttgcaatggcacgaggttggtggttcgtggtttccaaaaaaacagtattgatgctgaaattgtccttggccaacatgctggaatgcgaattttcttgcctcgtatacccctgtgcccctctgatgatgagatgttccctttccagtttaaaaggaagcagtttccgataagactaagttttgccatgacagttaacaaggcccagggccagacgattcctaatgttggtgtgtacttgccggaaccagtgttctctcatggtcaactttatgttgctctatcaagggccaccgctcgatcaaaagtgaagatacttgccattccagtccacgatgagaagaagaagaagaagggggttgaaaggaactcagcgataaatggcgcaacatacacaaagaatatcgtttataaggagcttcctattgtttag

SEQ ID NO: 54364 - DNA, 217 bp, Zea mays
  Clone ID: MRT4577_149581C.1
ctgccctcacagccacagcaccagcacgaccccgacgtgcggcgcggcggctgcggcggcatcgccgcaacttccggcgcacttctcctccgcgtcctccgcgggccacagccatggcggctgcggcagctgggccaagtgcgtgtgctcgcccgcgacccacgccgggtcgatcaagtgccggctccaccgcatcaactcccagggccactgccac

SEQ ID NO: 54365 - DNA, 311 bp, Zea mays
  Clone ID: MRT4577_149582C.1
ctccacttctcgctactgccatgaccatgaaccacgctggccatccaggaccaaatcatgagactttctcacggcaccacctattttgttcaccacaaaacagtaagccaaggtgtaatcttagcttcaggccacgagccgaaagggtaagcggtcagaataatggaagccaagtgctgagcgcaccggcggggatgtccctcaaagaagcatgttcccccctgacttcgtctttggtgcctccacttcagcataccaaattgaaggtggatggaatgaagatggaaaggggccaagctcatgggattact

SEQ ID NO: 54366 - DNA, 318 bp, Zea mays
  Clone ID: MRT4577_149583C.1
ttggggggttttttttattttgggccgttttgaacccccaaaagcgcggtgaaaactcacaactggggaacactaccacagggtcacagggaattggagggatgccaacgcccacaaacccttttgtcaccgctggaaacccaaaggacttgagcctggcggccgcctagaccttcacaggctacacctaccaacctggaggtggacgacgcggttgtaaccaaccagatccaggggaagggcccgtccttatactccccccacgaagaggcgggggcggtttgaggcgaaatccgaggttacccacccctgcatgcc

SEQ ID NO: 54367 - DNA, 395 bp, Zea mays
  Clone ID: MRT4577_149584C.1
cattgggtacctcgaggccggccgggacagccgttcgattcactaaccaccaggtccgccatcgagacaatccgatacaatggccatcaagcacaaccagcagattcagaagaatcacttccacaaggactggcaacgctacgtccgcgtgcacttcgaccagcctggcaagaagaagtccagacgcaatgctcgtgttgccaaggctgcgaaggtcgcccccaggcctgttgacaagctgaggcccgttgtccgctgcccaaccatcaagtacaaccgccgtgtccgccccggccgtggattgtctcttgatgagttgaaggctgccggtatcccccccaagtacgctcgcgccatcgggctatctgctctccccagccgccccaggcctttcc

SEQ ID NO: 54368 - DNA, 280 bp, Zea mays
  Clone ID: MRT4577_149585C.1
cacgcttgagccacgccttcgctgtcgcatgagatgagcatcactatgatttcactaatggaatacaatggggtacaatcgtacagtatcttacgagaggtgaagtaggtgataaggttcttattggacatatggtagaaaattgtggaaatctcagtggactaaatgcatcaactgcattgacggatattattgacatcatctatcagacgacaggattgtcaggatgatgactaagttcatctttttgacttgaatgacaaagaatggagcagtgctc

SEQ ID NO: 54369 - DNA, 2131 bp, Zea mays
  Clone ID: MRT4577_149586C.1
gggtaccctccgggttcggccgggccgggccattcccacacttgggtacacacgacacgaaccatgcaactcagctgcggagggaggaaccctatcggaacactgagcaggtgacgggggcgcgctaccggtcacgggggatacggcggcatcgccccctcctccatccccggcgcggcggcgccagcagacggactgcatggacggtctacagtctccagaatccatattcacgagcttgtacaggtttggaatcggcgctgtccgtcttcagtcttctggccagggcaaattaaagctacaatgcaggctgcctactatgcaaaggatcttttggtttgaagtccagttgaccgaagttggaaaatacttctgatacttacagatttcacagaggcagcgattcgcacataatttaattggttcttcattgtgattacaattatgttctgtccactgagtttacgtattgcatttcttgctttaggtcttgtttattttctactattttccttcaagcacgtggaatagtacgtttgacaaacaatttgctgacgaggttttcgaacacggctgaacacgcgcgcaaggcgtgcacagtacacgcgcgcagggggaggaggagaacaagaggatggtgaaggcaaggcccaagccaacgccggtcaaggcggccccagaagtgatcttcgacccaatggcctctggtgcccggaagcccctccgcccaggggcgccgtcagccagcaaagaatggcacagcttcatgggatcgagtctgtcggatatgtatcggaagccagttttggagaaatctgctgacacatctgatgaggagcctgacattgatatcatgaagctgctgaaagatgttgagatcattggtgcccctacatttaaggggcgaaagcaaatcgagaaccgcagagtagttgagttgggtggaaagtccgttaagaagcaccgcacaccattaagtgttgcgaagccagctctgaagaatcagaagaaacgagaacagaagaaaatggaagaggaaaaactacttgggatctttaggaagagggacaaggacaccaaacctcacaagacaaggccagaggaccgagtgcttagggccacagaagggcgctttaggaacggtatactgaacgtcaagcatcttctggcgccaccgaaaccatcaggcaaggacatgtcggaaccgaagatgaggaaggacaagcacaaggggaagggtaagcagaaggggggcagaaggaagagacgttgaagaaagcacacttctgtaacctggtttgctattaagaatttaagatagatggttgatgaaacgtttaaatgacaacacctttttgtgtccgtcctgaaattaagacgtttccttgctctgctggaatctttgaagtgatccttgaaacgatgtaattctccaccttgaaacgaaacgatgtaattctccaggatgcggttcaggaagaggcttatttggttcaattttatatgcccttcgatccctgggcatatttgtttttgtaaaaaaatgcagaatatgtaaaatcctagggctatttgtcaatggttactaaatcagggcgcctcgaggccggccgggagtaccagttttgttgagtcgtcaactgttcagccacaatatatttcttggatatccggtgtttgttcggtatatcccctgccggaagggattgaaggggattggtgttgtttaactcaattacctgcagtccacaccaaactgaacaaggctatatgtatagattttctttgcttttgtttggaacaaaattttgcatggttgttagcaattgcgaaaaaattgttctcgattgatgtgtgtattcttatttgctgtgagattgtggcatagtcagtgtgtagttcctgatgatgagctgggtgtagtcaaaggttctcaatctgtagtagtcatgtttgaaactgaagtaaaggtgggtggcgtatgaatttattcattcagctattccctctgtcccagaatagttgatgttttagggttgtacatatgaatttataagtataaaaatgatgtggcgcattgaaaacaaggagaaatacagatatattgaaaaaaaaaaaaaaaaaagcggcc

SEQ ID NO: 54370 - DNA, 468 bp, Zea mays
  Clone ID: MRT4577_149587C.1
tttgaccatgaaggggcacattcattacgatgggatgcttatatatacaggaatgtatgagataatatagcactgatgatattggggtaacacgtgcacttgaatctggtgttggtcttgggaaactcagtggaagggatgcagagatatctaagctggtagaggttggcatatgatattagtgacgaggaatttgaaaattactttatgcgctacaaagaggtgggagataagagaaagcgtgtaactgatgaggacataaaatctttattgtcagatgggtgttccagacgtaggttatttgtgtcccttgctggtgttctggtcgactgtggatcacttggcttatctacggcggctgcgaaactgatacgttcagatgtgggaggcagtatgccctgtgggctctggatcggtccaggtggagcatcttacgcggttggggcgctactcctgcagattcggacc

SEQ ID NO: 54371 - DNA, 1217 bp, Zea mays
  Clone ID: MRT4577_149588C.1
attgcgcaaccagctgcggagggaggaaccctagcggaacactgtgcaggtgacggcggcgcgctaccggtcacgggggatacggcggcatcgtcccctcctccatccccggcgcggcggcgccagcagccggcctgcagggacggtctccagtctccagaatccagattcagagcttgtccctgttttgtggtgtgctctgttgtactgtagcctgtagccagggcaaattaaagctacaatgcaggctgcctactatgcaaaggatcttttggtttgaagtccagttgaccgaagttggaaaatacttctgatacttacagatttcacagaggtcttgtttattttctactattttccttcaagcacgtggaatagtacgtttgacaaacaatttgctgacgagcacaggttttcgaacacggctgaacacgcgcgcaaggcgtgcacagtacacgcgcgcagggggaggaggagaacaagaggatggtgaaggcaaggcccaagccaacgccggtcaaggcggccccagaagtgatcttcgacccaatggcctctggtgcccggaagccccgccgcccaggggcgccgtcagccagcaaagaatggcacagcttcatgggatcgagtctgtcggatatgtatcggaagccagttttggagaaatctgctgacacatctgatgaggagcctgacattgatatcatgaagctgctgaaagatgtttgagatcatttggtgcccctacatttaaggggcgaaagcaaatcgagaaccgcagagtagttgagttgggtggaaagtccgttaagaagcaccgcacaccattaagtgttgcgaagccagctctgaagaatcagaagaaacgagaacagaagaaaatggaagaggaaaaactacttgggatctttaggaagagggacaaggacaccaaacctcacaagacaaggccagaggaccgagtgcttagggccacagaagggcgctttaggaacggtatactgaacgtcaagcatcttctggcgccaccgaaaccatcaggcaaggacatgtcggaaccgaagatgaggaaggacaagcacaaggggaagggtaagcagaaggggggcagaaggaagagacgttgaagaaagcacacttctgtaacctggtttgctattaagaatttaagatagatggttgatgaaacgtttaaaaaaaaaaaaaaaaaaactcga

SEQ ID NO: 54372 - DNA, 204 bp, Zea mays
  Clone ID: MRT4577_149589C.1
gactcagcttcttccctatccgtaaactgcttgtaccagtcttcagttttctgaacttcatgcagataccagaaagacatgctactatggcgtgcaagactaaggctttcatctgactgatctcgggagtgatcattgggccctgaaaaagattttactctatgaggatcaacttatgcaaaacctacatgctatgttccggat

SEQ ID NO: 54373 - DNA, 113 bp, Zea mays
  Clone ID: MRT4577_14958C.1
gctagacgtggccggacttcctctaactatcaccacgcggatactacgaccacggggtctgccatcgtatgatcaaagattttattgtgcaaggtgggtgttctaccggaacc

SEQ ID NO: 54374 - DNA, 596 bp, Zea mays
  unsure (1)..(596): unsure at all n locations
  Clone ID: MRT4577_149590C.1
cccgggncctccggnancaacgggnaagcagcaccaccacctgnacgtgggcgccttcgtggacctgctcctcggcctgtccacgtcctcgccctcctcctcctcctcccctccctccagcaccgccgccgagaccagcaccaccaccacgagcagcaccagcaccggctgcagctgagctgcagctgcacggccgccgccgccgccgctacgaccaccagctgtggcagtgtcgccggcgacgccgtcacagcctccgccgccgccgccgcctccggccgacgttcaggtgcacgtggtggaggatgaggaggcagcatgcaagcgctggccctgtactgctggcagcgacgacggtgatcggtcgtgcccgcagtccgcgccaccaccagtagtgctccacccactgcgcgtggcctgtcgatcgcttgagtagatgacctgctaatctccagacctttacctcctggctcctgcagctgctgatggttagtgttctaacgacaacaggatgattaaattaactggacgctgtcactaacactctctcgccatgtagtacaggtgcgcgtagcaatagtagagttagtagtagt

SEQ ID NO: 54375 - DNA, 410 bp, Zea mays
  Clone ID: MRT4577_149591C.1
ctcaaggaaggaaacagcagcagtgctgggcaagttcggctttgttgaagctttgtagctactcggtgctttaagaaagttagcacgatcaaagagtgatacatcagaccttttgttgctgtttgtgcttttcttttacatcttcaaacttactgtattattgcgaatgcaatgttgagtagaataacagagttcccattatttaagctatatagagtgtgacatgggcttcttttgtagcaaataaagcagctcagttggggattttggataaaaaaaaaaaaaaaaaaataatgaaaaaaaaaaaaaaaatataataaaatatatttattatatatttaaatttaattatttaatttttatatttttttataattttatttttttttttattttttatttttattttt

SEQ ID NO: 54376 - DNA, 1015 bp, Zea mays
  Clone ID: MRT4577_149592C.1
gtctggttgggaaagtaaaagcaggttcgttctcgggttttgattgggattgggttctgcttcgctctagctagctgttggtcgaattccatccatttcttccgttgcatcggcccctcccttccttctctagttcccttcccttatagtattaactacgacgatggtggtggatgctggtgttggtgttggcggcggcggcggcggcgccgggacatgtgccgtcggaggattcgtctgggacgtgctgctgtggcgccggggccgcgccgacgtgagcgcctgcctgctggcgggcaccgtctcctcctggctgctcttgtacggcggctacaccttggtgtccctcgcctccaacgtgctgctcctgctcctcaccgtgctcttcctgtgggccaaagcggcgcgcctcctgaacaggccgcagcctcccgtcccggagctgcgcgttccgcagcaggccgtggacgaggcggcggcgctgctgcgctctgctctggacgccgcctcggacgccttccgggacatcgcgctgggcagggactcgctgctcttctacagagtcttcctctgcctgtggagcgtgtccatcgtcggcagcgttacagatttcccgaccgcctgctacgcaagtgtggtggctgctctgaccatcccggcgctgtaccacaggcaccaagagtgcatcgccacctacatgagcttcgcctacatgaacctccggatgtacgagatggcgtacgagaggctgtccatgaaatgcttcctcaaggtcagggactggacaatggagctactcaaggatccatgatcccttggttgtttgcgagtgagtgcttcaggtatagagttgattgattggtagatagaatagtggtggttttgattgatgctgactcttgttgtttgatcgatcagtgtgctctggtagatatagtagtggttttgattgtttggttctgcccttggctcgtttcattcctgagctactttagcatgcaaacattaaacattc

SEQ ID NO: 54377 - DNA, 332 bp, Zea mays
  Clone ID: MRT4577_149593C.1
tgggcgcgtgggcgctgcaaacaccgagtggacagttgtaggaccgggcactgaaggttcatgtccattcctccattcactaactgctcaaaaccaggggggtcatcctgacgtctttaataagagctggcaaggagcgattgagaacatgcaacgcgcgtcgaagaggtccgacggttcggggatgatagcattgccgacagggagggactagacagcgagcttgcggctggcggacatgatcatccggttggtggaaaatacgggaacgctgtggcaccttagatggatgtgactcactaccgggagcagacgggccgctcaattttcct

SEQ ID NO: 54378 - DNA, 3042 bp, Zea mays
  Clone ID: MRT4577_149594C.1
ggtaccgaggtcccgccgttcgagagacgagctacgcatttaagccggggaggtcggagcagtgagtgggagtagttcagggactgggagaggagaggaagcaggacctgggagacctcgcctcgtccgtcctcctgcctacttccttgcttttggtaggtgctgcttgttttatcttgaaatgggctctcatgatggcgaggatgaagagttgccaccccccccctccggtgccaccagatgtgattcccattaaagctgaagatgctgtgggtgaatcaccagcaaaacagatattaaagccaaagagattactgatggacaggcctggtataggaagaaaagggcagccgacccagctctattcaaatcactttaaagtcgctgtgaagagtacagaagacgtcttctttcactactatgtaaacctgaagtatgaggatgatcgacccgttgatggtaaagggatcggcagaaaggtgattgataaactgcagcagacatatcgtgcagagctttctaacaaggactttgcatatgatggagaaaagagcctgtttacagttggtggtcttccacaaaaaaagaatgagttcaccgttgtcttggaggacgtatctactggaaagactgctgccaatgggagccctggaggtaatgacagtcctggaggtggtgataggaagagagtgaggaggccataccagacgaaaacattcaaagtggagataaattttgcagcagaggttcctatgagtgctattggtcaagtcattagaggcgaagtctgtctacccccccttgacttgggttttggtgtgatgggtgtcgtggatttcattcaagcttccgtggcacacagagtggactttccctcaatgttgatgtctcaacaacaatgatcgtgaaacctggccctgttattgattttcttctttctaaccagaatgttaatgatcctagcagaattgattggcaaaaggccaagcgtgctctcaagggcttgaggattagaaccactcctgcaaattcagaattcaagatttttggtctcagcgagaggatctgcaaagaacaaacgtttccgctgaggcagagaaatggtagcaacggagattgtgataccattgaaataactgtctatgactactatgcaaagaaaggaatcgatctaaagtattctggtgatttcccctgtataaatacagggaaggcaaagcgcccaacatattttccaatcgagctatgctcgcttgttccgcttcaaagatacaccaaagctttgtctacgctacaaaggtcatcccttgtggagaagtctagacagaagcctgaagaaaggatgaccgttctaaatgatgcactgcaacgcagtaactacgattctgaccccatgttgagggcatgtggtgtttcagttgctccaaaatttacccaagttgaaggaaggatccttcaagccccaaagctgaaagccggcaatggtgatgatatcttttcacgaaatggacggtggaatttcactaataggaagttttatgaaacctgctctgtgaataagtgggcggtcgttaatttctctgcacgttgtgatgttcggaatcttatccgtgacctgatgaggaatgcatctgcaaagggaattcaaatggaggaaccttttgatgtgtttgaagagagtccctctatgaggcgtgcacctgtgtcaagaagggtggatgatatgtttgggcagataaaatcaaaacttcctggagctcctaggttcctcttgtgccttctccctgagaggaaaaattgtgaaatctatggtccttggaagagaaagtgcctggccgagtttggtattgtcacacagtgtctagctccattaagagtcaatgatccgtacctgcttaatttgctgatgaagatcaatgcaaagcttggtggtctgaactcgttgctgcaagttgaagcatcttcgtcaataccacatgtgtcgcaagtacccaccatcatcttaggtatggatgtttcacatggtcatccaggacaagatagaccttcggttgcagcggtggttagttctcgtcaatggcctcttatctctagatatagagcatcagtgcacacccaatctgccagactagaaatgatgtcctcgttgtttaagccgcggggtactgatgatgatggcctcatccgggaatcactgatcgacttctacactagctctggaaagcgaaaaccagaacacataattattttcagggatggagtcagtgaaagtcagtttacccaggtcatcaacattgagctggatcagatcattgaggcatgtaagtttctggatgagaagtggtcacccaagttcactgtgattgttgctcaaaagaaccatcacaccaagttctttcagacggcatcaccagacaatgttcttcctggaactgtggtggatagtaaagtttgccatcctaagaacttcgacttctacatgtgtgcacatgctgggatgattggaacaacaaggcccacccactatcatgttctgcacgacgagataggttttaatgccgacgagatgcaggagtttgttcattcgctctcttacgtgtaccagaggagcacgacagccatctcagtggttgctccagtgtgctacgcccacctcgctgcagcccaggtgagcacgttcctgagattggaggagatgtcagacgcgtcctccagccagggaggagggcatacctcggctggcagtgctcctgtgccggagctgcctcgcctgcatgacaaagtcaggagctccatgttcttctgctagctgatgtgcgtgcgcatcaggatcgagctccatgttttgtgttagtaaggcctagttagtaaggctgtagaaagaatgtttaatgtttgcatgctaaagtagctcaggaatgaaacgagccaagggcagaaccaaacaatcaaaaccactactatatctaccagagcactgatcgatcaaacaaaaaaaaaaaagggcggcagcagtctagtgagctagaagacccgggaatt

SEQ ID NO: 54379 - DNA, 1115 bp, Zea mays
  Clone ID: MRT4577_149595C.1
tgttccctggttcatgattatattatcctatttcctctgtttttaactagcttggtggtctgaactcgttgctgcaagttgaagcatcttcgtcaataccacatgtgtcgcaagtacccaccatcatcttaggtatggatgtttcacatggtcatccaggacaagatagaccttcggttgcagcggtggttagttctcgtcaatggcctcttatctctagatatagagcatcagtgcacacccaatctgccagactagaaatgatgtcctcgttgtttaagccgcggggtactgatgatgatggcctcatccgggaatcactgatcgacttctacactagctctggaaagcgaaaaccagaacacataattattttcagggatggagtcagtgaaagtcagtttacccaggtcatcaacattgagctggatcagatcattgaggcatgtaagtttctggatgagaagtggtcacccaagttcactgtgattgttgctcaaaagaaccatcacaccaagttctttcagacggcatcaccagacaatgttcttcctggaactgtggtggatagtaaagtttgccatcctaagaacttcgacttctacatgtgtgcacatgctgggatgattggaacaacaaggcccacccactatcatgttctgcacgacgagataggttttaatgccgacgagatgcaggagtttgttcattcgctctcttacgtgtaccagaggagcacgacagccatctcagtggttgctccagtgtgctacgcccacctcgctgcagcccaggtgagcacgttcctgagattggaggagatgtcagacgcgtcctccagccagggaggagggcatacctcggctggcagtgctcctgtgccggagctgcctcgcctgcatgacaaagtcaggagctccatgttcttctgctagctgatgtgcgtgcgcatcaggatcgagctccatgttttgtgttagtaaggcctagttagtaaggctgtagaaagaatgtttaatgtttgcatgctaaagtagctcaggaatgaaacgagccaagggcagaaccaaacaatcaaaaccactactatatctaccagagcacactgatcgatc

SEQ ID NO: 54380 - DNA, 1168 bp, Zea mays
  unsure (1)..(1168): unsure at all n locations
  Clone ID: MRT4577_149596C.1
cgcagctgcagacgttctcggtgcagcagggcagcgccatggacacgaggctggcgccgtcatccttcggaatcccgccggcgtcgctgcaggccatcccgtacgccatgctgctggcgctggtcccggcctacgagctcctgctggtgccgctcgcgcggcggctcacgggcgcgcgggccgggatcgccccgctccagcgcatcggcgtcggcctctgcctcgtcgcgctgtccatggcctccgccgcggccgtcgagcgcaggcgccgggacggcgggcggcggcagcagcagcagctgtccgtgctctggctcgtgccgcagttcttcgtcttcggcctgtcggagctgttcaccaacgtgggcctcatggagttcttctacgagcaggcgtcgtccaccgccgggacggcggcgcacatgcaggccttcttcatggccttcttctactgctccttctcgttcgggttctacctcagctcggtgctcgtgtcgctggtgaacagggccacggcgggcggcggccgccctggctggctcggcgacaacgacctcaacaaggacaggctcgacctgttctactgggtgctcgccgcgctcagcgtcctcaacttcttctgctacctgctgtgcgcgaggtggtataattctggtgccgccggctctgggcctgatggggcttgtgcccccggcggcgaggtcgcctctgaggaggaggacgatggcaaggggctcatctgaacatcactggaacgaccatggcactaaaaagctgatgtatatggcaaccattcgtacgcacggcacatccctctcttcttacaaagcatatattatatttatataacaaggcctcctatatatacaagagccgtagataataatattagcatgcacacaaggttgccacgatgataggcttaagatgtcaatcgtgccgcatcgcattctcatccctgaactattcacacaaacgactacttgggcatagtgtttgttttttttggtgttgttgctatgcataggtgttttcgcgtgtgcctgacacactacaattgtgaaaccttgtttgtagcttgtgaaattgtaaaagctaaacagaaactggcttgtttggattcaaaggctagagtttgatgactcaaaaaaanaaaaaaaaagcggcc

SEQ ID NO: 54381 - DNA, 673 bp, Zea mays
  unsure (1)..(673): unsure at all n locations
  Clone ID: MRT4577_149597C.1
ggtntgggaaagtaaaagcaggttcgttctcgggttttgattgggattgggttctgctgttggtcgaattccatccatttcttccgttgcatcggcccctcccttccttctctagttcccttcccttatagtattaactacgacgatggtggtggatgctggtgttggtgttggcggcggcggcggcgccgggacatgtgccgtcggaggattcggtactctctcccaccttttctctcagccaattattattacggattggccgcccgagattggatctactaactaatatatctggatcggaatcggatcggattgctgcagcagtctgggacgtgctgctgtggcgccggggccgcgccgacgtgagcgcctgcctgctggccggcaccgtctcctcctggctgctcttgtacggcggctacaccttggtgtccctcgccnccacgtgctgctcctgctcctcaccgtgctcttcctgtgggccaaagcggcgcgcctcctgaacaggccgcagcctcccgtcccggagctgcgcgttccgcagcaggccgtggacgaggcggcggcgctgctgcgctctgctctggacgccgcctcggacgccttccgggacatcgcgctgggcagggactcgctgctcttctacagagtcttcctctgcctgtggagc

SEQ ID NO: 54382 - DNA, 590 bp, Zea mays
  Clone ID: MRT4577_149598C.1
ggccgcttttttttttttttttttcgttttttttttttttttttttttttttttttttttttttttttttttctttttttttttttttttttttttttaaaaaacaagcccccccaaggggcgggaatttaaataaattttaaaaaaaaaactgccaaatggcccaaggttaataataccaaagggaaaaaaagcccaaaatttcccactgggcctggccaccagggggaaataaaaaggggcggaaattcccattgccaagggaaaaacaacccctcccggtcgggatttccctcccaaactggaaaaacccccccctccggaaagcggtttttggggggcccctttgcagggggggaaaaaaaaccccccaacccaggttttggatgcccggggggaagccccttaaggggggggagaagcgggtttccaaggcgggggggtacccccttccccggttcaagttgacccagcccgggggcttggttttgggggggaaacccctggaaaagggggggtgggggcgcaccttgaaagggggggcccctaacccgttcaaggggtgagcccggaacccctccaaggggggg

SEQ ID NO: 54383 - DNA, 1321 bp, Zea mays
  Clone ID: MRT4577_149599C.1
aattcggcacgaggagcaggacctgggagacctcgcctcgtccgtcctcctgcctacttccttgcttttgattcgtgtgccaaatgtgtccttgctactcaaggaggtcatatggaacaagtaaaacgaaatttctgcatcagcaatcaggcacaagactgaatgacgtggttagtgccaatgagattcgtgtgccaaatgtgtccttgctactcaaggaggtcatatggaacaagtaaaacgaaatttctgcatcagcaatcaggcacaagactgaatgacgtggttagtgccaatgaggtaggtgctgcttgttttatcttgaaatgggctcttatgatggcgaggatgaagagttgccacccccccctccggtgccaccagatgtgattcccattaaagctgaagatgctgtgggtgaatcaccagcaaaacagatattaaagccaaagagattactgatggacaggcctggtataggaagtcggcacgagccgacccagctctattcaaatcactttaaagtcgctgtgaagagtacagaagacgtcttctttcactactatgtaaacctgaagtatgaggatgatcgacccgttgatggtaaagggatcggcagaaaggtgattgataaactgcagcagacatatcgtgcagagctttctaacaaggactttgcatatgatggagaaaagagcctgtttacagttggtggtcttccacaaaaaaagaatgagttcaccgttgtcttggaggacgtatctactggaaagactgctgccaatgggagccctggaggtaatgacagtcctgggggtggtgataggaagagagtgaggaggccataccagacgaaaacattcaaagtggagataaattttgcagcagaggttcctatgagtgctattggtcaagtcattagaggcgaagaatctgagaactccctggaggcgcttcgtgttcttgatatcatactgaggcagcattccgcagaacaaggctgccttttggttaagcaatcatttttctacaacaacccttcatgctttgttgacttgggtggtggtgtgatgggttgtcgtggatttcattcaagcttccgtggcacacagagtggactttccctcaatgttgatgtctcaacaacaatgatcgtgaaacctggccctgttattgattttcttctttctaaccagaatgttaatgatcctagcagaattgattggcaaaaggccaagcgtgctctcaagggcttgaggattagaaccactcctgcaaattcagaattcaagatttttggtctcagcgagaggatctgcaa

SEQ ID NO: 54384 - DNA, 143 bp, Zea mays
  Clone ID: MRT4577_14959C.1
agccgcgccagaactgcttggacgaaccccgcgtgtgttatggaaggacacgcccggcggcaccggggggtgattattgaaacgggcgcggatggcaggcccaccccagggcccagactgactctggtcgggatcaggcacgg

SEQ ID NO: 54385 - DNA, 511 bp, Zea mays
  Clone ID: MRT4577_1495C.1
atttacgcagactcaccaccattctcttcttcaattctctaggtgtgctccgatccctacgtgcatgcctcatcctccccgatccaaatatggcggcgtcacatgctgtcaaaaaagatcctcaagaaattaaagagagctgtcaaaagaccctccctcgacctctacagcaggctcagctcaagatgatatattccactggcaattgattctcatgtcaccacctaatacaagcatatgctccatgatgtcctcttttggaacatgtcatttgaccacgcgactacccttctcacctctccaacaagtatcttataatatgagggccacaacatcctctgatctgtagtagtgcatgaatatcaatacgaacctactgcggtgaaattgatcaccagctgtccacatactcaaaggaattacattctatcatgctgcctgcttactgctacccttgcgatcacgatactcttgtgctatgatactcgctcacatgaacaagactaatctg

SEQ ID NO: 54386 - DNA, 763 bp, Zea mays
  unsure (1)..(763): unsure at all n locations
  Clone ID: MRT4577_149600C.1
aagtttctccctgagaagtggtcacccaagttcactgtgattgttgctcaaaagaaccatcacaccaagttctttcagacggcatcaccaganaatgttnttnntggtaatatgtttatttttgtcatantaaagggagtgtggtgagatgcggtgacaataataaatccagacccccgttacgcaggaactgtggtggatagtaaagtttgccatcctaagaacttcgacttctacatgtgtgcacatgctgggatgattggaacaacaagaccgacccacaatcaaaaccagcacgatgctataggtttcagtgccgacgagatgcaggagtttgttcattcgctctcttacgtgtaccagaggagcacgacagccatctcagtggttgctccagtgtgctacgcccacctcgctgcagcccaggtgagcacgttcctgagattggaggagatgtcagacgcgtcctccagccagggaggagggcatacctcggctggcagtgctcctgtgccggagctgcctcgcctgcatgacaaagtcaggagctccatgttcttctgctagctgatgtgcgtgcgcatcaggatcgagctccatgttttgtgttagtaaggcctagttagtaaggctgtagaaagaatgtttaatgtttgcatgctaaagtccaaacaatcaaaaccactactatatctaccagagcactgatcgatcaaacaacaagagtcagcatcaatcaatcaaacccccccttatttttttt

SEQ ID NO: 54387 - DNA, 349 bp, Zea mays
  Clone ID: MRT4577_149601C.1
tcgagctcactagttggcggccgccctttcgtgggtctcttttgagatggctaccagccccattccgacaccgttacccagctgactgctgtagcaatgccccaatctattgatacagcaggcccgcacaacgagaggaaacacggtagatttacaactgctcctcactacctgaggtaccgtgggacaccatgcgcacgttgagactgtcgtaatatcccgatgccatgaggcacactggcacgaccctaggcgacgaacaatatgtacagacacgctcggtgcgcaaaagcatggacaaggctacctgttctagccaggtggcacctgctccacacttacaggtcgc

SEQ ID NO: 54388 - DNA, 248 bp, Zea mays
  Clone ID: MRT4577_149602C.1
gtctgctcattgatggaaggtttccagtattctggtccagtcagagcagagccttataccatgtgtgcaaactcttgccatccgtcacgagcttgcagatgttgacacttgccggcggggtgtccaggacatgggcattgctttgcactatgagctgcgtgtggcgaaatctgatcgtagccgttttatcgcaaagcgctcaagagaaggtcgccctcggcgtgtgcacattggtacgtgccctggtg

SEQ ID NO: 54389 - DNA, 464 bp, Zea mays
  unsure (1)..(464): unsure at all n locations
  Clone ID: MRT4577_149603C.1
agaggcttntgttannaggnanganantatatattngannnnnnnnnnnnnnnnnnnnnnnnnnnnnnnnnnnnnnnnnnnnnnnnnnnnnnnnnnnnnnnnnnnnnncgttgatgtcctgntcncgagtagagctggaggnngnatcagancggtgatttcntcacnccgnttccancatntatggcttgntgtnctatgccgttatacttcataattggnttgagaattatattgtagcatttanacggaacntcatgtacntatnacnattgcataagataaggctnctnnttaccgaaataggaaatgatgattttnacaanangtgattttgnnatgtgangtgaatgtatnnatnaanagatgggcttacngnntgtnaagtggaanctnnnnatgaagcngacntngataangaagctgnnntnacantatatnntataaantttanttntnacttt

SEQ ID NO: 54390 - DNA, 614 bp, Zea mays
  Clone ID: MRT4577_149604C.1
ggtaccgggcccccttctcgagtttttttttttttttttttttttttttttttttttttttttttttttttttttttttttttttttggggagcccaccattggattttattcatggaaaaccccacatgttttttggcagggaccctcatcgggcttctcattaaaatggaatggggcgaacatgggcccaaaaggacaggggaaaacctttaggtagcaccaataaacattacaggctgggggaaaaggaaaaaggggttgccgacaaaccggaaaaaaactttgttcatgctaaggaaaaacccgcaccaaagggaaaaaaaaacgggggggggggctggcaaaaagggctcctctgggtttgcatttttgggccccaaaaaattaaaagcatttcctgggcccgagggacgggccaaactcggggaactcagccttggaaatccacatttgttgaaaggggctgaccgatcccagaatggatcctccaatccaaacactgtacttcttttttgggggagcaacccccttgattttcatgctgctaggacccaggggggggatttccttgctcatcctgtcagcaaggccagggaacataggggtcccccc

SEQ ID NO: 54391 - DNA, 691 bp, Zea mays
  Clone ID: MRT4577_149605C.1
gggacgggaatggaaaccgggaccctacactctccgacactcccgctccgcttcacccagtcccataccccagccgaccagcccggcgcgcggtggcactgtggcagcgctcacacggcaatgcggaaggacgctgccgccgccggcattgcgccgggttcggcgcccgcgtttctctgcttcgaccttaagcccttcctcgccgcgctcaccgtgctgacgctcctcgccgccgcctggcagctccggccttaccaatccctcctcgcttccccattctccgccgcgtgcccgcaacccaccgccggcgtctcgctcccccgcgcgctcgccgtccacgccaagaagggctcctccgccaccaactccacagcttcgtcctcgccgtcgccgccgcccggccccgagcggcgggagttccacgccgtgggcagcgcggcggcgctgttcgtgcagatgggcgcgtaccgcggggggccctacaccttcgcggtcgtggggctggcgtccaagcccacgcacgtctacggcaagccgtggttccgctgcgagtgggagcccagcgacgcctcgtcgccgccgatgcgcgcggccaagacgtaccacatgctcccggactggggctacggccgcgtctacaccgggggggtcgggaactgcacgttcccgcgcgttcccaacgccgacagcg

SEQ ID NO: 54392 - DNA, 445 bp, Zea mays
  Clone ID: MRT4577_149606C.1
tcttccacgcatgcgtccacacaaccgctccactcgtggctggccctaaaggaaggcatgcaaagctttgtgaataccctgtcccgcaagactatcacccttgaggcggaggaatgagacaccatccacaacgcctaggctctgacccaagacagggactggcagttgcaccagaccagcagatgataatatttgctgggaagcacttaggggacaggcgcacgctcgccgactgcaacataacagaaggagagcaccatacacttgatgctgtgcctgaagggaggcatgcagatcttcgtgaagaccctgaccggaaagactatcacccttgaggcggagtcttcagacaccattgacaatgtcaaggtcaagattcaggacatggtgggcttcccatcggaccaagagcgtttgattctttgctggctagcagctggaggat

SEQ ID NO: 54393 - DNA, 241 bp, Zea mays
  Clone ID: MRT4577_149607C.1
ggagaattacatgttcacgccccaatgacctcgcggtgtagaagcaaaggagaacacttgtacttctagaggacaaagtggaaccaacactgggatgggggatggaagctaacaagggcagcctggtctttataggcaaagccagcagcaggaattaggtaacaacacgaagcaacaataggacaggccgacgcctgtggcaaacaagcagtaatgaaaacctcaatgggaaaaaaggaaa

SEQ ID NO: 54394 - DNA, 981 bp, Zea mays
  Clone ID: MRT4577_149608C.1
aacctccagctttgcttggtgcgaactgccgctgacgaccgtggcaaaaccgtctcgccgtcacgtcggggttcagtttacggctaaacgtcgtcactgtcccgctgatcgctccgcttgcgccgggcgttggcgccttgctccggcgggacggtaacgtgcgtgcgcgggacaaagccctgccctcctctcactcccatcacctcaccacgcgacggccacagacgcacacggccaccgtgctaccagccatcgcggatagaggggataggcctgggcgctcattccgttggagccccaagcccctccgctcccagcctcactttctccccgcgctacctaccaaaacaccacgccgcgcgtcacgtcacggctcgcagccggccacttcccgcgccgtacctctcgggcatagatagatcgctcacttccggggcctgcgctgcaagcaaagcccgcaacacgtaccaactctcctacgagctgagcgagcgaacgggagagagggtcggcgtcggagaaggaagatggatcacgcggcggacacgttccggacggacctgatgaccatcacgcggcacgtgctgaacgagcagagccggcacccggagtcgcgcggcgacctcaccatcctcctctcccacatcgtcctcggctgcaagttcgtcgcctccgccgtcaacaaggccggcctcgccaagctcaccggcctcgccggcgagaccaacgtccagggggaggagcagaagaagctggacgtgctctccaacgaggtgttcgtcaatgccctcgtcagcagcggccgcacctgcgttcttgtgtccgaggaggacgagaaggcgacgttcgtggaccctaagctccgtggaaagtactgtgtctgctttgaccccctggatggatcctccaacatcgactgcggcgtctccatcggaacgatctttgggatctacatgatcaagacccagacaccgtgactct

SEQ ID NO: 54395 - DNA, 578 bp, Zea mays
  Clone ID: MRT4577_149609C.1
aattcctgcttccgcctcctctacgaggcccgctgcgacaatgtcgctcgcgtctacgcacccgccgcctccctccattagctctccactacactctccaggccccgaaccgcacgccgcgtcatctctgtgtgcccacccgtgggcgccaactccaccgacatcagcatggaatcgtggtctcatcagatacttatgacccacgaccgcatcgctaactgaggccgccgtaacaatggcgccacctacggctgcagcgtaaaacaggaagccccctgcgtggagcgcatcacacaaggggtaaccgactgtgagaacaatagagcacctggtgcacgcacggccgcctgcactggtgcacgcgcacaatcaaccgcagcgggacaccctctaccgtgaagatcaggatgtaggcgaggcacatgctcttaccaactataacgaactcgacaacttacaccccatccaacaactacaagactagatcacgctcatgctctcgctatgctcagaactagcgaacatgcctgtgatactcgagagagtgatgactatggctgcctctgatgcttcacatg

SEQ ID NO: 54396 - DNA, 353 bp, Zea mays
  Clone ID: MRT4577_14960C.1
ctcgagccgcggatattctaacaggatgtaatgcgcaggtcatacctgtaatcttgcatccagacatagataattatgaacacacacctgcctgatatgaagaactctgagaggatattcctagccgtgaatgagtaaccataaccatatatgtaccagaaattggatgtcttttatgtgacagtatgtcacaggattcatgcgctggccatagacagtcagacatggctatccaaaagctgtgtcacgctacaagagatcccatctcagcacactaccagtatatactcaaatcacttgtgaaagaatcgtcatgtccattatgggacgcaaacgatgctgttctggatgca

SEQ ID NO: 54397 - DNA, 446 bp, Zea mays
  Clone ID: MRT4577_149610C.1
ggtccggcctcaacccggcggcgggcccagcttcagcgacagatcgatggcctgcacatgcttggtcaggccgccgatggagatgcagtcgacgccatcctcggcgatcgagcgcaggccgcccaggcccacgctgccggacacttccagcggaatgcggccggccgtgatacgcaccgcctcgcggcgcaggtccgggctgaagtcatccagcagaatgcgttcgcaaccggcttccagcgcctggcgcagctgcgccaggtcttccacctcgaccaccagcggcagcgcgggccattgccggcgcgcggcagccaccgccgcagccagcgaaccggcggcacggatgtggttttccttcagcatcaccgtgtcgtacaggccgaagcggtggttctcgccgccgccgcagcgcacggcgtacttctgcgccaggcgcaggccct

SEQ ID NO: 54398 - DNA, 210 bp, Zea mays
  Clone ID: MRT4577_149611C.1
ggcgcgacgccggacgccgttaatcgccttctcccggcgcaacagtcctggccgcagggcgcgtcctcccacgcgcgccgtgctgatccctcgctgtcggcgtccgttgcgttgacgtcgcttcccctgtggcccgggacgtcgtgcccgcgctctgatggggcgttcgcggtcgctgcatctggtcgtcgtcgtcgtcacgtgagctcg

SEQ ID NO: 54399 - DNA, 585 bp, Zea mays
  Clone ID: MRT4577_149612C.1
acctcgtcgaccacgtcctcatcgtcaccgtcgacgccggctccttcagcggctgcaaggccgtgcacccgcactgctacctcctcgaggtcaagtccatggacatgaacagggccaagacgttcgggaccccggagtacgtggagatgatctggctcaagctctccatccagcagcgcgtcctggagctcggctacaacttcctcttcacggacgccgacatactgtggcttcgcaacccgttccagcgcatctccgtctacgccgacatgagctgctcggtggacaactccaagatggcgccggcgctcctggactgcgagaacaacgtcgggttctactacatgaagtcgacgaaccggagcgtcgagatggtcaggtactggcgggcggcgagggcgaggttcgacgggaacctgatcgagcaggtggtgttcaacaagatcaagtacgagctcatcagcaggctcggggccaggatccagccgctggagacggagtacatcagcgggttctgcgactttcaggatcatttcgacagggtctgcaccgtgcacgccaactgctgcatggggcttgagaaca

SEQ ID NO: 54400 - DNA, 145 bp, Zea mays
  Clone ID: MRT4577_149613C.1
aattcggcacgaggccaaaaccatctgctggtctccattcttagagacagggcaaggccaaacttgatctctcttatgctgcatagctgggagtgcttgattaaatatgctcatagctagctcacaggaacagcctactaagata

SEQ ID NO: 54401 - DNA, 627 bp, Zea mays
  unsure (1)..(627): unsure at all n locations
  Clone ID: MRT4577_149614C.1
natttcatctcccccgaccccccttccgcatcctcgcgagcgaagccgcgccggtgaagagcaggcgacacttctacaaccctccggctccgacccccttccgcggcccgcagccatggcgaccgtcatgcagaagatcaaggacatcgaggacgagatgtcaaagacgcagaaaaacaaagccacggcacaccatcttggtcttctgaaggctaaacttgcaaaattacggcgagagttgctcactcctacaaccaaaggtggtggcggtgctggtgaggggtttgacgtgacgaaaagtggagatgcacgtgttggtttggtgggctttccttcggttgggaaatcaacattgttgaacaagctgacgggaactttttcagaggttgcgtcctatgagtttacaactttaacatgtattcctggagttattatgtacaaaggagctaaagtacagcttctagatcttccgggaatcattgaaggtgctaaagatggaaagggtagagggaggcaggtcatcagtacagccaggacatgcaatgtcattctgattgttcttgacgccataaaaccaataactcacaaacgtctcattgagaaagagcttgagggatttgccatccg

SEQ ID NO: 54402 - DNA, 334 bp, Zea mays
  Clone ID: MRT4577_149615C.1
ggcttgcaagctgcaggccactttcgtcttttattatgacctggggaaacataccaaggcagaaacataccaccttttttttttcaagacaactggttcgttggggggggaggcacaaaggccaacttttacaggatacagtacttcacagagaagactattcacatccatatccccggaacctttcaaaaaaacaagcgctgaggccctgagccaacgggctccatttggccgagttgtagccggcacaagcacccatggtggctcagttgatggaagcgccaggcgggccactgggggatttgttgggggaacgccctgatatgcctggagc

SEQ ID NO: 54403 - DNA, 218 bp, Zea mays
  unsure (1)..(218): unsure at all n locations
  Clone ID: MRT4577_149616C.1
cngaccntngactattctcnanaagccacaaagacattngnacactataccnattattcggcgcatgagctggnatcntaggcacagctntancgccncnttattcgagccgagntgggcnagncaggcanccttctangtaacgancacatctacaanggtatcgtcanagcccatgcattngtaataatctncttcatagtaatanccntcataat

SEQ ID NO: 54404 - DNA, 327 bp, Zea mays
  Clone ID: MRT4577_149617C.1
atgggcgcatcggacagtcagtatgcaccgttcggtgttaaaaaaattaatgataatgcttatgcaattgacctgcttgtggaatatggtgtttcctctagttttaatggtgtagatttgaaaccatatgcgggcaaggatgaggatttgtcgtggaggacaacttcgattcaagaaggggaggatgatgaggacctcaaccccaacaaaggagtggctactccaactgaaccagcacaggcgccaccaggattactcactcgagctcgtgcacgtgaattaaactttgtgatgattctgaagaatgaaggaccagaagtttcctaa

SEQ ID NO: 54405 - DNA, 401 bp, Zea mays
  Clone ID: MRT4577_149618C.1
aaggaaaagtagttggttttaagaagtacaacccagtttaggggaccatgttttatggaaaacaatttatggggttttaattttgaagggacaaaaaggaataaaaagggggggattaattatgggggtttttggggggggagtaattttgggggggaggtttaaagaaatacaaagcgggttttttgtgggttaaagaaaaaattgggggtccggtttagtgtgggggtttgaataaattttgtgaatttgttaaaggaattttggaagggggggtgtgactttgggaatatgatagggggttgatgggggaataaaatatgggaaatgtggggataaagggggaatagggatggggcacgagattgaattggagaggggaaaaggggccgtgggggaat

SEQ ID NO: 54406 - DNA, 857 bp, Zea mays
  Clone ID: MRT4577_149619C.1
cattgggtacctcgaggccggccgggagacagaccagacgcagccccagatttcttttccatcaaaacacccccgttcccctgctccccggccgccccggatttcgatttcgtcctcccttcgccgcccgcgccaagactttcctctgccggggctgcaccggcagcgcggggtcgacaacagctcgagatccggtgactgatctcctttgtttctcgggcatcttgctagtcttcttccagattgcttcctaataatgatgacacatgaatgggctgccaatttggctcttgctggtctgagcttggcgccgcttgtggttaatgtaaacccaaatgtgaatgtggtactgacagcatgccttactgtctatgtgggttgctaccgttctgttaaaccaactccaccctctgagaccatgtccaaggagcatgcgatgcggttccccttagttggaagtgctatgcttttatcactgtttcttctattcaagtttctctcaaaagacttggtcaacgctgtgctcactgcctactttttcattctaggcattgttgctctctctgcaacactgcttccttctataaaacgttttcttccaaaagagtggaatgataatctcattgtctggcgtgctccacttttccactcactctcggtggagttcacaaagtcccagattgttgcttcaatacctggatttttcttctgcttgtggtatgcgtcaaagaagcattggcttgcaaataatgttctgggattggctttctgtattcagggtattgagatgctgtcattgggatcatttaaaaccggagccattctcttgggtggactttttgtgtatgacattttcc

SEQ ID NO: 54407 - DNA, 421 bp, Zea mays
  Clone ID: MRT4577_14961C.1
gcagaggaactttttttttttttttttttttttttttatttttttttttttttttttttttttttttttttttttaaaatctaaatctataaaccttttttactgaaagggcgcacgtatcaccctgagaactttttttttaccgtttaaatcataaaaaatctagaaaatggccccaccaatggggggcgattgcaataaggggggaggattcgccaaagcatggtggctaaatggcaacaattggtgttgttgtaagaaggcaacaatgtttgccacattatgtgggtaaaaaggcagcaattgttgctggtgcaaaaaggcattaatgtttcccacaacccgggggtaaaatggcaacaattggtgttgtcgcaagaaaaaaacaaagttttccacaccttgcacatggaatggcaaa

SEQ ID NO: 54408 - DNA, 1725 bp, Zea mays
  Clone ID: MRT4577_149620C.1
tattggtcgactcgggggccccgggcacccccagatttcctttccatcaactccccccgttcccctcctcccctttggattttaccttctcgcccgtccccgaattcttcctcctcccatcccgtgcagccggcctcaccgccggcgacgggacgcggagacccgggctgccggtaccgtcagccgtgctccttcctctcttcgtcgcccccgccaaaaccttcatctgccggggctgcaccggcggcgcggggacaacaaaagctcgagatccggtgactgatctcttcgttcctcggttcactttgatattccaacaaaggtcacattgctagactcccagattggttcctaacaatgagggcacatgaacgagctgccagtttggctcttgcctgtctgagcttggctccacttctggttaacgtaaacccaaatgtgaatgtggtattgacagcatgccttactgtctatgtgggttgctaccgatctgtgaagccaactccaccttctgagaccatgtccaaggagcatgctatgcggttccctttagttggaagcgctatgcttttatcactgttccttctattcaagtttctctcaaaagatttggtcaacgctgtgctcactgcctactttttcattctaggcattgttgctctctccgcaacactgcttccttctataaaacgttttcttccaaaagagtggaatgataatctcatcgtctggcgggctccattcttccactcactctcggtggagttcacaaagtcccagattgttgcctcaatacctggatttttcttttgcttgtggtatgcgtcaaagaagcattggcttgcaaacaatgtcctgggattggctttctgtattcaggggattgagatgctgtcattgggatcatttaaaactggagccattctcttgggtggactttttgtgtatgacattttctgggtgttcttcactccagttatggtcagtgtggctaaatctttcgatgctccaataaagcttctgtttccaactgcagacgctgaacggccattctccatgcttggccttggtgacattgtaatacctggtatattcgtcgcacttgccttgcgttttgatgtctcaagaggtaccaagaagcgttacttcaacagtgcatttttgggatacgctgtgggtatgacggtgaccatcgttgtaatgaactggtttcaagcggcgcagcctgctctactataccttgttcctggtgtgattggttttgtcgctgttccctgtctgtggtatggagaagtgaaacagctactggagtttgacgagtcaaaaactgagtcggaggaaggcagtacagaagaggagcaagatgatgatagttccaaaggcaacaaaaaggtggactagcaggatttagttccggaggtaaaaggacaggaagacagttttcgtgtaatgtcgtctggcagctaaaaaaacgggtctgatgaccctctaataccggattcgctcgccttacttaagaacttagaagaaatggttcagcatgatacaagttttattttattttttgtttcattttgcggattatttgccctgggctggagagtgggaattgaggggaacaaaatagatgctgttactcgcgatgtactccctgattcgttaaggaattcaccagaactttgacttggccgacgcatataaaaaaaaaaaaaaaaaaaaaaaaaa

SEQ ID NO: 54409 - DNA, 164 bp, Zea mays
  Clone ID: MRT4577_149621C.1
ttcgcagaggagggaagaccactatgccaccactgagcacccctaaagagcttgctgttactctctgacatgtgcatgacctaggctggacaagaagagagcttatgtcttcttcaagacctctattgatggctacacatcttgcgctaaggatatgacttttt

SEQ ID NO: 54410 - DNA, 282 bp, Zea mays
  Clone ID: MRT4577_149622C.1
cccacgcgtccggtagaaaacgggagagatgcctgagctaataagggtccctcatccccagctttccgtacttttggataagaaagctaaaattaaaatctccatggagattgggaagagtgggcgttctccacctgtgggtggttccctgcaaagcaggatcttggtgctactttgggttttaggggctcgaccttccaggagcgtggccctcagtgagttacttgcctcacggctgccagatggtcactgggacttttttccacgtctgctttattacgt

SEQ ID NO: 54411 - DNA, 2484 bp, Zea mays
  Clone ID: MRT4577_149623C.1
attgggtacctcgaggccggccggggacccccttccccccctgacgcctcgcgaagccatcatcttccaaaccctcgccgcagccgcagccacccttgcttccgcacgatagtgcccgggaccagccatctatggcggcgtcgctgctcctccgcgctgtgcgccgaagggagctcgcgtcccctctcggatccctgggtgccaacttacagtcaacatgtgctgccaacatatgctcaaaatggggaaattttgcaagaccttttagtgcaaaagctgctggaaatgaggttattgggattgatttggggacaactaactcttgtgttgctgttatggaaggaaagaacccaaaagttattgagaatgctgaaggtgcgagaacaacaccatctgttgtcgcatttactcagaagggtgaaagacttgttggtactccagccaagcgccaggcagtaaccaatccccagaatactttctttggaacaaagaggatgattgggcgacgctttgatgatccacagacacagaaagagatgaagatggtgccatacaaaatcgtgaaggctccaaatggtgatgcttgggttgaaacaacagatggcaagcagtactcaccgagtcaggtcggtgcatttgtgctgaccaagatgaaggagacagctgaatcttaccttggcaaatctgtctcaaaggcagtgattactgttccagcttatttcaatgatgctcagcgtcaggccacaaaggatgctggtcgcattgctggccttgatgttgaaaggatcatcaatgaacctacagcagctgctctgtcttatggaatgaacaacaaggaaggcttgatagcggtatttgatcttggaggaggaacttttgatatctctatcctggagatctcaaatggagtttttgaggtgaaagcaacaaatggtgatactttcttgggtggtgaagattttgataacacgctactagagttcttggtgagtgatttcaagaaaaccgagggcattgatctgtcaaaggatagattggccctgcaaaggcttcgtgaagctgctgaaaaggcaaaggttgaactttcatcgacttctcagacagaaatcaatctgccattcataacagctgatgcttcaggggcaaaacatttgaacattacactgacaaggtcgaaatttgaatctcttgtacacaatctgattgaacggactagagatccatgcaagaactgcttgaaggatgccggaatatctactaaagaggtggatgaagtacttcttgttggtggaatgactagggttccaaaggtgcaggaggtagtctctgaaatcttcgtaaagagcccaagcaaaggagtgaacccagatgaagctgtggccatgggtgctgccattcagggtggcattctccgtggagatgttaaggagcttcttcttcttgatgttactcccctgtcactaggtattgagacactcggtggtatcttcaccagattgatcaacagaaacactacaatccctacaaagaaaagtcaggtgttctcaactgctgctgacaatcagacccaagtgggtatccgtgtgttgcaaggtgagcgtgaaatggcagcagacaacaagcttcttggtgaatttgaccttgtgggcattccccctgccccccaagacttgcctcagattgaggttgcattcgaacatcggattgcaatggaatcgtgactgttgctgccaaagacaaggctcccgggaaggagcagaacatcaccatccgatcctcgggtgggctgtctgaggctgacatccagaagatggtgcaagaagccgagctgcatgcccagaaggatcaggaacggaaagccctcattgacatcaggaacactgcggacaccactatctacagcatcgagaagagtctgggagagtacagggacaagatcccggcagaggttgcatccgagatcgaggcagccatcgctgacctccgccaggagatggcttcggatgacatcgagaagatcaaggccaagcttgaggctgccaacaaggctgtctcgaagattggtcagcacatgtcaggtggtggctctggcgactcgcagtcgggatctggacctcagggtggcggtgaccaggcgccggaggcagagtatgaagaggttaaaaagtgaggctgcgggaagttcaggcgaaattgtagtgacctgtttagaagtagctactcttttttgggaacacagatagtcagatgagaataaaacctgtgttgtaataatcgttggatttgcccccacttagtttccttctgcagcgatggaggtaacacgacatttcattgcttttgttgcatatgatgtcttgatctggcatggatgcatgctcacagcgaaaaccattggcgagttctgctattgaatgaaagtacatttgtttctatgttctgactgttgatgatatttaagggtggtaactcaactgtgctttt

SEQ ID NO: 54412 - DNA, 497 bp, Zea mays
  Clone ID: MRT4577_149624C.1
tcggatgacatcgagaagatcaaggcaaagcttgaggctgccaacaaggctgtctcgaagattggtcagcacatgtcaggtggtggctctggcgactcgcagtcgggatctggacctcagggtgggggtggccaggcgccggaggcagagtatgaggaggttaagaagtgaggatgcgggaagttgaggcgaaattgtagtagcctgggtaacaacgcagagtacgcggggggaacacagatagtcagatgagaaatgtaaaacctgtgttgtaataatcgttggatttgcccccacttagtttccttctgcagcgatggaggtaacacgacatttcattgcttttgttgcatatgaagtcttgatctggcatggatgcatgctcacagcgaaaaaaaaaaaaaaaaaaaaaaaaaaaaaaaaaaaaaaaaaaaaaaaaaaaccaaaaaaaaaaaaaaaaaaaaaaaaaaaaaggcctctgcgttgttaccactgct

SEQ ID NO: 54413 - DNA, 2617 bp, Zea mays
  Clone ID: MRT4577_149625C.1
gcacgagttcgcaagcccccttccgaccttgcccctgcggtctcccgagtcccgaagcatccccttccaaaaccctcgccgcgccgcagccacccttgcttccgcacgctatcgcccgtgaccggacatcattgccggcgaccatgcatctgcgcgcggggcgccgatcgtagcctgcgtcccctgtagggtccttgggtgccatcatgaagtccaaggtgaaggcatacggtcccaacaagtcggtaacgtatgctagacatggcatggcaaaaggtgacctttacgagcaaaagtggctagatttgaggttagctggcagtgattctggcgacaacgaaatcatgaggatcaggtatgaagggaaagcggcgaaaagttgaggagaaatcctaatgtgctagaaaaaagtcactagtcttttttgttaatacggatggtgaaaagagacctgtaaaaccctgtgttgtaataatcgttggatttgcccacacttagttttccttctgccgcgatggaggtaaagcgacattatcagatcaagaggggcacatacagaatcgtgaaggctccaaatgatgatgctagggttcaaacaacagatggcaagcagtgggtgctgcacttcagggtggcattctccgtggagaagttaaggagcttcttcttcttgatgttactcccctgtcactaggtattgagacgctcggtggtatcttcaccagattgatcaacagaaacactacaatccccacaaagaaaagtcaggtgttctcaactgctgctgacaaccagacccaagtgggtatccgggtgttgcaaggtgagcgtgaaatggctacagacaacaagctccttggtgaatttgacctcgtgggcattccacctgccccaagaggcttgcctcagattgaggttacattcgacatcgatgccaatggaattgtgaccgtctcagccaaagataaggctaccgggaaggagcagaacatcaccatacgatcctcgggtgggctgtcagaggctgacatccagaagatggtgcaagaagctgagctgcatgcccagaaggaccaggagcggaaagccctcattgacatcaggaacaatgccgacaccactatctacagcatcgagaagagtcttggagagtacagggacaagatcccggcagaggttgcatctgagatcgaggcagccatcgctgacctccgccaggagatggcctcggatgacattgagaagatcaaggccaagcttgaggctgccaacaaggctgtctcgaagattggacagcacatgtctggtggtggctctggcggctcgcagtcaggatctggacctcagggtggcggcgaccaggcgccggaggcagagtatgaggaggttaagaagtgaggctgcgggagttcaagggaattgtagcggcttgtttagaagtagctcgttttttttttgggaacgcagatagtcagatgtctcagatgaggtgtaacctgtgttgcaataatctatgaacttacccctcttgttttctcctgcagtgaaacaggtcacacgacattgtcatggcttttattgcatatgaagccttgttctgcccgatgtactcgcacagcgaaaaccatcggcgagttctgttaatggattgccgtatatttgttgcctcagattgaggttacattcgacatcgatgccaatggaatcgtgactgtctcaggaagaacatcatgattcgggtgggctgtcgctgacatccagaagatggtgcaagaagctgagctgcatgcccagaaggaccaggagcggaaagccctcattgacatcaggaacaatgccgacaccaccatctacagcatcgagaagagtcttggagagtacagggacaagatcccggcagaggttgcatctgagatcgaggctgccatcgctgacctccgccaggagatggcctcggatgacatcgagaagatcaaggccaagcttgaggctgccaacaaggctgtctcgaagattggacagcacatgtctggtggtggctctggcggctcgcagtcaggatctggacctcagggtggcggcgaccaggcgccggaggcagagtatgaggaggttaagaagtgaggctgcgggagttcaagggaattgtagcggcttgtttagaagtagctcgttttttttgggaacgcagatagtcagatgtctcagatgaggtgtaacctgtgttgcaataatctatgaacttacccctcttgttttctcctgcagtgaaacaggtcacacgacattgtcatggcttttattgcatatgaagccttgttctgcccgatgtactcgcacagcgaaaaccatcggcgagttctgttaatgagttgaagtatatttgttcctgtgttttgactattggtgatattaagggtggcaacaactgtgactttggcaatgttctgagaacgctaggtcagatcaaagagattgtatggtacttttgtgaagagccgtctcttatatctctaaagtatttaaatagttagcttcaaaaaaaaaaaaaaaaaaaaaaaaaaaaaaaaaaaaaaaaaaaaaaaaaaaaaaaaaaaaaaaaaaaaacccccccccc

SEQ ID NO: 54414 - DNA, 1056 bp, Zea mays
  Clone ID: MRT4577_149627C.1
tcgcgatctagaactagtgtttcctactaccgcgctgccgcacgtgggatgacctgaccctccgcctgcccccaagatgaatgtgggacatgctgcccacctgtccgggcagacagcgcacatgaatcaagttcctggctccggtgttggcattggtgttggcggctcagacgggctaccgcagcaccagccaatgcaggagatggcggcgctctcaggaatggaccagcagtttgtcatgcttcggaccgctatgcgcgacaagatatctgactatataggaagaaaacagtcaccgggtgattggcggaaacggttgcctgaactggcaaaacggcttgaggagatcttgtacagaaaattcccaaacaagcatgagtactacaatatgatgaagggaccagttgagccacaattgcaatttgctatcaagaccttgagtgctcagaaccaacacaatcaacaaaacccacaaatgacaaggcaaatatcatcgtcctctagctatggtgctatgattcctacccctggtatgacgcaaggcaccagtgcaggttctaggactccttatgtcacggagaccaatgctctttcatcgtctggtgcatgcatggttcctcagaatgctaacatgggtacctcaatgcaaggtccaatgtctaacgggtaccagcatttaaataccaacatttcacaaaattctaccacaaataatgtcgaatctacaatgggttcagttggcgttcagcgacaactatctcatatgatcccaactccaggattcagtaatcaacagaatgtaccttcaaatcctgactattcaaatggaactggatacttcaacggtgagtcagctgtggcgccacatatgcagcaccagaaacaatttcctagcaaccacaatagcaatcaaattcaacatattgggggacacaataattctgggatacattcaagcttgctggacaactcatctgcctatggtttatcagatggccacatgaatggtggcataggagtgcatgggtcaaatatgcagctaacaaacaggactac

SEQ ID NO: 54415 - DNA, 931 bp, Zea mays
  Clone ID: MRT4577_149628C.1
tgcgaaggataaccaaaagatattcattcaaatgagagatgtgcagctggtatatacaagctattgacactttcaagctaggacctaatatttctcctagagacctgcagtttccttatgcaaagggagcctctttcaacctacagatgctgtagtgaagttctacgttctctatgagaagtggcgcagggctgaggttccaaagtctgattcagttataaagtacttcaaaaacatcactcatgcaaatggagttaccatccatcctgctgggcttgaactctcactccatgcatccattgatgcgttgggatcatgttatggtgacaaagaagggagaaagtaccgagcatgggtggacagactttttatcacacagactggttcagatagttgggtggggaggtttgacttgtgggaatcagaaggtgatgtgcgtgtgtgttctctgtcaagtcttgctttgattctgaaggctgaatccccagagggctttgtgctaacccacatccaaaagacatggctgaacggatactcgtcaggggttgagcaggcgtttaagctgtagagcagtataccgtctcggctcgtggttggagttttcttgagaatagaatagaataatgtacctacttcatctgagaaacatttttttctcttgtttataatattaacttcccaaaaccgcactggaggatcaccagggagaggattcggtgccttctcttatttggcgcgtaagataaatgttgtctcatggctttcatgagaagatgaaattgactcatcttggtatatatttacaaatcttgaatattgcagcgttatctatattaaaaaaaggggcctggggttatcttactttcctattaatacacattctttgggcggccgttctataagatccatgcttcctttcccctgcattcaa

SEQ ID NO: 54416 - DNA, 419 bp, Zea mays
  unsure (1)..(419): unsure at all n locations
  Clone ID: MRT4577_14962C.1
gtgtgtnggttttcattcgccgccgctcgagccggtctttcccaaaaggacaatcctcttcctcgatttctcctcaaccaaattcaaagtcacagcgtgcgaaactctcgcgcgatgtcttggcctgcgtcaagggcgtggaagggtctggtgtaagggcgctcgccccgcgccaccgcaaggtgctcgcgtgtattattctattgcataatctagtcgcccatctccaagttgcctaggaggggcgtcgtctatcgcatctccgtgtttctctactatgagacctcgcgtcgtgctcaacatcttcctccataacgtcttccgcctacgccgtctcctactccgagtacgcccgccgcaaccactgttaccgccatggattttctctaccctctccccctctcccccccccccctcca

SEQ ID NO: 54417 - DNA, 422 bp, Zea mays
  unsure (1)..(422): unsure at all n locations
  Clone ID: MRT4577_149630C.1
ctattctanatcgagcggcctcctttttttgggggaatatgttgggtacacgccttgagttggaaagaattgggtccatctttttttatttggctcggcgagttgctgatttctcatcggacattgccggaactgtgaggttgcggttttaccatgtagggaaatttgcagaatgtgtacactggaaatataggaataataaaagtctgtatcatgcattcagaaaaaaaaaaaaaaaaaaaaaaaaaaaaaaaaaaaaaaaaaaaaaaaaaaaaaaaaaaaaaaaaaaaaaaaaaaaaaaaaaaaaaaaaaaaaaaaaaaaaaaaaaaaaaaaaaaaaaaaaaaaaaaaaaggggggggccgctttttaggggaccaaatttttcttcccggggtttgcaagttaaaagtttttttatggg

SEQ ID NO: 54418 - DNA, 394 bp, Zea mays
  Clone ID: MRT4577_149631C.1
attacatcataaacggcacactaagaacaaacaaaggcacgcaacatacttgcgaactggaggtccttgatctttgtgcggagatgcaaccgcaaccattggcccaaatgctcaaagctgctatagctatacttctatccacatacatctcaccagcggagaatcaaatgtgtgaaaacccagttgttgaaacatagaagatgcaacaggcaatcgcaacaagcatcataccattatcacccatggtgattcaacaaccgtcagccctataacagcagttaccgttggtgcattgggtagcacaaaagataaaggtacaacagctacaacaactggtgctagcaaattttgctgtatacttttagcaacatcagttgttttcattcaaccaact

SEQ ID NO: 54419 - DNA, 320 bp, Zea mays
  Clone ID: MRT4577_149632C.1
gacgagcgatcgatacagccgtgccaacatatcacctgcgacgccgcgaccgggatgggcgtcaattgcaagcctatacatatcgacctctgggtcaacctatagacggagggtatgcttaaacatcaatgtaagctcctaacgcaagctagatcacacagagtaagagggacgactgagacgccttccaacaatgctgaagtacgcagcttatgaaatcacgatgcactgctagaccattgacatcatcatgatcgatagtcacatgatacatccttactgaaaggtacgccacctactaatcagacatctgacgacta

SEQ ID NO: 54420 - DNA, 125 bp, Zea mays
  Clone ID: MRT4577_149633C.1
cctttcggaccgtcgtacacatctgacagttagaagtgcatactatcatccatctcagtatggcaactagtcaacctccacctggtacctctcctctccaggtccatccgccatagggcccctgt

SEQ ID NO: 54421 - DNA, 423 bp, Zea mays
  Clone ID: MRT4577_149634C.1
atggtggaggagctctggtgggaagaggtggaggagcatcgatgggaaaggtggaggagctccagtgagcctagcgtgaccatgagcgagtcgaggtctaagttgatgccacgtgctgctggtccagtcaaggtgttaaaaaataatgataatgcttatgtacttggcctgcttatggaatatggtgtttcctctagttttaatgttgcagatttgaaaccatatgcgggcgaggatgaggagttgccatcgaggacgactttgattcaagaaggggaggatgatgaggacatcaacccaaccaaaggaatggctactccaactgaaccagcacaggcgccaccaggaccactcactcgagctcgtgcacgtgaattaaacttcgtgatgattctgaaggatgaagggccagaagtttcctaa

SEQ ID NO: 54422 - DNA, 116 bp, Zea mays
  Clone ID: MRT4577_149635C.1
ctcgaatctcaagtctagcatgtgccctttatcactctttacctactcagggagtaatcatatgatcggcatagttatttgatgggcccatagtcaccctattgtcacctaatacc

SEQ ID NO: 54423 - DNA, 292 bp, Zea mays
  Clone ID: MRT4577_149636C.1
tctctcgagcactttttttttttttaataacattttatattggaccggtttaataatcaatcggtgaaaatcctccttaacaatcaaaaattttatactctactcaatgtaaaaaccataaaattattaaaaccataaactcataattactgttactgccaattcactaattaaacttatcccatatctataaataatccactatatgtttacaaaactctttccattgtatcctacataattacatttaataattttctttatccacttcattacactcacttcaccactt

SEQ ID NO: 54424 - DNA, 787 bp, Zea mays
  Clone ID: MRT4577_149637C.1
aacaagcatatatatcaccaaagctggacgaagcaaaccgagccaaaacgacgtgtccagacacgaaaatacacagcatagcagtcgtcatatagatatacagtgaacaagtgatcgttggtccatggcagcctcgccgctgccgagatgggcgccgacaccaagcccgaccagaccactcagggtgtcgagcgccggcgaccaaacagccgtgtcttggtcatcatggagctgggcattctgccgctcgttcatcggctccgccgtcgtctacccgccgtggaggcgctctacaccaccgccaccgccagcgggtgatccggcggcggccaatgctgctgcggacgatggtcgtcgtcacggccggttttgctctcatccgttggactgtgttggagccagagactgcagccttccagaggacggcggcggcggccgtgaggtgttcctgacatgggaggatctttcggtgacagcgtcgtcgtcgactggcgggaaggcgaaacccgcggtgattctcgacaagatcagcgggtacgcgcgccctggtgaggtgctcgccgtcatgggaccttcggggtgtggcaagacaaccctacttgatgccctagctggacgacttggttctgacaagaaaaggacggcgggtaacatcttgatcaatgggcgacgagagaaacttgcctttggaacatctgcctacgtgacccaagagacgctgctgatggcgacgctgacggtgacggaggccgtccactactcggcgcagctgcagctgccggactcg

SEQ ID NO: 54425 - DNA, 891 bp, Zea mays
  Clone ID: MRT4577_149638C.1
cggacgcgtgggcaaacacctgggagctaatctgaaggacattctacgggtccctgatactttcttggaaccaggatccataattcttaatgggtccaaccttgccgcaaaaagaggtgaacgcctggctgttgctggcttttatggattcctgaaaaacctggccaaagccaaatggcttggtgactttagccaacaaaggactgtacttgctattgacggtggcttatccaagcactacaggaggttcagtgcctgcctataggcaaccctaacagacctgctcggcaaggaggttgcctaatgggttgttgccaagttggccaacgacggttcaggaattggagttgccctttttgttgtttcgccctcccagtttgttgaagctgcatattttaggagctcgggggtcctagtgtacctttttttttgtttccccccttttcccccttcaatggaaaagcccccctcgtgcgattggcatttttttttttttttccccagcagggggatatagctaggatggggcccttgagcttggggtcctttttccctagccccaagcttttgcaggggcaggaaaaaagtggaagcgggggccttaataaaccgttcctttcctgccgatttttttttttcccaatcccttgaagtttgttttttggggggccttcccaaaacagccggtttttatttgggggatctcgtctttccccccccggagaagggtggggggcccaatcaaccagtgctttaccctttttttttgaatcgggcggggcttccgcctttttttccaaaaaaaaaaaaaaaaaaaaaaaaaaaaaaaaaaaaaaaaaaaaaaaaaaaaaaaaaaaaaaaaaaaaaaaaaaaaaaaaaaaaaaacccacg

SEQ ID NO: 54426 - DNA, 212 bp, Zea mays
  unsure (1)..(212): unsure at all n locations
  Clone ID: MRT4577_149639C.1
ggcggncgagcggccgaccgggcagggacccnnncacnncncgnncgnaagcagggcgancacgcancancaacgcagcngcancnccanncaagggaccagaaggaccaggacacaacagaagnggcggaaggaagaccgcgaacacagggacaagagcaaacaccgggccccaaggccggcngacgacanccaaacagaccgaaccagac

SEQ ID NO: 54427 - DNA, 274 bp, Zea mays
  Clone ID: MRT4577_14963C.1
atgctgggttattgtggcacaggtccaatgcgccaatattatatactgacccaactcttggtggttcactcatgcgtgatggcactgagtatgtcacacgttactctcgaaagtctctgccagtcctgccaagtgctggtgagccaatcaatcctagtgcatggagatagttctacaatactgccgaggattcccggggccctatatacaccctgtggcgaactgaactggcgggttcatgatcaccccgatggctggcgcctgccctgaaaaa

SEQ ID NO: 54428 - DNA, 107 bp, Zea mays
  Clone ID: MRT4577_149640C.1
tggcgttttagcagatagggtcataccgaacaggcttgcaaagagcggcgcttccaacatgtgcacaggctcaatggctaatgggacgcactctgtaccggcgcatt

SEQ ID NO: 54429 - DNA, 389 bp, Zea mays
  Clone ID: MRT4577_149641C.1
acccacgcgtccgcctacgcctcggctgacgtgtgggaggacgagtgggtgatctttccggatacctcacgatgctcgcagtaggacgtagatgataagttgaagttgactatgaagcaaatagccatgcgtatgtgcgggatatttacaaggagatgagccttgtgaagccctctatgagaaacaacacatgttatgaactgaactgtagaggtgatactgcatattgtgttacaaactgctatcacatgtttcactgatcagttgagatgttaataatatatacatctgcgttaatcatgtacagattgacgcgatgcatatgttggtcctgcgaagtgtgatcaattatggtattgacgtacgtacctactgagtgtcaaatgagc

SEQ ID NO: 54430 - DNA, 1682 bp, Zea mays
  unsure (1)..(1682): unsure at all n locations
  Clone ID: MRT4577_149642C.1
ttttgggtacccctcgagccggccgagnacggccgcggcagccgcagagagacaggtggacacgacaggagtacaggacaccgccccgaagcggcacctgcaaggcggccgagaaaagcgcagccctgcgccccttccacgactcgaggggggggccacctctccctctggtctcctcctccacttgctcctgctcctccagacctccactccacccctccaaaaggtctagtaaaatagaaggaagccgccccccaatcgttcctagcccggcgcacggcgcacgaaggggttcgatcggatcggcgccggcgggggcgagatgtgggagtcggtggcgctgacgctggcgggcaccgccggcaataacatcggcaaggtcctgcagaagaagggcaccctcatcctccctccactctccctcaagctcaaggtggtcaaggcgtacgcgtcgaaccagctctggatcagcggtttccttatggacatgtgcggtgccgcgctcatgctcaccgcgctctctcaggcgccggtctccgtcgttcagcccattgctggttgcggtctcgcaatactctgcgttttctcccatttttacctcaaggaggttatgaacggcctcgattggattgccatcacgctagctggtctcggcaccataggtgtaggtgttggaggtgaggaacagaaagttgaccagatacctcttttaaatataccctggctagtgctctccattgtcatcttgtttgtactgctcaacacttggcttcatatgtataaaaagcaaaggcgtgagcaagagttgactggacctgaagtgattgaggagatcatatatggcttagaatcaggcattttgtttgggatttcttcagtgatctctaagatgggatttgtgatgtccgagatgggttttccaaagattgttgtgcctgctgccatatcttgtagtgtttgctgcagtgcagtgggatttgtgtatcagactcgaggcctcaagcatgggagggcaattgttgtatctacatgtacatcagtggcatctatagtgtccggtgttgttgctggcatgattgcacttgatgaacatctgcctaaagctcccacagctcgatttttcctcttactgggatggttcttcatcatcacaggagtaatactgcttgttagttcaacccgattgattgcgcgtctacctaggtctgttcagaagtatttgaagagcaacatagagcgcacccacagcatcaggaggcctggttcagcacgagggaaggatcccatcccaacaacaacgatccatacgtcgtcactacacttgcttgcttctccaacaaaggagaaggcctagaaaaatgttggcactagagcaacttcgtttgggcacctcacgtttgccatgttattgattgattgaatggttccgtgaacgtagtctagagtagcatcttaaaagcttgggttggttattcaccatactgccctttataggtctaacagaaacttggggaaaattgctgagtttttatcaggtctcgttttttgtttggttgctgagtgcaaaatctgaagttgttactctccgacccttaactctcgttatggaaagtatgttggtcaaactttctttaagtttgactagatttattgatttatttattaatatttgtgctttttaa

SEQ ID NO: 54431 - DNA, 246 bp, Zea mays
  Clone ID: MRT4577_149643C.1
ctgacggtgggtcgacccacgcgtccgcaactccaacaaactcgtgttcaatggccatgagatctacccatctgctgttgtgtccaaaccaagggtggatgttcaagggggcgatttgcggtctttcttcacattggttatgacagacccagatgttccaggaccaagtgatccatacctaagggagcaccttcattggatcgtgactgatatacctgggacaacagatgcctccttcgggcgaca

SEQ ID NO: 54432 - DNA, 202 bp, Zea mays
  Clone ID: MRT4577_149644C.1
tcggttccttccgcggactaggtttttctgaagattcggtgatggcggccaccatccaatccgagaaggcgcgccagatctttgacaggcgcggcaaccctacagaccaggtcgacccggtttgcttagaccgaacctttgcaagggcagctgttcccagtggagccttaactggtgtatatgaagctcttgaggtgaggga

SEQ ID NO: 54433 - DNA, 988 bp, Zea mays
  unsure (1)..(988): unsure at all n locations
  Clone ID: MRT4577_149645C.1
ttctgatttgcataaacgttgtttgtgctttaggtatttcagtaatgccagtcatccaattttatcttttactaagttcaacattgagatggaccataaaacatacctctgtcccaaaatataggtactcctaggtttgagtcaaactgttttagttttgaccaggtttattacgaaaaatatctacacaagtacattgtaaaaagttattttataattggtatagcgatactaatttagtgttctacatgttgataatttttactatgatttagtcaaccctaacttcgttttaaccaaagaattttgggatggacaaaatggttctttcaataacccattgttttgttttatatgttgatcagctcatcacaatggctttgatagtgactttgctttttaaggtgcagtcaatacacatggcatctagcaaatcatagaagaagctatttgcagaagaagttatttgcacaggaaacaccatgctattgccacccctctccgtggcacctgatggattcgttctttggggaaacattttgttggctaggaaacccacttattccgcgtgggtcaccagcatctcttcgaatttgaatcaagtaaaatgtcaaagagaaaacttgttctggggactgttcactgancttagcggattatgcatctgctagataatcctaccattgtctgtgcctagcagtgcaacagacctggtcccatcactccatcttactttaagcctggcagaagtaagagtatctcaacagtcacctggtgcttcacagtgttttattgctgtcccattgtcaccttcctctgccgactcggttccttctggaaaagattaggtttctatcattaaggtggtcttgagaaatataaaagtcgtaagagataccgtgcaaacacggaggttcagaaagagtcaccaagactatgacgacagtgagatgtattgttttcacatttattgttgcagagttttctt

SEQ ID NO: 54434 - DNA, 475 bp, Zea mays
  unsure (1)..(475): unsure at all n locations
  Clone ID: MRT4577_149646C.1
cacgcgccgccggcggcgcgcgacgcccaccgcgcagccagggcggaacagacngagaaggcnnnccncaagcagccnaaggggggccncagcgcaaagaaagcnggcaagggnaagaagccaggcaagggcggcaanncgacaaggaagagcancggccnnggnnccaagacggcgagggaagcaagngaagggaccaacancgacaagaaaggncgcagcacgggaaccgcagcaagcagaggcagaanganngcnggaacangccacagngcnaagaagaacagaaccaccanggnacgcaggaacgaacgccacccagcgaagaaagaccagaggnangaaaagaggcaccgcaacaagccagcacacagccccccaagcccccgggagaaggaaggcgaccaagacagcannggccagngcaggcccccaacaaaaacngcgaggngcaaggggggcaaagacagaccag

SEQ ID NO: 54435 - DNA, 226 bp, Zea mays
  Clone ID: MRT4577_149647C.1
ctggggcggagctcttagaagactgctatttattttctagggaaaacttacacttggtgaaacaaaaggaaaaccaaccgggggggacgaagaccaccccaaaacccctgcttttggtcttttgcaaggggccaacttccaggccggacgacaagggataaaccccacccgggtttataaagacacaggactttgagaagcttggaaaggccaagacttgaaccta

SEQ ID NO: 54436 - DNA, 195 bp, Zea mays
  Clone ID: MRT4577_149648C.1
cgcatgccgcgtcgtaacttggacctctagacgggcgctcgcgatctagtcctgtgcagtttggaactgacatcatggaatatgtggggtattccacaagcatataaataggaggtgtttagctattgatgatggaccttgactgagtaagcacctggtagcaggggctaaatctaaaccacagggggggggggg

SEQ ID NO: 54437 - DNA, 450 bp, Zea mays
  Clone ID: MRT4577_149649C.1
ggggggaaaccccctggcccgggattttaaaagggtaacttaaaacgggttaaaaaaaggcgggcagcaggaaaaaaagggttttccaaccgcccccaaagggggggggggggggaccccaaacaaacggaaaaacagccccaggaacggggaaaagccgttccccaaaaaagggaaaaaaaggttttaaaaccccaaaaaaaagggtgaacttgggggggggggggacggatataaaggcaacccccattggaaaaccaaaaaaacggggggaaaaaaaaaaaagagccctaaactggggctttttaaaaaaaaaaaggggcaaaaaggggcggtttgctaaaaaaaaaaaaagggggcaacttttttgccggaagcaatttccagggggaaacatttttgggcccaaaacttctacaggggaaaaaagggtaacccccggcttggcaa

SEQ ID NO: 54438 - DNA, 309 bp, Zea mays
  Clone ID: MRT4577_14964C.1
ttttttttttttctttttttatggattaaagggatcaacgacgggaaagatcactgtgatgtggggatacttcaaacacaacatagggagagataaccaattaaagccgatccatataaagatgcccaagctttggttatgagccgctgctaaaaaagacctctttactcggcgccgtgaaacaaaaccaaagccgcacacacctatcattttatgcctgctctatgcaagatgaatagccacccaccaaggtcattcttttggattgggggttcttggacatgaaaaacaaatggaagtattggggcc

SEQ ID NO: 54439 - DNA, 108 bp, Zea mays
  Clone ID: MRT4577_149650C.1
agttctataaaactcttaagatgtatgctgaaaaagcataaccaggtggtaagcattggggttgcgggtcaagattggaacaaccgggaaacagactgatgtaaggag

SEQ ID NO: 54440 - DNA, 219 bp, Zea mays
  Clone ID: MRT4577_149651C.1
cttcaccacctcatacctaccttcacccatcactgatttcccactcaataatcaactcaaccctcttgaaaatattaccacatattatatcttgacacacatcacaacatttactttaataagatcactcccaacataaaattaaatatgccctctcactcctccacaatctctcaataacccctacatacagattacaacaatcatctcatccccata

SEQ ID NO: 54441 - DNA, 151 bp, Zea mays
  Clone ID: MRT4577_149652C.1
caatcccacccggcagcggcgcgcgcaagtgccacccacgcagctctcggcgcctcccgcatcaccgcctgcgcccgactgcacagcagggcccgcgtcgtccaggcacggcgtgcagaggctggactgcgccggcttctccgggctcagg

SEQ ID NO: 54442 - DNA, 683 bp, Zea mays
  Clone ID: MRT4577_149653C.1
attgggacctcgaggcggcgggagatgaggagctgggagctagagagaaacacagggtgcaccgagcaacccaggacagggaggaagggacgagtgactcatcagactaccgcttccggcgaacttcaggcagatggcaggtcggctgattctgggaggacatgatgagggagcacagcctcctgcaggggacgtgcgatgacctcttcgaccacatcgacgacctcctcgacttccccagcgaggactccgccgtcgccgtgctcctggtggacatgccggtgtccgggagcccgttgtcggcgagcatcatcaacgtcgtccgcgccgtcaagtgacgctcgtcccgcctgctgcccccgggcagtacgacgcttccgctatcgccttcttcaccggcacggcgaactatgcgtccaagaccaaggactgcgtgctcgacaccgtctgcgtcgtgcgacgacattgacatggacatggcgaagctggagtggttgtcggggctcttatacgacgcctccatcccgcaggatacggtgttatctggctcgtcggcgggcggcgcggcagccatcatgaagagctccgcgctgtcggccggagcgctgctggctgctgacaaaatgtatgacgcgctgctgttctcctgtccagcaccatctccgtgctggagcctgcagtga

SEQ ID NO: 54443 - DNA, 744 bp, Zea mays
  Clone ID: MRT4577_149654C.1
agcagtggtaacaacgcagagtacgcgggataaatacactagttttgatccaaaattgcaaaaagcttaccaaaacaaataaacattctattcaaataaaacctcaagtcaccacatgaaaatgataagtgaaatattaattatgttgaaacttcgatacataaaatgatttcacatgtaactcacgcaataagtgggagtagaatggaagaaacaccaacatcttgtggattttatagtccaaatgtttttgagaactatatgtggatatatgttgtgtccctgtaaaaattcatgaattttttaggctatttggtgtattattaatttcttgttgtagaaaatcatcaaaatacaattaaattcataaaaatattgtagcgtcgaccgaaaattgcaaataagttaccaatattaataaatagtttataaaaagataatcctaagttctcacatggatataatcttaagtccccacatgaaaatgataaagtctattattttgatataaatttagacattattttaatgattttggtctaaagatatgtttaaacaaaaatgtgatgtactacaaagttatagatctcttcgagctctacaattttcatataaactttatcttcatccgatttcatatgtaaaagttatgattttataactatattattatgccgaaaaaaaaaaaaaaaaaaaaaaaaaaaaagtactctgcgttgttaccactgcttaccgggtagtact

SEQ ID NO: 54444 - DNA, 363 bp, Zea mays
  Clone ID: MRT4577_149655C.1
agcttaaccggacccttggactgatatcaaattcaaaacctttgcatatcacatggtgcttggaacgatccgatatccatatgtactaaactctgcgcttaactatcgcaactaggaacacaacatgcattgagctagggaaacaacagaatgtcctactgcttgcactctaaatgatatccgattttgttgggtcactatcactgagcatgacttttcggtgagttcttctccacgtgaagccttgttctatcccatcacgcgctgatcaaggggcttgaccttactgttgcctttatgtcatacatgttcttgacagcggccttgaacttatacttgtctgccttgatgtgaacaatgaaa

SEQ ID NO: 54445 - DNA, 689 bp, Zea mays
  Clone ID: MRT4577_149656C.1
ccggccgggatccgacccttcgagcccacccgacgcgacgattcctctcctccgaccgttcccaccgatatcacgctctctctcttcctccgccgcgttggcgtcgtcatcgccggccatgggttgcggtgcctccaaggaggacgtggccaccggatacaccagcgctcaggaagcaaggtcgctctcggaggaagtcctcactctcgtctccaccggcgcaagccacacctccaccactgtacgacgtcgtcctccggcgtcgtcataaaggacgacttgaaggatgcggcggcgtgcggcgaggtgatgacgcccgcctactccaagaaggctatctctgtcgatcctgatacaaacggcagtatgtgatgatgaacctgaataatcaggaaatccacaacacaggtgtacatcgctgaaatgaactattactctatcgctccctaccaattagactttagctgcaaaggcttcggctccctgtgaaaaaccggtctcaacgacaagattcgccactgcggcatcatggacgtccagttcagaaaggtgcgatgcaagtaccccgccgggcagaagatcgtgttccacatcgagaagggctgcaaccccaactacctggacgtgctgggtgagtatgtggcggacgacggcgacatcgtgctgatggaaatccaggacaagttgtc

SEQ ID NO: 54446 - DNA, 303 bp, Zea mays
  Clone ID: MRT4577_149657C.1
gagcggcaaaaagggggcttccactttgaaccctcaacgggaaacctgagcccgagcggaccggcccaaaactggggcttttttgcaaacaaaaaaaatgggggggcagcttcgggacaagcaaggccttttcgaaacagagggcaaacccagggcggggcaaatttcttcccagcttcccgggggacccctaggggccccaacaaaggggggagcttcctcagggccccccccgggcccctcgggggggccttctggcgatagccagaggcgggcattttctgccccggggccttctggggc

SEQ ID NO: 54447 - DNA, 767 bp, Zea mays
  unsure (1)..(767): unsure at all n locations
  Clone ID: MRT4577_149658C.1
cggtccggnttccgggtcgnccccgcgtccgccccgcgtccgccccgcgtccgccnccgcgtccgccccgcgtccgcgnntttgctttgcctggcttaagtttatgacaaaatcgtcgcattgctcacattctctttaatacagtcctggtgaccttgtcgcataacatgagcagtcatttagtatacatgagtgatgagtcgtgaggcttctcataatagagcagtgttcctgcacaaatgggagaaagggctggtagtctcacatgcaaagagtccaggagcagccacctatgatggatcataacccaacagttgtaaaagaaatcaatatggggagaatttctcttggaccaacttatttgatgatatctcttgctttgatatccaccttcaggcatcctaggtgtgttttgtttgtcctacaaggcatgcattatgtcttggtcaatcttttacttccattgctgcatcatggggctttgagaaatactgcttccttgacttgtccttttgctttcattgaccaaacacactttcctttatcatcttgcaaaaggcatgctgtttgagcaagacataagttatacacataaattttatgatatgcgtggactgaagctaaaaggctttttaaagctaccccaacttgcttgggataaaaggcttttgttgttgttgttgttgcatgaactgaaggatcttggtagaatttacagagaaatgctgtagcgatttgatctgttgcaatatcaatgattgagttag

SEQ ID NO: 54448 - DNA, 237 bp, Zea mays
  Clone ID: MRT4577_149659C.1
gggacccaaggcaaaaggggtaccccggttaaaacatcctgttttttaaaccccattaacacctttaccccggggggtttttaacagaacaagggcagagccaaaaaccccttaaagcaatcccacccaggggtggccccctaccttttttaagggccaggttttcccaatttgggaaccttcaaacctgccctaaataaaaaatttggattgggtaacggggcccaaaatataacc

SEQ ID NO: 54449 - DNA, 612 bp, Zea mays
  Clone ID: MRT4577_14965C.1
cggtcgcgtgggcggacgcgtggggttgtaactagttgcttgggtctctcaactcagtgggatgtaaatacgaacactacctatttttctcaaaacatggctttcactcaggttctaattttcctctctttaataaatcttaagctggttctccagtttttcagttcttgtgtgtctagctcaatttaaaattcaacctcaggtcctgtttaatctcatttcttccctatcccaggtataggacaagttcatgatctggctctaagagatctctccctcttccctcttcaaagctgggttctcctagagggcagggaaaagggaaagggaaaagggttcatgcttctcaactgcattgacagtggttgtgaccctctccctgatggttgatgctgtttctctggctgttactgaccagttcttgacatcctgtctatgagaggtgatgaaagactggccattaggggaacatatatgtgagttctccagaagctgtgcagggcatgcccacagcagtattccctgaccggctgagaccagctcttcctcagccattctgagtctcaacattggtgctgccagccacagcatcttgctaggaagaaagctact

SEQ ID NO: 54450 - DNA, 247 bp, Zea mays
  Clone ID: MRT4577_149660C.1
gggggagcgacgcgttcgaaaaaaaataaaaaataatataaaaaaattttatttttataaaaaaaaaaaaatataatggggcgggggttttataagtaccaagctttcttaccctttcttgcaacattatactttttttatagttgaacctaaattcatttcactggccgacgttttacaactttggtactggtaaaacccttgcgtaacccaacttaattgccttgaataacattcccctttctcc

SEQ ID NO: 54451 - DNA, 535 bp, Zea mays
  Clone ID: MRT4577_149661C.1
attgaccaatcttgcaaaatgagttcgcgcattcatagcatttcagcaacaaccctaggacagcaaaccctgacatacaaccataacctgggacttccaattaacaccctgacaccacttaagcacacttttaggaaattaaagcgcaacgggccatctggtcgtgctaaaaagcgcctacattatcaacgacgtgatgggacgaaacctgacgacgacaaagccttaggtggccggtcaatataggaaggaacaacacccctgggggaatgaatacatgcatgaccggattcacctatagacctataacgtccacccccccttgtgctgcctttacatcttgataaccagcctacatcattttccacaaaatattttggataacgaccagaccactaccttgtctttcagtgtaataattatctgacaaatttttattacatgacaactgaatgatgagttggccagacgctagaggcttttcagagggaagaagaagaccgtcaggtactcactattgtacaccatgttactg

SEQ ID NO: 54452 - DNA, 515 bp, Zea mays
  Clone ID: MRT4577_149662C.1
cccacgcgtccgggatattaggagcacaattgaagaccatgtcaggggatttactgaacccacatcagacaaactgctaccagatctacttcctcaagatcagcatgtcttcaccctagttcttgatctgaatgaaactcttgtctactctgattggcagcgtgagaggggatggagaacttttaagaggccaggagttgatgcgtttctggaacatatgtcaaaattatatgaagttgttgtgtattctgatcagccacctatgtatgttgaacctgtgtttgagaggctgaactcaaggggtaccatttcacacaggttatcaagacctgcaactaagtacgtggatggaaaacattaccgggatttgtcaaagttgaacagaaaccctgctaagtgatctatctcagcgcccatgctcttgaatcttgcctgcagcatgaaaattgtgttgaaatcaaaccttttaaacttgaagataaaaatgatacccaactgctggatctcattccatt

SEQ ID NO: 54453 - DNA, 810 bp, Zea mays
  Clone ID: MRT4577_149663C.1
cctcgaggccggcccggccgggatcttttttcccttcctttttccctcccttctcccgcaagccacgagctcgctgccgcgccaatcgccatgtcgcgtctcctcctccgccaccgcagcttcctcctcccaggggcgcggagcgacgccagccaccccttcacggccgcctcctcctcctcccgctcctcatacacttcccggttctcccctctcgcctaccacgcctccgccgcggccacggccgcaggcgcccaatcagagggtgcggcggccgagtccacacccgcagcgggcgaccagccctcatcgacacctccccccgcggcacgcgggcggtggggcttgctcaagttcggcgccttggcagcagtcgccggggccatcggcggcgtcggatacgtcacctacgcctattcgctgaatgaagtggaggagaagacgagagagttcaggaagaacccaaggctgctcatccctgaggatgcctccacgttcgagaagtataaagctatggtgtactcgacggctatgaaagttcctgtttcagctatagagctgtatttggatattaggagcacaattgaagaccatgtcaggggatttactgaacccacatcagacaaactgctaccagatctacttcctcaagatcagcatgtcttcaccctagttcttgatctgaatgaaactcttgtctactctgattggcagcgtgagaggggatggagaacttttaagaggccaggagtgatgcgtttctggacatatgtcaaattatatggaaagtgtgtggtatctgatcagcca

SEQ ID NO: 54454 - DNA, 3319 bp, Zea mays
  Clone ID: MRT4577_149664C.1
ccggccgggccgggtctttttccttcctttttccctcccttctcccgcaagccacgagctcgctgccgcgccaatcgccatgtcgcgtctcctcctccgccaccgcagcttcctcctcccaggggcgcggagcgacgccagccaccccttcacggccgcctcctcctcctcccgctcctcatacacttcccggttctcccctctcgcctaccacgcctccgccgcggccacggccgcaggcgcccaatcagagggtgcggcggccgagtccacacccgcagcgggcgaccagccctcatcgacacctccccccgcggcacgcgggcggtggggcttgctcaagttcggcgccttggcagcagtcgccggggccatcggcggcgtcggatacgtcacctacgcctattcgctgaatgaagtggaggagaagacgagagagttcaggaagaacccaaggctgctcatccctgaggatgcctccacgttcgagaagtataaagctatggtgtactcgacggctatgaaaggtgcaaactaaatgggctcctctttttagtgttcttccttctgttttcttggaattcaagtgttattgttgcaaagtctttcttctctggagatcatttaatgtgcacttctgaacacatgtcctaatggcaatgtggtgatgctcgatgaagtaggctcttttttttgcagcatggacgaactgaatttcgttactcaaaagcaacgaaattacaagagttttgtacaccatagtacatacttagctcgaagtcttgaactaaacaagctgccagttgcactgaacacacagggttcagagagaaggcccccccccccccccccggctaagactagatgagcgatgataagagctcaccaccaaggctatgaagagtccgatttattacaagcctagattggatggagtaggctcatagaatgatagaactacttactgtttcttgtcagttgtcttcgatttgcataatcaataattcatgcaaattactttaggaatagttaaagaattactctgagacagtgtaaacacagattctgttgttattggattatgaagtgggtcaatgcatgcatgttggaaatgaatatatatgaacctctgtaaagcattcatggatttaacattagttaagatagagacatatgctctgaattgtaacatttttctgtgctgaattgctatttgtttccagcttagctttgttggatatgtttttatcttttgtaccttcttgtccttactaagaggtgtacaatcttgggccgcagttcctgtttcagctatagagctgtatttggatattaggagcacaattgaagaccatgtcaggggatttactgaacccacatcagacaaactgctaccagatctacttcctcaagatcagcatgtcttcaccctagttcttgatctgaatgaaactcttgtctactctgattggcaggtatattgtggcatcgtaccctgttctgttgtttatttcattatttgtgccaccttggaatccaaaaacatgatgtcataaactcttaatacataaaagacaaacatctggcactatatttacatatattttgttttagtaaatagtttagtattgtaatattgtaggcccattatccctgccacacaggaaagagattatgactagtggcagtttgaatggttgaatagtagggtgtagtttgtgttccatactaatgtaatatactgtaggctatgatagatgatcttaataatattaatatgtacaatttgtagtgcctgtgcagtttagcgtaacctgaaaaggtgttgcttactaggttacaatgtccttaatcaatatcttgtgctacatgtaacagttgtcctccactatattcttgtacaagtaacatgtggtttctgatgtttcagtgccaaggcgcataaatatggtgcttaattgtgtatacatcagctgaaactgtagtagttatgagttatacatgtggtccaggcttatgcaagtccacaacatgcttttgatattttttcacacattgtgatactcttttcaattgttcccatttttctttgtgtatgcaaataatgcgctaaccactgttcttaaggcgtcgcttaggtgtccaggcggtggtccaatgccttgtctcgccttaccgctttaaaaaccatggcgctaacgatgttcattcctgtctttatatccctttttttgcaaagcgtgagaggggatggagaacttttaagaggccaggagttgatgcgtttctggaacatatgtcaaaattatatgaagttgttgtgtattctgattagccacctatggttagttgaccttttcctttgcatttggactattatttaatgttctaacctgtatgaatattttgttggtgtgcagtatgttgaacctgtgtttgagaggctgaactcaaggggtaccatttcacacaggctatcaagacctgcaactaagtacgtggatggaaaacattaccgggatttgtcaaagttgaacagaaaccctgctcaagtgatctatctcagcgcccatgctcttgaatcttgcctgcagcatgaaaattgtgttgaaatcaaaccttttaaacttgaagataaaaatgatacccaactgctggatctcattccatttctcgagtatgttgccatggctagaccttctgacattaggacagtgctggcatcctatcaaggtcatgatgttgctgctaagtttattgagcgttcaaaggaacaccagcggcgcgtgcaggaacagagcaaacttgggcgcttatggcgacggtgatggatcctggaaggatagtggactttctgatttgtgaatcctagacgtcatgttttcgaaagagcgcatggaacctttttattcttgtccggagtcaaattgttggctgctgttcagggatatcttagttttggcagtttaggtttgggcctttttataaaatttaggcattctagtgagaacatcggttggattggatggtcaatgctgagacttttgagaccatgtgactcaaaggttgctatgatggagctgtcaaaacgtgcttcatgcggaagactgaaaagcgattgttcatgggtcatcgtagcatcttcggtcaatattttcttggattgtttggtttcgcaactactactctcagatttatggacttgaagggcttttgtatttttgtcgacatgtaagagcgcatcacataatactggatttacctgagaattcatgtgagatacatctagtttctggcacttaaaaaaaaaggggggggg

SEQ ID NO: 54455 - DNA, 478 bp, Zea mays
  Clone ID: MRT4577_149665C.1
aaaggcccgggcggaggccccacccgtccgcccgcgcgaggcgtacaagcaagtccaaaacttcgactggagcagcggcgccgactggaagaccgccgccaacatcctcttcacggtgccccctaagcgcaaggagttcggctgtctatttagtggcccaatatgcacggagggagatcaaaaggatggaaggggaagcagaagagaaaaggaaaaaagacgaggaacttgagaaacaaaaacaggtcgaggaagaatctgccaaggaggatgctgattcaaagctttcgaaggtattagacaggctagatacactagagggtgtcgttaaggagattgtggatgacaaaaggaaactttcttcccctgatttaccgaccaaagaggaggttgcaaagaaaaatgaagcatctccggctaaggcttctgattccagaagctatggtcagccagtggtggctgccaatagtaaggacac

SEQ ID NO: 54456 - DNA, 920 bp, Zea mays
  Clone ID: MRT4577_149666C.1
attgcagcgcttcgtagtttcaattacagccaacagtactcgaaattgctgcaggggccttctctacagtatttcatttcaaaaaaaacagaactcgaaattatcagtctgtacagcaggccacacagcagggcagcctgaactttgcatctgcaaaattccattagattgtgaccccactaaacattacagatggaagaacatctggcactagtaggtgtgaaacagcttgaatcgtgctcagagcttagcagtgcaagggaaacaatcctgaaaagttctttttttaatcccatttcccatttgaaactccactcctcaatagttacgggttcttcagtcctgaacagttactaatcatcatcctcatcgtcaataaccattctgggtcttcttttcaaaccagcccttcccttagcatcggagtttgttgctttccctgattcagccataatttcatcatcagggatcctttggccagtatgctcatgatcatctagctcaacttcaaaatcatccaaaagttcagcttcaacagtattgccaccgttattgactagctcaatttcaaaatcatccaaaagttcatcttcaacagtattgccactgttattgactggatcagacccatgatttacagaagcatccatgattttagaaccaccagtttcatcttgggggttaatatttctcaaagactcttgggcttctacattcgctgagaaatttgatgtcactaatctcttctttttcacgtttctaatgattgatccaatggtctcatcatcaggataaatgtcttgcaatgctttctcatgttgggatataatcggtgaacagtccttggctttggtgttgtctgaagattcttgatggtttcgtacattcccttcaaaatctgacgtggataacctcttctt

SEQ ID NO: 54457 - DNA, 994 bp, Zea mays
  Clone ID: MRT4577_149667C.1
tcggttcgacccgatgcttccggcgctgcggcctcgccgccggctcccggtggcatccctcctccgccgcctcctctccgactccaccccctcctcctctggcactggagagagtgatctgatggccgcggccgcagcgaaggcccgggcggaggcggcagcgcgggctcgggtggaggcgtacaagcaagtccaaaacttcgactggagcagcggcgccgactggaagaccgccgccaacatcctcttcacggtgccccctaagcgcaaggagttcgggcttgatttccaccttgtgcagctcttctttgtctgcatgccatcgctagctgtctatttagtggcccaatatgcacggagggagatcaaaaggatggaaggggaagcagaagagaaaaggaaaaaagacgaggaacttgagaaacaaaaacaggtcgaggaagaatctgccaaggaggatgctgattcaaagctttcgaaggtattagacaggctagatacactagagggtgtcgttaaggagattgtggatgacaaaaggaaactttcttcccctgatttaccgaccaaagaggaggttgcaaagaaaaatgaagcatctccggctaaggcttctgattcgagaagctatggtcagccagtggtggctgccaatagtaaggacaccaactatgcttcaaatgctccagcaaatactgcaaaaccaaacaataaggggattggtgataaggcatttccagttgagtccgaaagttgataaatcatttgagtttttttaaaaaaaacacaaaattggtgtccagctatgtagtcgtgtcctcgatgctaagcgaatgaaaagatgtaatttccacaccttaggatatgatgcgtcttaggaaaaaaaatacagtgagctaacgttttgtactacatagccccttcgatagttgaggctgtgatcttggataatgattaccacaaaatctttctgcttaaaaaaaaaaaaaaaaaa

SEQ ID NO: 54458 - DNA, 318 bp, Zea mays
  Clone ID: MRT4577_149668C.1
gacccacgaatccacccacgcgtccgcaaaaagtactgtgacatggacagcattaatttctggttatgcccaagataatcaggtcgaaccatgtctccatttatttgcactgatgaggcagtctgtgtgcaagccaaatgacaccacatttggagggatcttgattgtctgcacaaatcatccattccttgtccttggaaaaattttgcaaccccaacaattaaaaatgggttttggttccaacttcaatttttcaattccattgacaccattttatccaaattccggaacaatgtgtaaaccccaactgtttttttt

SEQ ID NO: 54459 - DNA, 299 bp, Zea mays
  unsure (1)..(299): unsure at all n locations
  Clone ID: MRT4577_149669C.1
cgcaccancgnccaggggcacgccgagggcgggggcgaggcggcggccggcgccggagcggagaacgaagggagcaagggcggccccaacngcagcngcaacccccgcaccngcaagcgagcgggagaanaacccccggcacngcacngcagcccggaggaaggacggacgccgggggggggaggagcagagccgncacggcagggcgggngngcccgagccagccagccagccgagcgccacggccccacacgcnagccgggcnggncccgccgggaaccaaccagaanggggcgggg

SEQ ID NO: 54460 - DNA, 630 bp, Zea mays
  Clone ID: MRT4577_14966C.1
atggccgataaggcgaccgtcgttccaccgcgcgacccgtggcctttctccaccattactgtggaggagctggaggcccttatcaccgatggtttgattcatcctctctccgacaggccgcagcctgagtggatggcccccaggagtgaggccaacccgactccgccgctggggtacgtggtcagtttcatccccttccacgagcgtgggtttgggatgccagcgagccacttcatgcgggcgctcccgcactactacagggtggagctgcataatttcaaccccaactccatagcgcaaccggccattttcgcagcggtttgtgaggggtttctggggattcacccccactgggacctgtggacccatctcttctccgaggagttctttgccgcgtcgacggatgtgaagaaggtccgtatggtggtgcgggctggcggctgcacccaccagctgaggtcggggcaggcagcgcagtacatccccgcctccattgtatcttcgaacaaggggtggcagaaccagtggttttatctccggaacgacgacaggatgcttccaccattttctcaacgagtggtgaccgccgccggtaataactggcgctggggggccacacgcgagaactag

SEQ ID NO: 54461 - DNA, 250 bp, Zea mays
  Clone ID: MRT4577_149670C.1
aaaaaaaaacccaccaggggtggcaggtacacatggaatataaattttaactaacattataagggacatgaccatttgaatcgttaaaataaaaaattttggaaaccgcatacctaataaattttaagaggctaaaatggttttttttttttatgtcagctggataaatttatcgaaactaacataattttgccatcgaaaaataaactgacttgagcggaatatcctataccgagtaaaaaaagatttt

SEQ ID NO: 54462 - DNA, 196 bp, Zea mays
  Clone ID: MRT4577_149671C.1
gggtttttttaaatcttcggggggttcattaacaatagccaagggccttaactgaataacaagaaacgctgctcgctccacctccaacgcattaccgccatttgtaacctaaaacttatggggcgaaaaccacttccttacaaaactgctcctgctgtgtgcccccaacccaaatcaacgccccatgcttgcaccc

SEQ ID NO: 54463 - DNA, 335 bp, Zea mays
  Clone ID: MRT4577_149672C.1
ctcatcgcgtgcgcccacgcgtacgcggataggggtttgttacattccgggcgccgcacgcggcgatgagagcttgcgttgatcccgcaccggggatggatgggaggaggggtaactgaaatcttgttctccttggtgtgaaaagacctaggactgatactccgctgtatggatgagctggatactgtcgagtcacgcattccttgaatccgatcttcgaatgacaaggcggactttgggcgagcatcttttagcctgacggctttaacggttatgccgttcgacacggacttgcctgggatggttatgggttctctccttagatgcgagagtag

SEQ ID NO: 54464 - DNA, 310 bp, Zea mays
  Clone ID: MRT4577_149673C.1
cagcaagccagccaatgttttggctttataagccttcaacagattcaaagggacatgaactttactcaaccagtacctgttcctttcgctagaggattcctgaagttttggtccatgtttagaaataacaggaggaatgttctccctttttccaaaatcaagcaaatattcaacatttgttccttcaatgcgtttcctgcgaattataactttcttgaaaagcctagctattttctgggtttctttggtcataaggctagaagggagagcgctcagtatctcagtccacttgatattccattcaagttct

SEQ ID NO: 54465 - DNA, 331 bp, Zea mays
  Clone ID: MRT4577_149674C.1
gtacttcatgagtgacgcttacatggcgtgcgaccagcagtacaaattcagcgtggatgtgaaagaagccgagacagacagtgactcagattgagtccagaggcattcactattgcacagaggagagccgaacccgagttaggggcgtgtgcagtgcatgggacctctgcggagacctggccccaccccaccgtcctgcttttccccggcttccttggcgttcacacgctggctccagtgtctgcaggtgtcgggcacaaaccgtgtacagcattttgaggcgtggtctttgtacctccttttcagtctaataaaatgacttggagaaaaa

SEQ ID NO: 54466 - DNA, 417 bp, Zea mays
  Clone ID: MRT4577_149675C.1
ccacgcttccctctactctttcgttatttaaaagcttttttgtattttatagacggcatcccacggaatcttgtgggaggttaaataaagcttgttaagaccaccttcttttctgctagatcatcgttgaacaggattattcacaccgttcactgcaacaaaaattcgcaaaaaaaatctcctgcaaacaaaccaaaccattattttgagccgctccgggcccaaaatttctacagatggccttattcccggaaatttgaccggagggatcccacctctctgggaaccaaaaacaccacaccccgcgtacagaccccgctaaaaaaaaatggcggcgcacaaccagaacccctaaaacaagaacgcgcgggatatacaaacaaaaaaaaaaggttttttatcctccaaaaaaaccca

SEQ ID NO: 54467 - DNA, 1136 bp, Zea mays
  unsure (1)..(1136): unsure at all n locations
  Clone ID: MRT4577_149676C.1
tcgatcgaacttgtgtcttgacttgtatcttgtgatttttcacttctaaaatcatataaagggtgtggtgtaaagcagcagtgcccggtaccttaccagggtacgtgatgcatgcatgggtggtgctgtctgtatcgatgccgtcatccttttctggcttggcgcttcatatgaccgacatgtcacggcgcgtttgggtgctcagagctcgcgcgtcataacgtatcaagtactactactacgtgccgtgccaggtgttgcgtcaaaacgtaacaagtttctcccttccgttcttttgtccgatcgagtttacaagtactatactaccaaattggaaagctcgcggccggttgggttacgttcctaaagctttgctatgatcgcagcgaatactgaccttggttgctttctttctgtctattacagtgttgtaacatagtgtactgttgttggcagagtggtttacatgggttttctgcatgcttgacctcttgatttatcaaccagtttagatgagaatgctgctgactcggtatgcactgaccaggggacgcttcgaactgctcgtctcccgctgcagtcaataccgcaagggagaggatcgccaagcacatcgacctgtggctgtcgcaatgcagcaaaccatcagtagggtatatgggtctctgcctctggctacgttctggtgggggtgtgcggtgcctcgtggatttctgatcctgtgctgcttcttttctattgacgcagagcctggtaaccgcggactagtggttcatccactcgggaagagtggaaagaggtttggattggatgtcctggagcaaacttgtgtcgggacttggattacgtgtttgtgcactttgaaaagcagataaagctgatggtgtaaagcagcagtgcccggtaccccaccagggtacgtgatgcaggcaggggtggtgctgtctgtgtcgatgccgtcgtccttttctggcgtggcgctgcagacgaccgacgtgtcacggcngcgtttgggtgcgcggcgcgcgcgcgtcaaaacgttacaagtactagtacctactactacgtgccatgccaggtgttgcgtcaaaacgtaacaagtttctcccttcaaaaaaaaaaaaaaaaagcgggcc

SEQ ID NO: 54468 - DNA, 538 bp, Zea mays
  Clone ID: MRT4577_149677C.1
tggcctgtggggggctcctgttttaaggtgcaggaagaaaaaaaaatgatgtgttgttttatttttttagggctagtttcgcaagttcatttttctaagggattattatttttttcaaaagaaatgaattagcttttcttagaaatccctcggaaaaaagggtttaccaaactaatcctaaccagataaatgatgggtggttgagatggaggttgcagatccggcaacagatgaaaaggatggcaggcatgcagttgggcaggagatcttggctcgtaacgcccggcagacgtcgtcgtcgtcgtcgtcgtcttcatggctagtcgaactggtgtagttttgtaagaccacattgtgggttattttctttttaatgcaatctggttaaaggacagtaatgaggtcaccagtattatcttacctgctacgcgttaaaaaaaaaaaaaagaaaaaaaaaaaaaaaagtcgacgcggccgcgtgccggtgggcgatgctcggcgcggcgggcatcttcatcccggagttcctgaccaagat

SEQ ID NO: 54469 - DNA, 559 bp, Zea mays
  Clone ID: MRT4577_149678C.1
ccacgcggccgggatgctatctattttaccattaaactggagggggggctctggccaggaacttactcctgcagacatggcacttctgggggcctcacttacaggcgaataaccattggaactctgtgtatctcacttatggtgcaacatggggaatgccctatgtgacaatggaggggatcttgctaatactgctaccttaggaacaccaacataaggggtttggagtgacattaaacgccaagaacactctcaaagcgattatccaagactacgtggccataccacaaaagaccgcggaggggtatcacaactttcctgcggccgtggaccctttgaagaaagaactgtggcatgcgatataaactttcacccaccattacatggggccatacttcatggtcactagagtatctgtacacgaaacatacactgtctacatgaggatgcttctagacatgatactgatggtctatcgtgccatgcgtattaaatcggggctatggggcacttccaggtcattactctctaccatgagtgagggactaaaacattactt

SEQ ID NO: 54470 - DNA, 705 bp, Zea mays
  Clone ID: MRT4577_149679C.1
gattttctgatccactctccgcttcccgctccgatcgagctgctccctccgcaccaccgagcccatggcgtgaccacgctcaccgacgaccgtatcgccgagtccaaggaggccttcagactcttcgacaaggacggggagggtcgcatcacgacccaaggagctgggcactgtcgtgcgctcgatgggggaaaatcctacagaggatgaactccaggacatgatcaacgaggtcgatgatgatggaaacagcaccatccattgcccggagatgctcaaccttatgggccgcatatgcactgacatgacaccgactctgaagaagagctcaaggagtgccttactgtgtgtctagacaaagaccagaagggctgcatctcggccgccgagctccgccatggcatgacgaatcttggtgagaagctaactgcatgacgaggtggacgagatgatccgtgacggctgatgccgatgcgtgatggtcagatcaactatgaggagattgtcaaggtcatgcatggccaagagaggcacagaaccataatctgagggcagagaagattctgcgttgcatattagccaagatgcgactttttattccatcgacttctagtgaaacattctgctacgtgtagttgctgaaaatggcgctgtaggtcctgcttatgtcttccctccagtgcgtttacataactgtagtttcat

SEQ ID NO: 54471 - DNA, 601 bp, Zea mays
  Clone ID: MRT4577_14967C.1
cccacgcgtccgtcctaagcaaatcagggagcggggtgctaacaacataacagaagtatctggttatcctcatgtaagaccaaccgcattgcatgtgcagaacagttcaacttctaatgtatcacagtttgacaccccatcaccagctgcagcacagacttctatcatgccaccaccacgggggaggaatgtacatgcttaccagaatacaataagtggcgatgctcccactaagcagaaagctaatggagtaagccagccactcagaaggaaatacatggatgaagcaaggctaaagaaggtttctggaagggtgtttaatagcgatgcaatgcctctaagaagtcaaagacttaaagatacaacaacaaattcaaatacatctcaaattggaggaaatggaacagatcatttgtcaggtaaattgcgagtaaactcgtccacacaatcaaaattgtgttcaacagccatacgttctgtgcaagttaggaaaggaaaaccacgggctacagaaaattttgatgaaggaagtagatatgaagtcattgatgaaatgtggacagacaatatgtcaggaacttcatcttctgtaagtacagct

SEQ ID NO: 54472 - DNA, 494 bp, Zea mays
  unsure (1)..(494): unsure at all n locations
  Clone ID: MRT4577_149680C.1
aannnaaaannnaacttttccgctccgacacagagcccctcttgtaccagtaaaccgtgctgctatcccccgctagccgccgcgctgctgcggctcgcctccctcctccccagtccccacgccccgccgccgccgccgccacctcctctcgctccctccttttaccccgagcttaagctcgcgcgtacctgcctacctatccgtaggagaggaagagggggacaaggcccggtcggtcggtcgggggctctcggatctcgccgctgcctccccgttcgttcgttcgttcgttgggatctcgcgccatggccgccgtcgcgccgcccccggcccccgcgccggcaccggttccggctcctgctcctgccaccgtccctgtcgcggttatgattccaggatatatgggcgatggggtcttggtatggataacagggacaggcctaggggccgtaatggatactatgggtatggcaacgagagttaggatggatcaa

SEQ ID NO: 54473 - DNA, 334 bp, Zea mays
  Clone ID: MRT4577_149681C.1
gggacccaaaagcacaaaccccgggtacattcggaccactacttggcacagttcttcccacttaaaagctgaaatggtttgggcgtacatgcaggatacgaatgcttgttcccgatatttttggtttgcttgcgccccgggggcaaaagcccaactttaattgtgagctgccgttgtaccacatcaaaaaccaacttcggggggggtgaacgacaaaaaaacttctgtttggtaccaaaaaataatgtaagaacacgaccccccctaatggacaacaaaaggaattgatgggcaaggacattattggggggaggagcgacagcgaccacattaa

SEQ ID NO: 54474 - DNA, 416 bp, Zea mays
  unsure (1)..(416): unsure at all n locations
  Clone ID: MRT4577_149682C.1
agcgtggcctcggccgagtacacgctaagccgaattttgctgtactgggtccaattggcggtagatcggggcttgttacaatgcagtgcgtggtctttgacatcgatgttacttggaaaaccctgtcgttactttacttaatctgcttgtaccaaattctcttttggggcggtggatcactatttaagaggctggcacctttcgtagttggcaacatttgatcatccttcatagcgattggactcgctctgtggcgattgattaagcgctgtaggtgtggtttttacgcgcagtgtgtccggtacacttgctaattttttatcgcactntccatcggcttagttccctttctttcttgttacctccgtttgtttttcttctcaatctctcgatttccctttagctttctgggtccg

SEQ ID NO: 54475 - DNA, 813 bp, Zea mays
  Clone ID: MRT4577_149683C.1
attcacacagagaaatgagcgggcttttccgctccagacacagcagcccctcttgtaccagtaaaccgtgctgctatcccccgctagccgccgcgctgctgcggctcgcctccctcctccccagtccccacgccccgccgccgccgccgccacctcctctcgctccctccttttaccccgagcttaagctcgcgcgtacctgcctacctatccgtaggagaggaagaggggacaaggcccggtcggtcggtcggtcggtcggggggctctcggatctcgccgctgcctccccgttcgttcgttcgttcgttgggatctcgcgccatggccgccgtcgcgccgcccccggcccccgcgccggcaccggttcctgctcctgctcctgccaccggccctgtcgcggatcaaaccacggatctgctgcagaagctgtcgctcgactcgcagcccaagccggcggacgcaacacagcctgctgctgccaccgccaaaaagcagggcgccgcggcgagccagccgctgagcgtggcgatcccgccggagccgtccatcacgccggtgatccaagactttacggatcccaacctgttttatctaccagcgtattactacggaggctacgacagttccatgagcgagtgggatgattatccgagatatctaaattcagatggagtggagattgccccagcggtatacggagatatttatggatatgggtatgctccttacggggcatactctcctgccacttcccccagttcaacaggtgatggtcagatgtttggtgcacagcattaccagtatccagct

SEQ ID NO: 54476 - DNA, 254 bp, Zea mays
  Clone ID: MRT4577_149684C.1
ccaagcctcagcacctctccccgctcgtgtctccaagcagcaacgtcgcagatcctcttcttggacgcagaaacagggcaccgtcgtagccactgtctccgctcgtctccgggaacctgcatggctctctccggcgaacctctgtgcccatgataacgagccagatcgacgccgcctgctctagatcgacgttgtcgacctccgtcctttgtacgactgctccagatcctcgacgcatgatccagatcaaaaca

SEQ ID NO: 54477 - DNA, 1348 bp, Zea mays
  Clone ID: MRT4577_149685C.1
cattggtacctcgagccggcgggctgtttgtatgatgctgcaagtctttgtcattaaatcgtacagtgaggtgacatccacaagagtgtaaaatacaatgtgtgggcaagcacaaccaatggaaataagaagctcgatgctgcttatcaagaagctcagtcgaagggttctgcgtgccctatattcttgtttttctcagtgaatacaagtgggcagtttgttggtcttgctgaaatgacgggggctgtcgattttgagaaaaccctggggtattggcaacaggacaagtggaatggttccttctctgttaagtggcacattgtcaaggacgtgcctaacaacattctcaaacacatcatcctagagaacaacgagaacaagcctgtcacgaacagccgtgacactcaagagatacacctagaacaaggccttcagatgctcaagatatttagggagcatgtcagtaagacgtccatcttggatgacttcgccttctatgagagtcgccagaagctgatgcaggataagaggtcgaaacagcagcaggtccaaaagcaggtctgggacagtaggacccccatttctgtcactggaagcgagcaacagcaggaagctgccaatgggaagcccaatccgtctgtaccaaacggtgtccctgcagaggtgaaggcggcgaaggcttctgcagagaacggcaccgccactccagctatttcctacgcggcaaaggtggcccaagcagcaacagagaaacctgtgctcgccaacggagtcgctaagaccggttagctggaccgcccaaccgatgctccatagctagccgcgagcgacggtcgacgtccccaagagctcgaccgaatcactgtacaagggaaactggtgaccaaccaaggcaggctgtggaactgggcaggcatggcgccctagagcgttgcggctccatctcgtcgctgctggagagcagctggctagctgttagcgttttccctagtctctctctctgttccccgtttcagtttgcttatagcccgaagacttttctgctgtagtattggaatgccagagacctttggccggacaagaggaatttgcgaaggccgtctggctgggtgtgttgcgtcgtcattggggtcgagtatggccggttgtgttcgtcgttatattgagtggatccgaatgaatgtgggttagattggagctttcaaaaaaaaaaaaaaaaaaaaagaaaaaataagaaaagggcgggcccgcaaccatttgataaccgcaccccggggaacaagtccggggcagaggaagcgaggagagcaggtttccacagagcagacagggtctggcttggcccaaa

SEQ ID NO: 54478 - DNA, 3635 bp, Zea mays
  Clone ID: MRT4577_149686C.1
cggcaggctcgcgagagagagccgtgcggctgccgaactccacaggcctatacgggtgtactagcactgtagcctactagccagcaagcacctcctggtgctatagtgaccccccgcaccccacccaaaacccctccttttccgctccagacacagcagcccctcttgtaccagtaaaccgtgctgctatcccccgctaccgctacccgccgcgctgctgcggctcgcctccctcctccccagtccccacgccccgccgccgccgccgccgcctcctctcgctccctccttttaccccgagcttaagctcgcgcgtacctgcctacctatccgtaggagaggaagagggggacaaggcccggtcggtcggtcggtcggtcggggggctctcggatctcgccgctgcctccccgttcgttcgttcgttcgttgggatctcgcgccatggccgccgtcgcgccgcccccggcccccgcgccggcaccggttccggctcctgctcctgccaccgtccctgtcgcggatcaaaccacggatctgctgcagaagctgtcgctcgactcgcagcccaaggcggcggacgcaacacagcctgctgctgccaccgccaaaaagcagggcgccgcggcgagccagccgctgagcgtggcgatcccgccggagccgtccatcacgccggtgatccaagactttacggatcccaacctgttttatctaccagcgtattactacggaggctacgacagttccatgagcgagtgggatgattatccgaggtatctaaattcagatggagtggagattgccccagcggtatacggagatatttatggatatgggtatgctccttacggggcatactctcctgccacttccccagttccaacagttgatggtcagatgtttggtgcacagcattaccagtatccaactgcgtattttcagcctcctacaccagttccttctaccactcaaagtgacctacagtcttctaaaaatcctgaaaagccagcagctaaagcagatccagccaagaccactaacggtgttcccaatggtactgctcacagtaacagtggaactgtaccccttgcgtcgagccaacaaaattcatcactgacgcctgatggaacttatagggcgcccttgctaggtggagttccttctgctggttacctggacacgacatatgggtatgacagcacaggggcacactttgcatggtatgatggctctgcttatgcaaatggacaacaaagagcaactacaactaaccattttccatcctcaacatttggtaatggttccccagcaaggtatcagaacaagagcaccaccacaccgcagatgggtatgcagaatagaagacctacaactacatcaccagctcctacttatcccaataggatgtaccctagctcccgaccgtacacccagtatgggaattcaataaaaactggccttccctacgggagcaacggttatgattccaggatatatgggcgatggggtcttggtatggataacaggtacaggcctaggggccgtaatggatactatggttatggcaacgagagtcaggatggaacaatcgagttaaacagaggtcctagatctggccgtttcaagaaccagaaattgtacggccatactgtcactattgctgtgaaagggcagagccttccttctggtgaaagcaaggatgatagtgccgtgcctgatagagcacagttcaatagagacgatttccctgttcagtatgatgctgcaaagttctttgtcattaaatcgtacagtgaggatgacatccacaagagtgtaaaatacaatgtgtgggcaagcacaaccaatggaaacaagaagctcgatgctgcttatcaagaagctcagtcgaagggttctgcgtgccctatattcttgtttttctcagtgaatacaagtgggcagtttgttggtgttgctgaaatgacgggggctgtcgattttgagaaaaccctggggtattggcaacaggacaagtggaatggttccttctctgttaagtggcacattgtcaaggacgtgcctaacaacattctcaaacacatcatcctagagaacaacgagaacaagcctgtcacgaacagccgtgacactcaagagatacacctagaacaaggccttcagatgctcaagatattcaaggagcatgtcagcaagacgtccatcttggatgacttcgccttctatgagagtcgccagaagctgatgcaggataagaggtcgaaacagcagcaggtccaaaagcaggtctgggacagtaggacccccatttctgtcactggaagcgagcaacagcaggaagctgctaatgggaagcccaatccgtctgtaccagcaccaaacggtgtccctgcagaggtgaaggcggcgaaggcttctgcagagaacggcaccgccactccagctatttcctacgcggcaaaggtggcccaagcagcaacagagaaacctgtgctcgccaacggagacgctaagaccggttagctggaccgcccaaccgatgctccatagctagccgcgagcgacggtcgacgtccccaagagctcgaccgaatcgctgtacaagggaactggtgaccaaccaaggcaggctgtggaactgggcaggcatggcgccctagagcgttgcggctccatctcgtcgctgctggagagcagctggctagctgttagcgttttccctagtttctctctctccctctctctctgtcgctgtgttccccgtttcagtttacttatagcccgaagacttttctgctgtagtattggaatgccagagacctttggccggacaagaggaatttgcgaaggccgtctggctgggtgtgttgcgtcgtcattggggtctagtatggccagttgtgttcgtcgttatattgagtggatccgaatgaatgtgggttagattggaaaaaaaaaaaaaaaaaaaaaaaactggtgaccaaccaaggcaggctgtggaactgggcaggcatggcgccctagagcgttgcggctccatctcgtcgctgctggagagcagctggctagctgttagcgttttccctagtctctctctctgttccccgtttcagtttgcttatagcccgaagacttttctgctgtagtattggaatgccagagacctttggccggacaagaggaatttgcgaaggccgtctggctgggtgtgttgcgtcgtcattggggtcgagtatggccggttgtgttcgtcgttatattgagtggatccgaatgaatgtgggttagattggaaaaaaaaaaaaaaaaaaaagctggggaccacccaaggcaggctgtggaactgggcaggcatggcgccctagagcgaggcgggtccatctcttcgctcttggagagaagctggctagctgttagcgctttccctagactctctctctgtcccccgtttaagattgcttatagcccgaagacttttctgctgtagtattggaatgccagagacctttggccggacaagaggaatttgcgaaggccgcctggctgggtgtgttgcgctcccattggggtcgagaatggccggccgtgttcgccctttattgagtggatccaacgaatgtgggttagattgg

SEQ ID NO: 54479 - DNA, 589 bp, Zea mays
  Clone ID: MRT4577_149687C.1
gacacacggacagcgagaggctgttttctgctcttaacccagggaaagcgtgccgatgcaccagacgtgctgtccgcgttctgcctggacttgcgcggtgccgactacgcgtgtttgacggggctgaacccctgggagcagctgcagatgcagagcacccccctgcagaacatgggcgccagcctgaacagcctgtacaaccggatggccagcgaggacaccagctgccgggggcaccggcgtccactgatgagcacgggaccaccactgctacggggggctgtccaagcgaagccggacaccccgggagggagtggggtgagactcgcgcccctcgccgacagcagctatcctgtactactgaacagcgacataaatacagcatggcgggcgctatgatatgaccatgagccggcgatacttctgtgtccactggagtgaacaaagtgaacagactagtgttgaccacaatccgaggactgagggggccaaccgctagtttgcgcaatagagctgactatgttacgctcctgctactacatatacataaggctgctgagagactgccctccaagcatcatgacgctag

SEQ ID NO: 54480 - DNA, 459 bp, Zea mays
  unsure (1)..(459): unsure at all n locations
  Clone ID: MRT4577_149688C.1
gagagctactaggcggcggcgcttcnacggggttaggcggtaaacaacatgaccgcacaaggaagcgtgagttgcatcggaatgataatcgcaatgcaggctgcggccctagcacattaggcagcaaacctggcacgctgatagaaacatgcccagaagcttcaggacttgtccttgaggggtgttcaacggaagccaagaaaaccgccaggaaaagaacaacaacacgcgaccacgaacagggcaaacccgcgcccgaacaacaggagagaggcgcacgcaccacaancacgaacacaaacaaaccaaacccggggggacacggcgaccgaaagccagaccacacgcagcgggcgccaccagccaggcaaacaggagacaccgggaagcgccccgaccggcgaaacagacaaacaccagcagcacaaaggccaaccgaccaacacacccaagagaaac

SEQ ID NO: 54481 - DNA, 315 bp, Zea mays
  Clone ID: MRT4577_149689C.1
tgttttttttatgaaagaacacacataatacttgcacaatagtttgggaagaaatgtaccctcaacagacctttggcaatacacatgcactgaggagtatttattacctacaaaaggttgtctaagaagcgcacacagagaggacgtacattgaacctataatgcccttgaggctgtatgagagggtggacgcatcttcacacttgtatattaaatctgagattcgagcaacattgatcattgagacgagaagtgctatggggctgttactgtcaaggttgacttggacgatatgcatacatgccatttagatta

SEQ ID NO: 54482 - DNA, 821 bp, Zea mays
  Clone ID: MRT4577_14968C.1
gaaagatttgatgcatcttctattgctgaagctgacggtgctcgttttgattatttctgcaacaaggtatatccaaagatccaggacttggatgagggtgggctgctgctattcgtcagttcgtattttgagtacattcgaataagcaatttcttaaaatccaaggaagcgtccttttgtcgaatcggagaggctacgtctcagcaggatatatcccgtgcaaggctctggtttttcgagggcaagaaaaagatcttgctttacagcgaaagatctcacttctaccaccgatacaagatcaggggaacaaagcatctactagtctattcgttgccagggagaaaagaattttatccggagcttgtaaatatgctgggcgaatcagaaaaccgcaagtgcaacgtcctcttttctcgtctagaccttctcaagttggagcggatcgttgggacgtcttcggcgcgaaggttgatttcctcggagaagggcatgtttgtcttctgctgatgtagcagcctagcccgtactgtagagcaggcgaatggttttatacattgatccctagcaaatgtacccacagcagggggtcacgttgttgtttgcctgtcaggcaagaatctggaccatgttatgtaggcaaaaaaaaaaaaataaataaataaaaaatctgaatcccgtttgtacggctaacattatacttttatgcccctatttgtttccatcaaacttatagattatatagtcacctaatgacttgcttatttgttatcatagtctaggtatgtaaattatatattccatctaataatttgtgttataat

SEQ ID NO: 54483 - DNA, 302 bp, Zea mays
  Clone ID: MRT4577_149690C.1
gtgggtatattttgtttttctatttttttttgggttcaaaaggcaccagcaaattcttttcttcactggccacccccttggggaattaggggtccacccccccaaattggggggccccccggggccccgagggaatcagcctcactgggggtcccccattctcggcccgggggttttttcgccctaaaagtgtccacatgggggggggccttggggcccccaactgggaacccacccatttccggaggtcttttaaaaaatcccccggggtgtttaaaggggggttttccccatttgggggg

SEQ ID NO: 54484 - DNA, 614 bp, Zea mays
  Clone ID: MRT4577_149691C.1
gccctggttttttttttttttacaaagtaaaacttgctttatatcgctgacgctctagtctgtgtgttttcctccatctgcaccactaggcttggccctctcaaggcgaccgagactctgtccattcatccagccctttggtcttctgctcagctgggacctcacaaccatgcacaatgcgccaaaggtcttgatgccaaaggcaacccagagcaagatctcagaagccaggcgtcgtcttccgtgcatgctgattccatcaggcaaacgctcctcgaaatagctcaggtaacgaacaaagaaaactgagttgatgcatgtgtgaccggcagcgatgccaaagtaagcggccgaaatggcccagtaggtgaggcggactttgtcccaaacgtagtcgtcgaattgctcgatttcctccttgctggccttgggaagagggcaccatcgcttgccgacgatgcaacgacacttcatccagtgaggtctgttgggaataacccactctcggagaatgtccatgatgctgaataccagagcgacatagatgttgatccagacgatccaactactaattggaagtccgccgctggccatgtagcttcgccaggcttcaa

SEQ ID NO: 54485 - DNA, 348 bp, Zea mays
  Clone ID: MRT4577_149692C.1
caaatttacctgcacgattttcaaactccctgcctaacattattccgacaggacaaatgactttggaaaatttaaatcaatggtctttagaacaatctaatatatatatgaacatgccaattgatcaagtggattgggcattattagctaaacaatggatcacaatgcaacaaaatgtgtatcaaacttctacaaatctttcaccaacttttaataatattaatcaattaattttaacacatcaaaattctatgcaaatacttagaccgccaattcctccgaacctccctctaatgcaacattctccttatgttacacaaaatcataatattttaccttttaatattg

SEQ ID NO: 54486 - DNA, 234 bp, Zea mays
  Clone ID: MRT4577_149693C.1
gcataagcgaatgcttgcctctaagagggggattgattgggaaaggagacatcaatgcaccgaaagagaacacagtatcatgctcatcacactactatgagggaccctgtactatcagctgtccatgatggagtggtgactcccatgcaaggcctagcctgagctcgtataggtgcttcatgggacagggggagagattgaaagcctgctcctagggatcgcctaccacttgac

SEQ ID NO: 54487 - DNA, 249 bp, Zea mays
  Clone ID: MRT4577_149694C.1
caaaggcaatattgaagtgaataatcacagcagaagcctggagaaaagaagtgtctgacttgttctacaatactgcatcagtgcatagatgcgcttgtatttactgctagctcctaaggaacaacgaggtgttaaaatatatatttttactttcagttgttttctgtttgaagactaaacaacctgcactacttgtacttaatgtaatatattacatgtgggttccttcagacagtgatatgacatgtt

SEQ ID NO: 54488 - DNA, 417 bp, Zea mays
  Clone ID: MRT4577_149695C.1
gctaaatgaagatatctgcttcaataggcattccatctgcatctacacccaaccgtcgcgcgccatgtggactacgcccgccgcgcccgccttggggccgtacgcgcgcagtccgcacctgcggcggcggcgggaggcgctgacacaagcacgacctcaagacggctggaggaagagcgcgccgtcgagcatgtgaagagcgggatggaactccagctctgatacgggctccacggccgccttcgacgaagccgaaatctgatcgctcctgggctgtgacaagctcgacaagatcgtctgggtgcccacatccaaacacaacttagagcaagcacaaacgatctgaataccgttgtacacactatactacaacccagtcattgacctgtgcatcgacggtgcctacgaggtcgaccc

SEQ ID NO: 54489 - DNA, 339 bp, Zea mays
  Clone ID: MRT4577_149696C.1
gggggggtattgtaactaatttcgtggcgcacacaccaaacaagcattacatgcacagcaacaccaccactacgcaaagcacagcaggactcagtaacatatactgcgaaggagcggacccatctaccacgcacgacatccacatggagatggcacctgcgatacaccccgggcgcacgcccagcatggaacacaaacacgggcatgcaggctgataagccctatgaaggagaccaagcaacactcgccaagaacactggaggcgctcgatcagtgcgctcctagtggtatatacaacccggcccgagtagcgctggcagccaagagaaccgcttgtgg

SEQ ID NO: 54490 - DNA, 431 bp, Zea mays
  Clone ID: MRT4577_149697C.1
ccaacacggatcatgccaaccacaatccgtactccaaaccggccaccacagacccaaacagggtccatgatcgagtgcgatgcatcccgcatcatgaagacatcaacgagccccgttgctcctggctccagtgctcatcaccggcacctgcactgactgaagcacaacacgcccggcatctgcttactaggccgtaacaccagcgcttcattctaccactatacacaccggcggaacgccaggtcattccaactggcagaaccgccatttatgcctcgtatctcacagccaacccaacgctgctacaaccatgaaacctcggagcgatccaacccccacaaaatgcactgcgtggcatatacgctgaacagaaccagatgagaggacatgcattcgaagagatgcacaggcacggaaccccgctatacaac

SEQ ID NO: 54491 - DNA, 211 bp, Zea mays
  Clone ID: MRT4577_149698C.1
cccaagcgttttttttttttttgttctgtttttttttccaaacatccttctgtcccttaatttcatacctttccactataagggttcatgcagggaattgctcacactgccacccaaggagatgggggacactcagcaatgactggggtgaaaacgagagagctaaggataggtagctagggagcaggggccgttacgttattactacaga

SEQ ID NO: 54492 - DNA, 514 bp, Zea mays
  Clone ID: MRT4577_149699C.1
cattgggtacctcgaggccggccctcacggagtcctccgctctatcgccggcacgctctgtgcttattggcatggtgtgcagtaatgacaagcaggcccgtttaatttgtgcgtcgtgcactggtattgttttcctttctttcttgtatatactcctttctagtttctatacaggcgacggtatctgacagaatacaaacacatgttgccggcgccggtgtttctcgttccttctataccaatacatggagccacaccaaacgaccgaagcgccagagctgttatctacgcacaaaggcaaagtgctcctgctccgcctccgtcttcgtctccggcttctgtcgcggatcgcggtgccgccggagcggccctgcagtatctacattcttgtcggcagacaccatgcatgtctctttcgacgagccatctgtactgtactgtactgtactatgacgcagaaacaggacaggccaacaccaggaaaacgaagggacggcagcgcgacagcgcggcc

SEQ ID NO: 54493 - DNA, 262 bp, Zea mays
  unsure (1)..(262): unsure at all n locations
  Clone ID: MRT4577_14969C.1
cgcgtccgccgatgacgagggcgcacctgccggcggcggcgcagcggcggccgacggtggcgctgcttctgggcctggggctcgccttgtggctgggcgaactgtggagtccagtcctccttcttcgccgccccatgggcgccgggcaggaggctnnntcgggacgccgacgacgtagcacgagctgggggggttccagtcccgcgtgcagcagtgcgtgnctagcagaggacttggtctcacagcccatattattgatcac

SEQ ID NO: 54494 - DNA, 2930 bp, Zea mays
  unsure (1)..(2930): unsure at all n locations
  Clone ID: MRT4577_1496C.1
tgggtacctcaaggcggccgggatccgttttctttgcgcgtctcccttcccgagtcgcaggttcgcacgcctggcgctgtcgccgtctgccgagcccgcagccggganaaggggaaggcggctacgcaaacgcaagggtgcgagaaggtgggcgggggaatctgattttctcagagaaggcacctttgcgagcagccgtctccccgccctcgcgctgtcgccgtctgccgagcccgagcccggaaaaggggaaggcggctacgcaaacgcaaggcaccccaccccgttcaccgcagccgaatcaattaaaaagccggcggcgagaaggtgggttggggaatctgaagcgatcagagaaggcaagcttgcttgcttgcttctccaccgaatcccccatctcgcgccctccgtctctcgccgcggagactcgcccccccgctgatggaccagctcgtcaatttcatcatccgcccgcccagagctgactacagtccaaatgatgatctattagagcaggagtttatgctgaagggaagatggttcctgaggaaggatttggaggacaaacagacggggcacgcgactcttcgctgcaatagtggtggcgacctctacacctacccctccaccacagctccctcctgcagtctcgccaccacgtcgtctctgtggcatcatcgcctcggccaccccggtccttccagcctcgccaaacttcgaagcatgtaaaaaatggtcagggcaagaagttacaatgtagtcactacatgcctgttgtgattcctgaaggaaaagctcttccttgtgtcatatattgtcatggaaacagtgggtgcagggctgatgctagtgaagccgctattattcttctaccgtcaaacattacagtctttacactggacttttcagggtctggactctctgaaggagagcatgtcactttaggctggaatgaaagagaagatctcaaagctgtggttaactatttgcgaacagatgggaatgtatcttgcattggtttgtggggtcgctcaatgggtgcagtcacaagtctaatgtatggagcggaggatccatcgattgcgggaatggttcttgatagcccattctccaacttggttgacttaatgatggagctagtggacacatacaaatatccactgccaaaattcactgtcaaacttgcaatacagcatatgcgaaaaattgtcaagaggaaagctagtttcgacatcatggatcttgataccattcaggtagcaaaacaatgttttgttcctgctttgtttggacatgcaactgaggatgattttatacttccccatcattcagacaagatatatgaatcatatattggcgacaaaaacattataaaatttgatggggatcacaattcaccacgtcctcaattctactttgactcaatcactatatttttccataatgtgctaaaccctcctgaagtggcagaggatcattatttcatgacaccacatggtagccttggtcagggtcattgggatacagaacaagacatagagtatcggttctctcaatcacctacagggacagccaatgctactacaacagaagatgccattgcacagttgcgctctagaaggctcatgagtagaatggaggtcccatctggtgccaccaccgaagacaggactgatcgaactgagggtttcgatagtgatcttggtccctcttcatctagtgtatcaacagcaactcctcccaatggtcgcaacggaaggctgctgactccaacctctgatgatggcgagtatgtggagtactcatttgatagcttgtcagatatgcctcacaccgtggaagatgaagatagaatgctaatgcaagcaattcttgaatcactgaaagactatgaacagtcgaatacaaaaaatgtgcaatccactgcatctgatcctgcatctaaagccaatggtactgtaaaagactgcaatggtgttgctgcagcagcattggagcaagatgcatcctcatttgatgctcctgacaagcatacgaatgtccccaacagtggagaaaaagtcagcgaagggcaaagtacagattgcaacgccggaaagagcagtgcttcggtctctgcttctggttcctcagagcccctggcaccaacacagatggtgaatggacaacctgcttcggtagactcccagaaagtgacccagaatgccaatggagaggatggcacaagagcaactttggtagttcagaagagccggacaggcggcctgatagaaaaatggggttccttcttcaagaacaacgactaaggcgaggaaagatagacgatgacacctttgacaatacgtgttccgttgtgttcatagtcatagaatcgccgttggctgatgtccagcttgattggttttacgtgtaaaatggaaaggaaacaggtgatttcaggacgttcgtgtgtatatagaaggaattgtagcgcccccattgatttataccatctctcaacttccactactttcggttgcggtgaattggcaagacctttgttcttactaatgtgctgtagacttgtagcataatttgaaagctgattattttgtagttttttaaatagtaaagggtaatgtgcctcttaacgtaaaaaaaaaaaaaaaaaaattatccccccggacacccctcgatccatctttgtgtacttccgaggtctgttctatgacaccggcaatgaccccgagggcggatactacgcaagaggtgctcgcgcatcggtctgggagaacttcaagaacaancccgctgtttgacatctcgaccgatcacccaccaacatactacgaagacatgcagcgctcggtgttctgcctctgccccgttggctgggcaccgtggagtcccaggctagtcgaagccgtggtctttggctggctcccgggatc

SEQ ID NO: 54495 - DNA, 1431 bp, Zea mays
  Clone ID: MRT4577_149700C.1
gccacgcgtccgaccacgcgtccgtccacgcgtccggccacgcgtgcgcgcacgcgttcaagcatgttaaaagtttgaggaaaaagtctctgtggtctaagaatttggaagaggtcatgggaaagcttgtggacattgcgcacttcttacatttggagatccataatgcatttgggctttcagacagtgaagaatcacaggaacctaccaagcgacgcaatagattgggttcagcaggccttgcactgcattatgccaatatcatcagtcagatcgatactcttgtttctcgttcaagctctgttcctccaaatacaagggatgcattataccaaagtttgccaccaaccataaagtcatctctccgttctaagctacactcctttggagttaaggaagagcttactgtttctcaaatcaaggctgaaatggagaagaccctgcggtggcttgtccctattgcaagtaacaccaccaaggctcaccatggtttcggttgggttggagagtgggcaaatactgggtcagatgtgaactgcaagccaaatgggcagatagacctgatccgaattgagacactgtaccatgctgacaaggagaagactgaagcatatatcctcgagcttgttattaggcttcatcatcttatcagtcaaactaaaactgctaatggtgagaggtctccaatcaagtctcctgtccagtctcctacacaaagaggggcctcaatcacattgtctccaaacataaaaaacagcaattcatcacctcttctgacgcaagaagaccaagacatgctaagtgatgtcaagtacaggacatttatccctggtataagcaaaagccaagagttttacactaaggaaatacatcataatcaaagcaggttaagcaaaagtaacagccattcaccaagcagtggcaaccggaaagaggcgctatcgatcaggaggctgcttcctgtgatcgactttgagatcgaccggacaaaagcccttgatgtgattgatagagttgacgatctgagagtacaatgatgaacctagattaaccaatgccaaagtctgaaaaatgcaccctcagtctatgatccacaaaatcaagattgcttgaaggataccagtaatcgctgagctaaattggcatgctgtcagagtggagagtcagtattgcagcaaggtgcctgcttgagataaccggcatcatggtgccagtttgatggccccgttagggttagggatggtggccatgggcgcatgtcctggccaactttgtatgatatatggcagggtgaataggaaagtaaatttgtattgtaaaaagggatttcttctgtttgttaaagggatttcttctgtttgttagctcatgtacaaggaatgcaagttttgagcgaggggggcgtcaaagatttggctgtgttttttgctt

SEQ ID NO: 54496 - DNA, 287 bp, Zea mays
  Clone ID: MRT4577_149701C.1
cgctgcagcgtagtaagtcggattcggtcgaggcttagtagctcgttattataaggggctggagcgtggggatagatgctcatgagtcatgtacatccatcgatcacacggttcacagtcagtcacagtgtactattgattcgatggtcgccgattcttttcttttgcttgggtgattgtgtgtatgtagcagaagtaataataattaaaaaaacatgtaacaagtagagggatgagctcacacttgtattgcatcaatgtagatgaatgccacgttcgtcgtactc

SEQ ID NO: 54497 - DNA, 1383 bp, Zea mays
  Clone ID: MRT4577_149702C.1
aagcagaagcaacccattgttgctagctgcgcctaggattcctcgcctcctctctgtgccgcgcccccgagttccccagccacggcgtccttgcgccatgatatccaccccttccatctcctcacccctattccctatgcaacattcccggatttggggtgacgtttgtaccggacccactctcttgtctctctcttaatacaatgatacacaactatcctgcgtattcgagagaaaaaaagatcttcggttcatggggtttctcgtgcaagctccgttccttcaaatacaagggatacattataccaaagtttgccaccaaccataaagtcatctctccgttctaagctacactcctttggagtcaaggaagagcttactgtttctcaaatcaaggctgaaatggagaagaccctgcgatggcttgcccctattgcaagtaacaccaccaaggctcatcatggtttcggttgggttggagagtgggcaagtaccgggttagatgtgaactgcaagccaactgggcagctggacctgacccgaattgagacactgtaccacgctgacaaggagaagactgaagcatatatcctcgagcttgttatttggcttcatcatcttatcagcctatccaaaactgcaaatggtgaaaggtctccaatcaagtctcctgttcggtctcctacacaaagaggggcctcaatcacattgtctccaaacaaaaacagcagcaattcatcacctcttctgacgcaagaagatcaagatatgctaagggatgtcaagtacaggaaattcatccctggtataagcaaaagccaggagtttgacactaaggaaaggcataataagcaaagcaggttaagcaaaagtaatagccattcaccaagcagtggcaaccggaaagagacgctatcaatcaggaggctgcttcctgtgatcgactttgagatcgacaggataaaagcccttgatatgatcgacagagttgacgatctgagagtacaatgatgaacctagattaagcaatggcaaagtctgaaaaatgcaccctcaatctatgatcctgaaaatcaagattgcttgaaagatacaagtaatcagctgagctgaattggcatgctgtcagcacttctgcagcaatgtccctgcttgaggtgaacaggcatcatggtgccagtttgaaggcaccacgagggttagagatggtggcagcatgttctggccaactttgtatgatatatggcagggttaataggaaagtgaaattttattgtaaaaagggatttgttgtgttacttagctcatgtacaaggaatacaagttttgagagggcggagggggatcaaagatctagctgtgtttcttgctgtttttttgtgc

SEQ ID NO: 54498 - DNA, 130 bp, Zea mays
  Clone ID: MRT4577_149703C.1
aattcggcacgaggctctactctcaccgggcctaagcagcaggctctatgggtccgccttactttgaggtgaccagcgccgcctagctcattggctagggggggcgcgctcattctactccctccatgcc

SEQ ID NO: 54499 - DNA, 439 bp, Zea mays
  Clone ID: MRT4577_149704C.1
gccggtccaaaaaggaacttaggacatggtttttctcaacacatccatgccttgagagttccacaactgatgtgtgagaagactcatgggagctatggcggatggaccatgtatacatgtcgaactccgtcgagcagactcataagtacagagtataggattgcgaccgtgtccaagatattgacgactgctaagttatgcgagctacatgtgcagacgctgactctaccgactgctgcctacatcatacgtagatggagactgtagcgcctcatgatgcaacctctcctccacgtagtatgatgacgagcgcctcatccaatgaagagctcagtgatagtcattgtcgataatgatgtcaagatgtggaccgtcatgatcattaatggagctggcatgcacaaaatgattgatatccatcttgagggcgattccaatg

SEQ ID NO: 54500 - DNA, 412 bp, Zea mays
  Clone ID: MRT4577_149705C.1
cccacgcgtccgcggacgcgtgggagcgcatgactctgagccacccatgcagccatgcttagtcgccgtgacacaagacagagaagagagaaactcgacgccgccaccgtcacttctcgccacgacgttgttcgatgcccaggtggggtaccagggagcttcatcggggcgtatggatcgcgtataaagggcttctgtggacgaagatcgaccggggtgaccgaaatttgacactgtcgtttcccaccggcgtggaatccatgcttcaccatggccgacgggtgtccatgctgcaaactccgcaagatcgagcggagcctccagccatggcgccaccgtggtacaaggcagcgccgtcgtgttcaaccaccaatggagagagatgaacgagtaggggtcggatcacgatcgg

SEQ ID NO: 54501 - DNA, 310 bp, Zea mays
  Clone ID: MRT4577_149706C.1
agctcactagtcgttggccgccctcccgttgaaatttgaattggaattatttggtttgtcattacggctatgctacagccaagaggaaaggagcgggaaaacctcggggaacaacgattgcacattggtaagaaatatagggggggccaagaccagcagtggggggaacccgagggcggctgaaccggccccccggggagcgacaggacatgctatccctatggggcggtcccgccccacctcgggttcaccagaatgctgggggcgcccacgctgggatgggagacgtgaaaatgagcgattttactgg

SEQ ID NO: 54502 - DNA, 853 bp, Zea mays
  Clone ID: MRT4577_149707C.1
acaagcagactcgcttggccgcacccgtcaccggtgcccccttcttcgtcagcttgcaatctccacccacctcactcccactcccacctcccaccccccgctctttctacacatcgaggacgaaacggtggtgagggagccgggggactagctgctaggcggaggaggagatggagcgagggctcgtccattgctgggtctggggctggcgcttcttctgctggcgccctcccgtcgtctcgcctcggccgctccggtggaggacggcctgctcatgaatggtgatttcgagacagcaccacctggcggtttcgtcaaatctgcttcagtttccgagggcgcagcgatcccaagctggatgatcaatggaacagttgagctcatttccgcaggccagcaccagggtggcatgatccttattgttccacaaggcgatcatgctgtgcggctagggaatgatgcaggcattgggcaggtggtggaggttgagaagggctcagagtacgcgatcacattcagcgccgcccggacctgcgcgcagctggagtcactgaacatctccgctgggagcgtgtcgcagacagtcgacctgcagacactgtacagcatagaaggctgggatgcatatgcactggctttccaagcagtggatgagcaggcgagcattgagttcaggaaccctggcatggaggacgacccgacctgcgggcctatccttgacaacgtggccatcaagaagctcttctccccgacaaagcaaaggagaacatggtgatcaatggaggactttgaggaggggccatggatgtttccaacacaagcttcggcgtcctgctcccgacgacctcgacga

SEQ ID NO: 54503 - DNA, 145 bp, Zea mays
  Clone ID: MRT4577_149708C.1
gctttttgtttctctattgtcaaccactgagctccctggggaatatgtaaggattgagggatgcacaatgctcagaccctcttcctacaccgtgcacccagtaactaaatataccccggtgggcacgccctgctctgatctgagt

SEQ ID NO: 54504 - DNA, 425 bp, Zea mays
  unsure (1)..(425): unsure at all n locations
  Clone ID: MRT4577_149709C.1
tacgccccangtaccattcctttaggcgacggacgcgcacgctcgatcgcaaatatccaaccagtcactcgagaccgcttgcgtgctcccataaggggggagggggcctcttagcaggcgacgtacttatacgagttatatggcaagttcgctgtaaacacaaacgcagtaggacatcagcgctgcaaggactagcctaacgccattgacgatgtgactgacaccatccacaacaatgatgtcgataccccaaaccacacgcttctgatctttgctgacaagcctctagcctctatatcgctctctctcggactacagcatcctgtaggagcgtccctttcgcggtcagctgtcgctagaggctcccgcgactagccactccatcgcatgctgtagctcctttacctaggagccgcaagaggaaa

SEQ ID NO: 54505 - DNA, 674 bp, Zea mays
  Clone ID: MRT4577_14970C.1
tggttgttaacaaatcatggcatgcttcgatactgcttctgggcgagaatctagcacaatgatatgacctacactcttacagaattttagcagcagtatgcttgcttttccaagttttcttcaagtggagctagttaccaagatttgtgctgattaagtgaattttctccagtgctgtttcatttctatcaagaatcttgtttcaaataatggaacagctactttgtaggcattgtctactatctgcagatgttcgagtagcagctttaatgattttccacaattgaaacaagtattacccacgatatttgcggtacttgaaatattccaacagataaagaagaaatcaaatgatcatgaaatgcaatagaaagtttttttaatcaatttgtatggaccctgttttacagaatgctttgtggcgaaattcactctgcaagttctgagtactgaatttttactgctggctagccctctaaatttgctactccttccattccattcctattataaggttggtttttggcttttctaggtacaataacttttactttcgtatctagacatattgtatatcctagggtgcataacaaaagctatgtaccaagaaaagccaaaatgacttacaaatggagtaattttcttttctgtgacatgcatttgaatcatgttac

SEQ ID NO: 54506 - DNA, 403 bp, Zea mays
  Clone ID: MRT4577_149710C.1
acggacaagacttacagttgtcccttgtatcagctggaactgagacctttgttacacccggtttaaaaaggccggcaaatagggatctgcggaacggactaacgaaaaaacaatcgactatcccctacgggggcctcattcttctgccaaaaggacacttttaccccggcaacagaaaagattacttttcgggggccgggccgataatctttggataacatgccacggacacgcactggaagaatccacaagtggggaggcacatcagaacccgcccgcccgggggcccccactcctttaacttatgggtgggtgcaatggtcccaggcttcccgagggggccttttttaaaaggtgccgccatcccaggaagaaattgttccccccccaacttgaccaaggg

SEQ ID NO: 54507 - DNA, 398 bp, Zea mays
  Clone ID: MRT4577_149711C.1
aaaaaaggcgaaccatgatcagggttgctccaagccagcatcaaagttaatttgactacattgagtttcaggagaacccaaccattggggtgggataaaacccgtacaccgtaactattaaacccaaaaccatgtaatagacattggggacaccacattttttgaaaatgttacgaaggtaacggcctctttttcgatacaaaaataggcccttggaaaccaacaaatgcgaccttttgaacatccttataacacatgagactacgccatttgggcagaccagattggatcccaacctttaatttaagcaaaaagtcgcttcaacacgaatgtcaaaaattggccgaagcgtgggaattctatcgctccctgaacaacagaccttgaaatgcaatgag

SEQ ID NO: 54508 - DNA, 444 bp, Zea mays
  Clone ID: MRT4577_149712C.1
agccacgcgctagaacgctcgctcatcatgaaactcattacatacatgtctcccggacggacacgctgccgggagtgctaaatctgtttttccggctgggccactggcagcagaccttgcattgcccaaacggaactgccccctgtcgacgactgcatctgcggcgcgactgcgcatggaaggcgcaggatattgtgttcgtcgttgactgcacagcattcgccgcgttgggagctcagcggggataggagggaaaggacaagctgcggaaagcgctggacctccgcttagacataggaccacgatgccagtgagagcgaacactgaacatactatgtacaacttaaaatgcacacatacacggtctgcatactcgcaacagctgatattatacatgaagggacactgcgtgacgatgaccatggagcagtgaaccatgctcac

SEQ ID NO: 54509 - DNA, 244 bp, Zea mays
  Clone ID: MRT4577_149713C.1
cggccgcgtcgactttttttttttttttttttttttgttttgtttttcccgaagaaatagggtcgacaaatggtgctttgggtcctcgagagtggcacatcagtacaacatccgagccggtttcttcataattacaatatcctgcaggaccagccacagatcacatcatgatgccttccccgggatagggaaagcctgtaggagctaaaattgaactcactgctgtcctggtccagtcagatca

SEQ ID NO: 54510 - DNA, 639 bp, Zea mays
  Clone ID: MRT4577_149714C.1
gccggccgggtcgggaaggcatgagcacccctctcctccgccgtcccatggccgcgccctgttcctgggacacttccttccacgaaaaaaagcagcagcagcagcataagctctagctacctctactaccgacctggatccactcaacccgctacgctaagctcccctttcccgttcgacaagagaagagaagaggttattcatccatctgcgctgcagcctgcaaagaaggagaaggaggagacaggcgcttgacatgggcaagtacgtggagctgctggacatgggcgtgcgcatcgccgcgcgcttccactcccactgcccgcagaccgcgcgcctctactaccacccgccgtgatgctgaagcagcaggcgcacaggttcgacgcctccgagatcatcctccacaccgtcgtctaggccggctgggtggggtgggatgctcgacggagccgtcggcggggcggcggcgatctatcgatttttatcaccattcattgccgggggagccagagtgtgttgtgctgagatgtgatgtaatgtgatgcgcactcccgtttttattttattttttttaccatgagttcaaaatcgaatgcatttcggttcgtcgaaaaaaaaaaaaaaaaaaggccccta

SEQ ID NO: 54511 - DNA, 376 bp, Zea mays
  Clone ID: MRT4577_149715C.1
cacacattcatactgttgcttggattatgctcaggacctgtggcacaggcactggatgacagggcttgggtgagagacatctccaccactctctctctacaaggaatacattaatacctcatgctttgggatatcatggaagggttggtgctttctcaagaagaagatcatcatatttggagacacgaggcttcgggaaggttttcttctaaatcctgttacaagtcattcttcagaggatccatcacttttgaaccttggaggagggcgtggaaatctgggcacctctgaaatgcaaagtattcttatggttggccattaagaataagtgttggactgcggataggctggagcggcgtgggatgttcacccgaca

SEQ ID NO: 54512 - DNA, 925 bp, Zea mays
  Clone ID: MRT4577_149716C.1
acaccccggccgggccgggaggcatgagcacccctctcctccgccgtcccatggccgcgccctgttcctgggacacttccttccacgaaaaaaagcagaagcagaagctctagctacctctactaccgacctggatccactcaacccgctacgctaagctccccttcccgttcgacaagtgaagagaagaggttattcatccatctgcgctgcagcctgcaaaggagaaggagaaggaggcgcttgacatgggcaagtacgtggagctgctggacatgggcgtgcgcatcgccgcgcgcttccactcccactgcccgcagaccgcgcgcctctactaccacccgcccgccggcgggccggcggccgcgggggacggccgcaagggcgactccgccaccgccgccaccgccgccgccgccgtgatgctgaagcagcaggcgcacaggttcgacgcctccgagatcatcctccacaccgtcgtctaggccggctgggtgggtgggatgctcgccggagccgtcgacggggccgcgacgatctatcgatttttatcaccattcattgacgggcggagccagagtgtgttgtgctgagatgtgatgtgatgtgatgcgcactcccgtttttatttttttaccatgagttcaaatgcattccgagcgtgtccctcctgccttcttttgatccggctacgagttaaggcttgtctttttcattgtaatctcgatccatatggaacttggagatgaagagtcgaagccgagcgtgtgtgcctcctgccgtcttttgatctggctacgagttaaaaggcttgttcatcgtaatctcaggatttggggaggatactactcccttctaattcccatgatatgaatactatacgtccaattcccatttggagacaacaaataaaataacaggccct

SEQ ID NO: 54513 - DNA, 697 bp, Zea mays
  Clone ID: MRT4577_149717C.1
gcacgagtgggcaagtacgtggagctgctggacatgggcgtgcgcatcgccgcgcgcttccactcccactgcccgcagaccgcgcgcctctactaccacccgcccgctggcgggccggcggccgcgggggacggccgcaagggcgactccgccaccgccgccaccgccgccgccgccgtgatgctgaagcagcaggcgcacaggttcgacgcctccgagatcatcctccacaccgtcgtctaggccggctgcgtgggtgggatgctcgccggagccgtcgacggggccgcggcgatctatcgatttttatcaccattcattgacggggagagccagagtgtgttgtgctgagaagcctgagatgtgatgtgatgcgcctcccgtttttttattttttaccatgagttcaaatgcatttcggttcgtcgaaccattgttctgttaatttttttttttgcccgggttctaaacttttcccggggtgaagagtcgaagccgagcgtgtgtgcctcctgccgtcttttgatctggctacgagttaaggcttggcttgttcattgtaatctcgatccatatggaatttggagaggattatggtgcattcaaattcctccctctactcccttctaattccaatgatatgaatactatacgtccaattcccatttggagacgttccatgcgtgcggacgcgtgg

SEQ ID NO: 54514 - DNA, 519 bp, Zea mays
  unsure (1)..(519): unsure at all n locations
  Clone ID: MRT4577_149718C.1
aattcggcacgaggccgcctcctgtccccttgcagcagcagttgcagccgccactacctcctctccagcttcgcgtccactcccctcaaaaccctaaacgcgctcaggaccctagttgtcatgtcgtaccgcggagggcgcgggggcggcgggcccaactcgcaccgcgggcgcgggcggggcggcggcggtggggcgggacgccgcggcggcggcgggggacgcggggagcagaggtggtgggacccggagtggcgagccgagcgcctccggcagatgcatggggaggtggaaaagggcgatgagaatgaatggtggaacaagattgggcaattaagagaagggtcccagcaggagctagnagacaagcggaaatttggacgggatggacaaaatatacttgcagacatggctcagagacaaggaatttactttaatgcatacaacaaagggaagacacttggtttcagcaaggtacccttacctgattatcgggcagatctggacgacagggatgga

SEQ ID NO: 54515 - DNA, 238 bp, Zea mays
  unsure (1)..(238): unsure at all n locations
  Clone ID: MRT4577_149719C.1
cngcaaagganncagcacgccgcccggggggaagggagcnncgaggcggcccgccgcggcgcgncggccgggcgggcngagccaanggcacgggcccnnggggcgcgaacgcccnaacgngggncggggcgggcggcgagcagaggcgccggnggcnagcnngganncngaccgagaggcgnncagncanaanccggcacacggnagcnncgcgccacnggccnnncaaccaagcgcg

SEQ ID NO: 54516 - DNA, 404 bp, Zea mays
  Clone ID: MRT4577_14971C.1
taggagtttcaacaggaaactggggttgtggtgcttttggtggaaaccctgaaatcaagagcatgattcagtggattgctgcatcacaggctcttcgcccttttgttaattactacacttttgagcacgtgtctctgcaaagattagaggaggtgatccagtggatacgacttcatggctggacggtcggcgagttgtggcatatgctcatggagtactcatctcagaggctgggaggaaaacgcacaagggttttttggcctggttgcttcccagcgacaggcccaagaatcaagtgcattacatgtccgaatagcaatagacccggtttttgtgaggagtgtgtgcatgaacgaagttattgctgacaaaaaaaatgaaataaagataaaagcgtatgtatc

SEQ ID NO: 54517 - DNA, 283 bp, Zea mays
  Clone ID: MRT4577_149720C.1
cgcaacgaccaggagctcgggaagctgctgaccggcgtgaccatcgcccgggtgttggtgttgcccaatatcaacccggtcctgctgcccaagaagacggcggagaaggcgtccagcggcgggagcaaggaggccaagtcgcccaagaaggccgtcaagtcccccaagaaggcatagggtttggaggcggatccaatgttgtcatgtgtacgctgtaagcgggcaatgtgattggctatgtattctgtttgctcaagatgctttatggcattcctaaaggaat

SEQ ID NO: 54518 - DNA, 197 bp, Zea mays
  unsure (1)..(197): unsure at all n locations
  Clone ID: MRT4577_149721C.1
gggggaaaggcatggagaaggngctccacgacacaacggtttcactggctgacaaagacggaancgacccgcgccagtacaagaagcagccgcggacgggacaccaacggaangnggaggccaaccaaccgcngaaacccgcaccagacaacacgcgacgcgcgcaacagcaagcgaggccagggcgcacagcgcat

SEQ ID NO: 54519 - DNA, 510 bp, Zea mays
  Clone ID: MRT4577_149722C.1
aacagctccataagatgagatggcgctcacaacaatcgaacttgctggtcttgcggcatggccaagaaccctgccctcacattgcacacaaagggctccccatctctgtgcacaacaggacaacctccaaggtggacgagaccgtgcagcgtgccaaggtagaaagaaaccttcccgactacggcttccatgaccccgcgtccattgtgaagtacattcagaagtcacgggaggtgatcatgctcggcaagggcgaagcgccagatgaccagaccatcgcgacgctcgcagctcacttgaaaaagggcgactgcatcatctatggggggaacgagcggtaccagaacaccgacaggagggataagacttggaggagccgcggtcacctgtatcttgacatggctgtctctggaggacaggagggtggccgcaaccgtccgtcccttgatgcccggaggctcgctccaggcttacaaggacgcagaaagacattgacctcaaagaggctgc

SEQ ID NO: 54520 - DNA, 445 bp, Zea mays
  unsure (1)..(445): unsure at all n locations
  Clone ID: MRT4577_149723C.1
gtacctcgaggccggncggggaaacccttctcttggccagtgattctcttctacgattgctaggctatactttgagcggttgcattccacagacgaagggatggccgggggcagcgtccgcggtggcagcaactgcccgccgctggtcgtgacgaagaaaccaaggcggatggagaggtacccttaccggatgttcgcgagcacggtcctcgagggggttcttctgggatggctgagcagagcagcgcacgtgccgtggatgagcagcggcgcccggtggtgagcgtgggttgagctctccgcggggggggtctggatctgcttctactgggcggtgaccctggcctggagctgtttagtctttcttccgctccccccttcccgtgagagctcttgctatggtacatgcgatggcagctgcctgaatggaagatagttgggggta

SEQ ID NO: 54521 - DNA, 365 bp, Zea mays
  Clone ID: MRT4577_149724C.1
gaagcacagtcaagcatatgtgcacgaactttctttagcatcaagcgacagagttccacacggttggccaagctaaagaccacataccttcatgtttgcactgtgaaatcttataattgaaaagggaaacagttcttttgcctgcaacggacagtttacctaaatccttatgcctatcttggacacagaagttcgggtttaaggatgtataacctgaaccaagggagctccaaaaaaaataagggtacccatatacaagcgcgggtaaaaaaaaaccaatattagcttggaaaagaccccgttatgttgatatgatcaagggtgctaattatgccataccgttcaatggctccgaggcctgctcg

SEQ ID NO: 54522 - DNA, 186 bp, Zea mays
  Clone ID: MRT4577_149725C.1
ttgcgcgacgcattccgccccgaccgaaggggcgctggcagcctaccgatcccacactgcggtgcctcgtgaagatgcagatctttgaaagaccgtaccggcaagactttaccctggagggggagaggtatgacaccattgacaatggcaaggctaatatccaagacaaggatggtgggggggggg

SEQ ID NO: 54523 - DNA, 398 bp, Zea mays
  Clone ID: MRT4577_149726C.1
tggcggtggccgcccggcgccgacgggcgcggcgggacgcggcagcggcagcaccagcgccggtggcagcggatggggcgcgatgcgtggctggagcgcgcgtggcgcatgcggaagcatcggcggcagctgcaggaggaggtggtgcccgtggtggtcctcggcggcggcggcgactccccggcgagccgcggcggcgtggcgatggatatggaggaggtccgcgcgtgcctcgacctgagcctggacctcccctgcgactggaccgtggagataccctcctactacgcgctctccggcgtcgacaccgccatcagcggcggcaattcgcgggactccgccggcatctggcgcatctccagtctcggagacgattccaaagatgttaacgcgctgct

SEQ ID NO: 54524 - DNA, 638 bp, Zea mays
  Clone ID: MRT4577_149727C.1
gagcatctccaacagaagttctatatttgagtccttaaaattaaaatatgacctgatttaaagtgtttagggctataaaactgtttgtaactccaacaattgagttctatatcatattattaggaaataaatcatgttatttaggaaataaaagattaaaaatagtgtagaaaatgaagatatggctctagtagatggggtactatatttaagacccgggagactgagccctataactgtttgatgagtttttataaaataggacccctgttggagtatgttggagtatgtttctggtgttagggtcctatatttcaaaataggatcctatttaggactcttgttggagatgctctataggtgattatatcttgggccttgacttaaccggtcattgggactaacttcaactgtacatagtatagaggtgttcatcactggtgggaatctacatgttgcggctcgtggcgcgtgtaaattatcatacaagtggacagcaagtttggtgcaatgcataaaaagctttcctaaaaaaaaaaacgtttcactttgagccagttaccccacccacccagaaaaaaacacccttcatcacttttgatcattttgatcactttgaacaagtgtgtaattgtttt

SEQ ID NO: 54525 - DNA, 453 bp, Zea mays
  Clone ID: MRT4577_149728C.1
caaccctcgtccactctactcctattgacaacaaacaacatgcgtttccagaccgtcgtcgcagcgctgctcgtagccacactcgcccatgctcagacaccgccaactccaccaacgatgcccgagcctccatcgatgccggcaccgccatcgattcccgcaccaccctccatgccggagccgccaaagatcccatcacctcccgtggttgaagtgcccagtggcgagtgcttgacgtgcttgaatggagccatgaagtccgtcccggcctgcagcaaagtcgattacatctggggtagtcttggcaacttgcccaaagatcaaaaggactgcatttgtgcccttgccgcgtcctctacctgggtggatacttgcaaagctacttgccccgccaagatgattgagccgagcaatctctacaacaacgactggaccaagagtcagtgcggagct

SEQ ID NO: 54526 - DNA, 282 bp, Zea mays
  unsure (1)..(282): unsure at all n locations
  Clone ID: MRT4577_149729C.1
tcccacccacctcntcaacatatcaacagcctcctcaacacctaaccatcatcacccatctctttagaacaccgtaacatcatctcactatcattcacgattatccacaccctacacatccatccaccctaactaccgacccactcactaactccagacatcttcccaacacctaacccctacaccccaatgcttacacataaaaccacccaaatgaccatccaaaaacacatctaaactgttgccccaaaaccgactcccacgaacccaaagcacataaca

SEQ ID NO: 54527 - DNA, 2033 bp, Zea mays
  Clone ID: MRT4577_14972C.1
ggcgttccgaagtagcgaacaggcccgactcgaatcctagtggatctcgtcgccaacccttttattcgatgccgacgcggagcttgtcctccctgcccgccaattccttggacttgtcagctagctgacgcggtgaacgtgtggactccgctcgggtgggggtggcggcccgaagcccaaaccgcatgggctcgcggccgagctgaccgagccggacccagacccactcgctcctccgcccccgccgcaatggaggagccggcggcggcctctgccctggaggcgcgcggcgacctgcgctcggcgcttcccttcctccccgtcgtcctccgcggcggcgcactcttctggccgccggcggcgcaggagtcgctccgggcgctcgcgctcggccccgacgtcagccgcgtcgcctcgggggacgttctcgccgacgcgctcaccgacctccgcctcgcgctcgccctgcccgcgctgcccccgcgcgctgccgacggcctggcgctcttcttcgacgacctcctttcacgcgcccaggcgcggggctggttctccgaggtcgtccccaacctcgcacgcctcctcctccgcctccccaccctgctcgaggaccactacgccaaggctggccacggcgcctccgggctccgcgtcatggcgtcgcaggacgcgggcgtcgtgctcctcagccaggagctcgtcgccgcgctgctcacctgcgcgctcttctgcctcttccccacggccggtagggcccaggcgtgccttcccaccatcaatttcgatggcctgttcgcgccgctgattcacaatgcgaggcaaagccaggagcagaaagtgaggtgccttgttcactatttcgagagggtgactgattctatgcctactggtttagtttcgtttgaacgcaaagttcttccccgccgagcgttctctgatggcgttccctatcctgacatccatgcgtgggtggcatctagtgcaccactctgccaattcacggtattttcatcaggtttcatagaagatgaagaacaagaagcccttcaagttgactttgcaaataaatatttggggggaggtgccctttcctggggttgtgtgcaggaagagatccgcttcatgataaaccccgaattgattgtgggtatgctattcttgtcttgtatggaagataacgaggctatagaaatctttggtgcagaacggttctcacagtatatgggttatggttcctcctttcgctttgtcggtgactatttagataccaaaccctttgattcgatgggcagacggagaactaggattgtggctatcgatgctttggactgtccagctaggttacactatgaatctggctgtctcctaagggaagtgaacaaggcattttgtggatttttcgatcaatcgaaacaccatctctatgcgaagcttttccaggatttgcacaacaaggatgacttttcaagcatcaattccagtgagtacgtaggagtttcaacaggaaactggggttgtggtgcttttggtggaaaccctgaaatcaagagcatgattcagtggattgctgcatcacaggctcttcgcccttttgttaattactacacttttgaggacgtgtctctgcaaagattagaggaggtgatccagtggatacgacttcatggctggacggtcggcgagttgtggcatatgctcatggagtactcatctcagaggctgggaggagaaacgcacaagggctttttggtttggttgcttcccagcgacaggcccaagaatcaagtgcattacatgtccgaatagcaatagacccggtttttgtgagacgcgcagctctcctagggctgatttgatgattagggatccacaggggaggaattcccttgcaattcaatttttaatagcaagaggatttcttcccctcgggatcccggtcaccaaatcagctcttaggagtgtgtgcatgaacgaagttattgctgacaaaaaaaatgaaataaagataaaatcgtatgtatcagttgcccccc

SEQ ID NO: 54528 - DNA, 695 bp, Zea mays
  unsure (1)..(695): unsure at all n locations
  Clone ID: MRT4577_149730C.1
aattcggcacgaggctcagatgttcccgttgcacgattcgaacggcggcgaatcgcaaaaaattgggagggagaggtcgagtgcgaacgcctcctcctcgccgccaccgccaccgccgccgccaccaccacaaccggcgtctcgtcggctataaaaccctaccccttctagtcttcccgtcgccaccagccgcctcgctgaaaccctaaacctctctccccgttaggtctcccccagcgccccgacgatggcggaggacgcaccgcctgcagcccctgtgatgacgccggaggaagtgcaggctgagaccgagctgcggatgcgcgacataggccagcgctttggtgctatcccagaggaccccgacgagctgctccggttactcgaagaagccgaaatctggttgtccagggtggatcaatctccgcccgagagcatgtacaatgctcttcgccccaccatggctgttttgattacaaatgagctactggagcaccctgatcccaacgtgaaggttgctctcacctcttgcttaacagaagttaccaggattactgcgccagaggccccctatgatgatgatgttatgaaggacgtgtttaagagagtcgtaaagacttttgctgagttggatgatatgaacagccccttctttgncaggagggtttcgatccttgattctgttgcaagggttc

SEQ ID NO: 54529 - DNA, 348 bp, Zea mays
  Clone ID: MRT4577_149731C.1
gcggagcgggaggccttcacagaccgtatcactcttctaccattatcttatgttaactgtgcgagtggtcacactcctgacgggacccgaaagatcatctactatctctgagcctatcaaatccatacgatactctcgtgcaggctcgaagccatacttacgtgcaaatcgctcatctgtcttgtatataggttcgatacactaatccaaccatctagtacttggttcactcctaactttccctcacgatagctgtagcccacactagttctatcggctaaagccaatgattatatgcatccttttctcaacgctctttacctatcttcatactttacctagctatta

SEQ ID NO: 54530 - DNA, 613 bp, Zea mays
  Clone ID: MRT4577_149732C.1
gaggcggagcaggtaaacccaaccgtaatccaccttttcagaaatgaaattgggcgtgggagggcggctccatgttctactactctgcaccccaaactcgaatccacctgcaacggagacattatatggctgcttgttggacctttcatctgggagtggagctcctattctggatgcacaacaggtgtttgagtgtttgcttcaaccccacacagataaaggtaaaaagattgtggttcctcttcaatctcctgaggagatgcccaaacaaggatcactacacatcaacgattctacccactgcactaatttgcttaatagacgcagcagcatcatatcctatcgattcctacccagtcttcacctcatcagctccacatagctagctttttttgatgttttttttcccacaacatgaaagctgtagttgaagccaccgaagatcaggcaggaacaatgcaacagcaacatccactcccgccggctttctcattgatttcccacaaggcgaaagctaaagctcaagccgctgtaggccaaccatcagcatttgcgttgttttactgtacctatttgaaatctaatgtttttcctttcctttcaatcacataaa

SEQ ID NO: 54531 - DNA, 426 bp, Zea mays
  Clone ID: MRT4577_149733C.1
gactagtttagatcgcgagctgccgccctttttttttttttttttttttttttttttttttttttttttttttttttttttttttttttttttttttttttttttttttttgggtttttttttttttttttttttttttaaaaaaaaaataaaaacggggcattcatttttttcctttgggggggggcaaaaatttcccctggttcccaaggaaggaaattggaacccaaaaggcaaaaggggtggtgatgcagaattaaaaacaaacaaaaggggagagggagggaaaacgggttaaaaacccccaaatcccgggggaaaaaaaaaaaaaatggggccaggcgaatgaggccttggtttgaacgggcaaagggttaaaaccttgcccctgttgggggccaaaatttttctgaaggggcctttaaa

SEQ ID NO: 54532 - DNA, 999 bp, Zea mays
  Clone ID: MRT4577_149734C.1
cctcgaggctcggccgggtatttggcactttgggtgcgccaacttgtttggctcgtgagctagctccagaacccattaaaaaaagagagctgagctccatttgcagcttgtgtactgaccactgctaccctgtgtgtgtgcaggaagacgatgccagtggaagagatcctaacgatcgacgtgaagcccgggtggaagaagggcaccaagatcacgttcccggagaagggcaatgagacgccccacacgatcccggcggacctcgtcttcatcatcgacgagaagccgcacccggtgttcacccgcgacggcaacgacctggtggtgacccagaaggtcccgctggcggaggctctgacggggcacaccgcgcgcctgacgacgttggacgggcgcatcctgacggtgcccatcagctccgtgatccacccggggtacgaggaggtggtgcgcggcgagggcatgcccgtccccaaggacccgtccaggaagggcaacctccggatcaagttcgacatcaagttcccggcgaggctctcggcggaccagaagtccggcgtcaagaggctgctcgggcagtagaacgcctcgtgttgttttggagtattgtgtatcagacattttcgtgttggttcatcttgaactggggtggagggagctgccatttgcagcctccgcaacgacgacgatgacgaggccaccaagtgttgagtacagaacagctactattgtacggtgtatggttgagaaacttgagatgtgtagcggaggattccttgtgcgaacttccagatcgtggtggttgtctgttcaccggtccacgtcgttgcaacttgcaagggtcgcggatggagtaactgttggccacgaacacgcgcattctctgtattcgttattgtaacaaatagtcattgcaaacgatagttgtactccgtaaaaaagaataaagctcaaggtttaagagaaaaaaaaaaaaagggcggccgccaccgcggtgga

SEQ ID NO: 54533 - DNA, 707 bp, Zea mays
  Clone ID: MRT4577_149735C.1
cattcccgaacagaaaaagaaaggaacacacacacaggcggacgcgtagagcccatccccgcagggccgagatccccgccccactcccccgaacaaccgccgccgactcgccggccctcgccgccttccccgtcgccggcgctcccgctgtagtacgttgcaggacttcgtgtgctcttcttcaccagtgccgtctaagatggtgtcctttgagatgaatgaccttaagaagatagggctaagcctgacaggctttggagtattcttctccttcctgggaatcgttttcttctttgacaaggggcttattgctatgggcaatatactcttcctgtcaggtttgggtttgacaatcggtctgaaatcaacaatgcagttcttcacaaagcctaagaattacaagggtaccatctcatttggcgcaggctttttcctggttctcattggatggcctttctttggcatgctcttagaggcatatggttttatcgtactcttcagtggattctggccaactctcgcagttttcctgcaaaggattcctatccttggctggatttttcaacaaccatttgtcacttcgttccttgaccgttacagagggaaacgagtgccggtgtagtatcatttcgcgctatgtttcttttgatgtagcagctgaagttttttccttccctggggacaacagcaagtagttatgccatcct

SEQ ID NO: 54534 - DNA, 184 bp, Zea mays
  Clone ID: MRT4577_149736C.1
tcggccaaaccttcggaccaacttggggcattaaaaggcccattgtgttccaacaatggccgcccaaacattttggcttcctatgctccttggactttctgcaagggctggttccggaaacctttttccggaatgcttggaagcttctatagcttaccttgtttccccggacctattacccacg

SEQ ID NO: 54535 - DNA, 361 bp, Zea mays
  Clone ID: MRT4577_149737C.1
accacacggtgagaagctccttctggcactgcaaggaagcctcgacgtcgcgaagcaagagaaggtgctagcttcagtgctgtctgcgctgaaggtttccatgcataagatgctggtgaagaagcactactcggaagaggggagggagcagaggaaaagaggtaggaacgacaagaagatgaagaactagctcagcacgcggtatgagtttctataacggttctctttttgtttgttttttgagggaaacaaaaacatatattactgtggaatcagaaaccgtaagagtaataaatttgccaggattttttcttcttaaaaaaaaaagaaaaaaaaaaaaaaaaaaaaaaaaaagtactct

SEQ ID NO: 54536 - DNA, 311 bp, Zea mays
  Clone ID: MRT4577_149738C.1
aaaaaaagaaaaaccccctctaaaccctacaaagaaaatattccaaacaataaaaccggcatgaacaaaaatgaaccaaatgccaactaaaacaatgtctgaagcaaaaattaccccatggacaaaaaaacgcaggatctaaaccgaccctatatacttaaaacccttctattgcagggacaaaaacactatatcatggcaacataaacttacaacgtgcaagagacaaaactgcttaacttaacataacaggggacatgattactgcaaaacaataattaactcaaccccaaaaaaaccttgggcaaaaa

SEQ ID NO: 54537 - DNA, 1761 bp, Zea mays
  Clone ID: MRT4577_149739C.1
acggccgggccgggatcctccgaatccctcccgggctcctccgtctcgcgctcgattcgaatccgagctccctatcctgatcctgctgctccaggtaccctgctcgattcgaagccgagctccctatcctgctcctgctgctccggtgctcctgctgttcccgctgcaatggaggacaacgcggtcgaagagcccgagttgagcggtgcggcggagttcgcgccggcgctcgtcgccgcccacccacacggcaactccgtcgccgtcgccatcgggcccgagctccgcgtgtttgatctcagggctggtcatccagtttcattgtcagatgattgtggtggccattctcattcagacgcaataagagctatctgcttcagtgtgagtggagctttgtttgcttcagctggtgatgacaaacttgtgaaggtttggaagactgattcgtggcgttgcatccagactataacttcggagaagagggtcagtgcagttgttattagcaacgatgacctgtatgtatcttttgcagataaatttggtgttgtttggttagtcactttgcgggaagatagtgcagagcaggtttcagttgataacaaacctgtgtcaattcttggtcactattgcagtatcatcactagcatgaagttttcgccagatggacggttcattgctactgctgatagggacttcaaaatacgagtcacattattcccaaagaatcctctaaaaggggcccatgaaatacagagcttttgccttgggcatacagactttgtatcatgcatcaccttcactagcatatctgaaaaccagagtttccttataatcaggagggaggtgattcaactgttcgcctgtgggactattgtaaaatggatgtctccttgatacatttcaagccaaagataagatgggagaactcttaggaccaaatgaaacagatgatagcagcctagccattacagacatatgtccgagtaatgatggctcattggttgctgtagctattcaaagtttcagtggcataatgcttttagcatgtgatttggtaggaaagaagctatctttcctaaaggtgattacaatggaaaagagttatattcctactagcctagcatccagctcggcctcggaactcctgtggactgtcatgggcgcatcaaacatgcccagccaggcttcctcccatctattgacccgtttaaggatcatcacgtgtttccaaaaggacagattatcttcttccgatgccggtcctgcaacccttgaagacggcgatgtaccccacggtgagaagctccttctggcactgcaaggaagcctcgacgtcgcgaagcaagaggaggtgctagcttcagtgctggctgcgctgaaggtttccatgcataagatgctggtgaagaagcactactcggaagagaggagggagcagaggaaaagaggtaggaacgacaagaagatgaagaactagctgaaaagaggatgaagaactagctcagcatgcggtatcgagttgctataacggttctcttttttgtttgtttttttagggaaacaaaaacagatattactgtagtatcagaaaccgtaagagtaataaatttgccaggatttttcttttcttagtacgagcgtattgtaacagtaattcatgcttatcgctccagtaaaactgctgcagcttttgcgactccttgtcctcatccgtcgtgatccgtggctttaaacgtcactacaaccaaacggaataattgc

SEQ ID NO: 54538 - DNA, 549 bp, Zea mays
  unsure (1)..(549): unsure at all n locations
  Clone ID: MRT4577_14973C.1
ccggccggggaccatcatattccgagtgaagctacatacaagcttcatctcttactcaaagccaccacgttaccccttcgccttttccgccaggcctctagaagccttcccgcatttcgtcctctgacaatcttcaaaatggcttccttcgcctcccagacatacactcccaccgaggaggctgagatccagcagtggctcaccacctctgagcgtctcaaatcccccgaggacaagtccaccatcctcgagaccctcaacaaccacctttccagccgctccaccctccttggcagcaagccctccaaggccgatgtcgccatctacgagaccctcgctcccgttgtcgcccagtggtcccccgaggagcgcaccggcgagaagggccacccccacattgtccgccatgtcgactttgtccagaactctcctctgttcggcctcgatgtcaaggatgagaacaaggtcaaggttaaccaagatgaggtcctctacgtgaagcctcaagtcgacgccaaggccgaaaaggagaagaagaanaaggctgcc

SEQ ID NO: 54539 - DNA, 986 bp, Zea mays
  Clone ID: MRT4577_149740C.1
ccggccgggacccccagtgtcaaccgccagattgatgagatccgtgagaagcttgaagaggagcgatctctccctgagacccgctgggttgagatcttcactggtccccgtatgatgtaccgtaccctcctcggcatcactctccaggctggtcagcagctcactggtatcaacttcttcttctacttcggtaccactgtctttgcttccaccggtctcaaggactcctacgtcacccagctcattctcggctcagtcaactgcgcttgcacctttggcggtctctacgtcgttcagaagtgtggtcgccgtatctctctgatgattggtgccgcctggatgatgatgtgcttctttatctacgcctttgttggtcacttcgctcttgaccgcgccgaccctctcaacactcccgccgctggtaccgtccttgttaccttctcctgcttggccattgtcgctttcgctaccacctggggacctttggtctggaccgtcaacgccgagctgtaccccatccgataccgcagtgtctgcatgggtattgccaccgcttctaactggttctggaactttatgatctcgttcttcacccgattcatcaccgacgatatcgactacttctacggtctcatcttcgctggttgctgtgctgctctcgtcctggttgtcttcttcttcgtcatcgagtccaaggaccgaactctcgaggagattgacaccatgtacgttcagcacgtcaaccccatcacgtcgagccgatggacccccaacaagcagcaccagaatgaagttggagagattagcgacgtgcgaagtcacacgcaaaactctgagaaataaagtgctgtagttgtgctggttgctttagctagttctctagttgcgtgtttaacacgacactgggggctagtagcgaattgctagcatgtatgatagcatgtaaaataccatgtagaatatcatgaatgattattgttgataat

SEQ ID NO: 54540 - DNA, 589 bp, Zea mays
  Clone ID: MRT4577_149741C.1
cccacgcgtccgcccacgcgtccgcccacgcgtccggtgatcccttttttagtcaacactatgattttggctcaagactttatttttgggtaactacccatctgctcaaggtatcattatatttaaagtgagcaaggttttagtactaagtttaagtattgtacatgtactttagaaaaggttgaaaattccagcagcatactttaccttgtgctatgtgtgaattacgagccctattaggttgttgtggcaatctgacatagtcacatttagcccatacacctggtagtcagtgtttgcttcctgctgcactggtgtgcgacgaatccttccatgaggtagccccttgccacatctttctcatgtcttgtataaacatagcaaagaggaaaagacaatgtttgtcagctcttaaagctcaccaaacttggggtaaattaagggaccagcagtcactgttaagccaagcacgaggcatgtgaagttgccaaacatagctttacatttgtaacaatacactatgccatacttaccaaaaaatgaagccaccgctcctagtattgtatgtgccttggtgtggttaaacact

SEQ ID NO: 54541 - DNA, 766 bp, Zea mays
  Clone ID: MRT4577_149742C.1
tttttaacaacggatgctggagccctttattagtcatgggtatacaagtacataaaagaaaagtaacacaaatcacatcaaatcgaaccctaaacaacgtgttctggcctccatcttgagaattgtattgtgtaaagcctaaggctgtccagcaccaaatccagatccgctgccatcgccgccgccactcccaccattgtagccacctcccctgccactgccattgccgtcagcactagcttctgcacgcgctggtgtggccgagaccacgttgccggaattcgctacgctggaaccgtatccatcgccaccaccggcaccatacccgccgccaccgtctgccgagccttgtccagcaccacggccgcgaccactgcccccagcactagtcgacccgccatagccgtaacgtgactgcgagctataactagacccgtaccctgtgccaaacccagccgcagccccagaacccgccggctgcgaccaagaactggccccgcctccgcccccaccgcttgcatggactccagccccatcactctcaccggatccagatccaactccggatccagagccaccaccgttcagatacccgctaccattaccatctccggctccttgcccttgagagctggagtatctagccaccctgatggcgctggctgatccaatgctcaagagaacaaagaggctaagtgctagtgcaagttctttgctagccattgtgagcctaactagcaatcgctaatagccgacactacgcgct

SEQ ID NO: 54542 - DNA, 258 bp, Zea mays
  Clone ID: MRT4577_149743C.1
gtcaggacgcaactagacctagtctgattcttctcctcaaccatagctgcctcatggtgaggatcacctcctattcaaagacctatttcactcacacctccataccgcgcattcattattcgacctgaaaactctgttacgactactcacttgcataatactagatactaaatacttgagttctacatacgatacactaactcattcacttgcctatacatatacatgcataactattacactataatatccttctca

SEQ ID NO: 54543 - DNA, 461 bp, Zea mays
  unsure (1)..(461): unsure at all n locations
  Clone ID: MRT4577_149744C.1
ctataaccctggtngatgatatcctaggcatacgcaggatagtgaggatatttatttgtagtttttgtttcatgctaattttgcctaaacacctagtgtctaatattttgtattatggaaaagtctgtctaatctcaattcatattgagatctgatagatacatctgagcacaagggctaactatattgcatgcagtggatttttatgactttgtaacagggaattttcatggtgctaatttatttataattactaaacaagtggcaataaaaaattaagaaccaatcttttggtgagcaattattctaattgaccatttgttttcataaatacatgatcttttatcaggttatggtcttctaaataggtgcaggagttcccattgatttattttatctcaaatttttagggagaagcccttggaaaaagcagaaagggcattgtagaacctatacagcct

SEQ ID NO: 54544 - DNA, 3879 bp, Zea mays
  Clone ID: MRT4577_149745C.1
atggacccctccacctccttatccatctatgacatatccatacacatacttacctccaccatatgtcccaaatcaaatgtggggcatgccaccatatccatttggaatgccacagtaccccgcctggggggggcaccccaaacatccgtttttgataggttggcgccgccagtgcaagaccgattgagcgctgctgaatccggtcaccaggcacaggcccaacaagattgccggactactcggcctcctaggccgaccaattcggcaggggggcatatgcctgtagcaactcaaagaacaacgaaaaaggacatcatcaaaataggcaccacagatgttgtcatacggggagacaataaagggccgatgatttttggcgaatcggccaacacaaccgaaaaggatacgactaccatcaaaacagccgatccaaaatactccatgcctcgatggtgcccagcgggattgacacgatcccaaaagagaaaattacagcgcctaagagcaaaggagagccaggagaaggaggcggaaaagatatttaatgacacacatccactatacccgccatcgcaaaagaaatggagatcgaaggccgttgagaaaaaacaaacggccacagaaatagaaagtcaacctgcaccaggcgcggaccgtccggcccccgcgcacggaccgtccgtcgttcaccaggaagcctctggacaacctgcaccaggcgcggaccgtccggcccccgcgtgcggaccgtccgccgttcaccaggaggcctccaacgacacgacaacatcaatggaagaggacgacttgctgggagaagacctggtcgactacgaggcttctccagaacgcccaggtatggatgtaaatattattacattttccgccaattgtactattatcggcgacgatgaacctattgttgcccagtttgattttggtcctaaagaagccgcctttactaaaccaaaagaatcggtaaatcatttaaagccgctcttcgtgcgcggccacattgatgggataccgattgctaagatgttggtagatggaggggcggctgtaaatctaatgccttattcattgtacataaaattaggtaaacaagatgacgaacttgtcaagaccaacatgaccctcagcggtgttggaactgatagttcgatcaaagccaggggagtcacgtccgttgaattaaccatcgggactaagacccttgctgctgcattctttgtcgctgatgtagaaggaaattacagtttaatcctaggcagagattggattcacgccaatcaatgtataccttctacattacatcaaattctaatacaatgggtaggcgatgacatagaacaagtacatgctgatgtatcagcctgcatcgctgtggccgatgcccctgtactctggacttatgagactgctacatgtctcacaggagtagatttttctgattatcaattcataagtatagataagaaagttcatgagtctctgatcacggacagttcggcttccaaggccggatggtctggtctttcacaaaagggttcggactttaagatcgaacatgtatcacagcaaaaggacaatattacggataatccggtccccgagaccggaaagtccgccgtcacacaaagaccttctaattcctctgtggggaacatgatagaggaattcagagatcttgataaactaggacagggatttacatcggccgatcctttggaggagattgacataggagatggtaaaactccaaggccgacttttgtaaacaagaccctggagaccgatcctagagatgagatgatcggtctattgaaggaatattcagattgctttgcttggaattacactgagatgcctggattaagccgagagatcgtagagcatcggctgcctatcaagtctggtttcagacctttcaagcaaagagctagaacatttcgtccagatcttctcccacgcatcaaggacgaaatccaccggctactagaagctgattttatcacaccttgcagatacgcagagtgggtctccaatattgtgccggtggagaagaaggagtcaggaaacactgtggaagtttacattgatgatattgtagtcaaatcggctgagtttagttctcatatagctgatttgcgcaaagcctttgataaaatgcgtcagtatggtttgaaaatgaacccacgtaaatgtgcttttggagtgtcggctgctgaggataaggtcattggggctgttctgacacaagaaactgaggggaaggagcatgtggtgacatatctaagccgaaggttggtggatgctgaaacaagatgttatttactgtctagtcattgcactgtttctggtcaagccgatgtgatcaaatacatgttgcataacccaattatgagtggtagaattggtaagtgggcttatgcactaatagaatatgacttggcctatgaaccactgaaatctatgaaaggccaagtcgtagcggatttcattgtagaacatcgggttaatgatatttatgagctagacatgtcatacctcactattactccttggactttatattttgatggatcggtttgcaatgaagggcaaggaattggcattgtacttgtttcaccaagtaatgtctcctttgacttctctagccgattgaaaacttattgcactaataatcaagctgaatatgaggccctcctattcgacttagaactcttaaatggtatgggagtaaaacatgtgaaggtatttggtgattctcagctagttgtccaacaagtgttagaagaatatcaatgttttgatggtactctaaatagttaccttgagaaatgttggagcataatccattcatttgacgaattcagtattcaacatatctctagagttgagaatcatagagctaatgatttggcacaagatgcatcaggttatcagataaagagagggaagtttcacaaaactgaaaatctgataactagtgcaaagccaaattcccaggtcgcggactgtccgcgtgatgacgccggaccgtctggggttaccagaaatgttcttttcatcaattcggctgacaatgaagccaatgcaagtgattggaggacacctatacttaattattttcgaaatcccaatatcaggacagataagaacattcagcgaacaactttcaagtatattttgatgagtgatgaactttaccgccgaacagtcaatgacatcctgcttaagtgcttgggcccagatgatgctatattagccatggccgaagtacatgagggaatttgtggtactcatcaatcagctccaaagatgaagtggttgttgcgaagaggatggggattagactttattggagaaattcatccttcatcatcaaaggggcatcagtttgtgttagttgccactgactacttcaccaaatggactgaagccgttgctctaaagaacatgacacacaaggaggtaattgagtttataactgagcatatcattcatagattcggtattccccagaccttaactacagatcaaggtacttcttttatgtcaaaggaggaagcagtattgcctgtggaaataagtttgaatgctgtcaggttcgccagacaaaatgatctaactatcactgattattataattcaatgatggataatattgatgaggtgaccgacaagagggtgatagctttgggagcaatagaaaaggacaagattatggtagccagggcctacaataagaaggtcaaagcaaagtcatttcaagtaggggatctggtgtggaagaccatcttgcctctaaggaataaagaccagaagtttaggaaatggtcgccaagctgggagggtccttataaagtaaaatag

SEQ ID NO: 54545 - DNA, 6686 bp, Zea mays
  Clone ID: MRT4577_149746C.1
atggctcgtagaagatcccaaaagaacaagaagactcctctatcaaacgcaactcaaaaggaggtaactcttgaagtattatttgatgattgttctaattatgactcatggtcctctagtgtgataaatgcttttagaaccatagatccacgattagaacaaattatagacaagagtattttttcctctaatttcaatggaaaaattaattccgaggaggatcaaagatgttatcaattaaattatctagcttttgacatcttaactaattctcttagtaaagaagattatcgtgccttcatatcaaattatgacgaatcaatccatgatgcgtatgatatttggactagaattagaagcaaatttgatgagtcctattatgatagttcattttgtgcttctacttcctttggtacttgtgatactaacccttgcaaggaggaagatgaaaatgaacgatggagaccaaacgatgaatccacctctccaaaaggttgtcacaaccagtcacaacccctttatgggatgccgatggacacgtactctgagcaaccgcaaatcggcagcaaaacagccgatctgcacatgtctggaccatccgcgcgtgatcgcggaccgtccgggccagccacggccggacctatttttaacgaagtacccagacacgcacccaagccaccacatatgacacagaacccaaactacccagtcggacggtccgcatacaacgacggacggtccgcatataaccacggacggtccgggccaaatcttcggcttgttcctccttacagccggttcaaaagaaacggcaagaggaggttaagttcacgtttaatgttgattcaatcggccattaacgaaggacgattgaaatttcaggaaatgcaggtggatacagagccctttccgatgaacatgatcgacttcgagggcaagaaagtcctggttcggccaaatacagccgataaaggcaaaggcaaagaaacaatcatcggcaatgctaaaaaggccgatggggatggtaaagtttcatgcaggaaagtggtggccgagaagactcccgatggaggggagaccctgagggagaccatcacgaaaaatagaactgggggacatgcgcagacagggagacagaggcgggaacccgtgcaccgcatcgcggacactccaccacccaaacgcggacggtccgacgcttatccggatggtatggaggaatccagcgtacggtccggccatgctcaggactcgcagcgaccatgtaccttcaaaccacgacgaccagagattggtacgtggaaaacaaatacatttaaagcagctggtcggctgatcaagcctggcccgactttcgatcaattgttgtctaaatacgtaaaaaagaaggtcggccccagtaaccggccaacaaagcgaccccgctcacccattcatgagcaacgtcaggtcaggccgattggatcaccccaccaatcggaagaaatgaaaggtcatactgtacaattgagacctaacataccgacatggacacctccacccccttatccatctatgccatatccatacacatacttacctccaccatatgttccaaatcaaatgtggggcatgccaccatatccatttggcatgccacagtaccacgcctggggggcaccccaaacatccgtttttgacaggttggcgccaccagtacaagaccgattgagcgctgctgaatcctgtcaccaggcacaggcccaacaagattgccagactactcggcctcctaggccgaccaatccggcaggggggtatatgcctgtagcaactcaaagaacaacaaaaaaggacatcatcaaaataggcactgcagatgttgtcacacagggagacaataaagggccgatgatttttggtaaatcggccaacacaaccaaaaaggatacagttaccatcaaaacagccgatccaaaatactccatgcctcgatggtgcccagcgggattgacacgatcccaaaagagaaaattacagcgcctaagagtaaaggagagccaggagaaagaggcggaaaagatattcaatgacacacatccactatacccgccaccgcaaaagaaatggagaccaaaggtcgttgaggaaaaacaaacggccacagaaatagaaaatcaaacaacacctgcgcagcaccttgcaggtatggcagatagcacggccaacaaggctggacaatctgcaccaggcgcggaccgtccggcctctgcgcgcggaccgtccgtccttcaccaggaagcgtctggacaacctgcaccaggcgcggaccgtccggcctctgcgcgcggaccgtccggccttcaccaggaagcgtctggacaacctgcaccaggcgcggaccgtccggcccccgcgcgcggaccgtccgccgttcaccaggaagcctacaacgacacgacaacatcaatggaggaggacgacctgctgggagaagacctggtcgactacgaggcttctccagaacgctcagttgttgagtctctggtcacggacagttcggcttccaaggccggatggtctgatctttcacaaaagggttcggactttaagaccgaacatatatcacagcaaaaggacaatattacggatgatccggtccccgagaccggaaagtccgccgtcacacaaagatcttctaattcctctgtagggaacatgatagaggaattcagagatcttgataagctaggacaggggtttacatcggccgatcctttggaggagattgacataggagatggtaaaactccaaggccgacttttgtaaacaagaccctggagaccgatcctagagatgagatgatcggtctattgaaggaatattcagattgctttgcttggaattatactgagatgcttggattaagccgggagatcgtagagcatcgactgcctattaaatctggttttagaccattcaagcaaagagctagaacatttcgtccagatcttctcccacgcatcaaggacgaaatccaccggctgctagaagctgattttatcagaccttgcagatacgcagagtgggtctccaatattgtgccggtggagaaggagtcagtgtcgactggtaagtttttaggatctgtcatacatgaacatggtatagagatagaccctgaccgaatcaagtctattcggaatgtgggacctccgacctctgaggataaggtcattggggctgttctgacacaagaaactgaggggaaggagcatgtggtgacatatctaagccggagattggtggatactgaaacaagtcattgcactatttctagtcaagccgatgtgatcaaatacatgttgcataacccaattatgagtggtagaattggtaagtgggcttatgcactcatagaatatgacttggcctatgaaccgttgaaatctatgaaagaccaagtcgtagcggatttcattgtagaacatcgggttaatgatattcataaactagacatgtcatacctcactattactccttggactttatattttgatggatcggtttgcaatgaagggcaaggaattgacattgtgcttgtttcaccaagtaatgtctcctttgacttctctagccgattgaaaacttattgcactaataatcaagctgaatatgaggccctcctattcggcttagaacttttaaatggtatgggagtaaaacatgtgaaggtatttggtgattctcagctggttgtccaacaagtgttagaagaatatcaatgttttgatggtactctaaatagttaccttgagagatgttggaacataatccattcttttgacgaattcaatattcggcatatctctagagttgagaatcatagagctaacaatttggcacaagatgcatcaggttatcggataaagagagggaaatttcacaaaactgaaaatctgataaccagtgcagagccaaattcccaggtcgcggaccgtcctcgtgatgacgccggaccgtccggggttaccagaaatgttctcttaatcgattcggctgacaatgaagccgatgcaagtgattggaggacacctatacttaattatttacgaaatcccaatatcaggacagataagaacattcggcgaacaactttcaagtatgttttgatgagtgatgaactttatcgccaaacagtcaatgacgtcctgcttaagtgcttgggcccagatgatgctatattagccatggccgaagtacatgaaggaatttgtggtactcatcaatcagctctaaagatgaagtggttgttgcgaaggtctggtttttattggcctagtatgatagctgattgtttcaagtactacaagggttgccaagtgtgtcaaaaattcggcgacctacagttggtccctgcagccgaattacatcctatcatcaagccttggccgttcagagaatggggattagactttattggagaaattcatccttcatcttcaaaggggcatcagtttgtgttagttgccactgactatttcaccaaatggactgaagccgttgctctaaagaacatgacgcacaaggaggtaattgagttcataactgagcatattattcacagattcggcattccccagaccttgactacagatcaaggaacttcttttatgtcaaaggaggccaatggacaggccgagtctagtaataagacattgattaacttgataaaaaagaagatatcagagaatcctaagcattggcataagattttgtccgaagctttatgggctcacaggatatctaaacatagtgctactaaagtgtctccttttgagcttgtctatgggcaggaagcagtgttgcctgtggaaataagtttgaatgctgtcaggttcgccaaacaaaatgatctaaccatcactgattattacaattcaatgatggataatattgatgaggtgaccgacaagagggtgatagctttagaagcaatagaaaaggacaagatcatggtagccagggcctacaacaaaaaggtcaaagcaaagtcatttcaagtaggggacctggtgtggaagaccatcctgcctctaaggaataaagaccggaagtttggaaaatggtcgccaagctgggaaggtccttataaagtaaaacaggttatatctggtaacgcctatttgctacaaacattacaagacaaggatttacctaaagctttgaatgggcgtttcctcaagcagtaccatcctaccgcgcctcgcaggtcgcgtcaagcaagcgcaggtgcagtcctcatcgcgaaggggccagatatgctgctctctgcgtttctcggcgattgcctgttcagctacccgccgccgcctcttctacccgcaacaacggctgccccgagaccgagcacgcgtctcccggttccctttcctgctcgcctcaggcccgcgtccctcgtcgcccgacggctgacggcggaggcgggggaggcgctgagcgcgttatccgccgcggagggcgacgacgaatacgaagcggagctccaggaggaagggtttccgagctgggcgggcggcggcgaggaggaggactacgaccacgaccccgaaatcggagacattatgggggactacttcgacgaccccaagaagggccaaacccgcatggaggataggataagaaagaaacgccacaagatcgtgcaaaccaagaccggctctccaaaccccatgaaggtcgtcttcaacaaatttgacttctccaattcctatatatggttcgagttctacaatgttttgttgccaaaagatgttacgttgatttctgattctctgcgatcatggcatatagttggccgtcttggtggctgcaattctatgaatatgcagttatcgcaattgcctttagattgtaaaaggctgacttatgatgctcttgaaggagctaacgtcactccgacgtccttttacaacattggtgatcttgagattcaagataatctagcacgagtatgggtagacattggtattcatgagccattgcttctggacatcctgcttaatgccttaacaacaataagttcagatcatgttggtattaagcaagtacagtttggagggtcagagtttttgaactggagtgaggacttgaagacagaagaagttggatatagtgtgtgcaaaatctaaatagcacaatcccgagatttgcagaagcagctacctttttagctaaacgcaaatgcaacatctggttcgaagctagggttttaaccaccttgatcctgcaaacgagaagaagaaaatggtgacaacacgatgaaaaattgacgtccaaacatattaacttctgcttgaaaagaggttgccgtccttacaggactctgctagctacacatcaacacatcattggtaatccttctgcatacatgtaataatataatataactagattatctgatgtccaacgtgtattgactctacttagggctgaacataatacttatggctcgttagttcgcttggctcgacttagtttatttcaattttgttacgagctaagttagtattttagctcggtttgttaacgagccatctcgttagctcaaacgagctatcatttatcaacaaaataaagtcttcacttatgttggatgaactaataagtgattagttatattaatttggtgttgaatttatgtggt

SEQ ID NO: 54546 - DNA, 6624 bp, Zea mays
  Clone ID: MRT4577_149747C.1
atggccggttcaagggaaagctctgatatttctccaagcaacatcatagagccgacttgggaaaccttgccggctgacgagcagctccagttcgaggagcacaaggagcggatgatccaggaggcgaaagcaaagttcttggccaacttcaaagtggacaggaacaacaaggtcgtccgacatcgggcgacggatccagcttcgctgcaacccacgccagatatccccaatgctgtgacgatcagtcacatcccctgtacgggatgccgatggacacataccctaatcaaccgcaaatcggcagcaaaccagccgatctgcacatgcccggaccgtccgcacagagtcggtggtctcgcaccggctgccattgatatagtaagggaagagatagccggggcgttccgagataagctcggagtaagcatggtccctggggggcaatcatatcggaaaccttatgacagccgatttgatcaccacccatacccacagggaaccaggatacccgaattcgcaaaattttcgggtgatcaagggaaaaacacacgcgaacatataggtcagttcttagcacaattgggagaattggccgacacagaggcattccgcgtacgtttattttcattgtcactaacaggaaccgcgtttgcatggtatgccactttacctcctaattccatttcatcatggggggatctagaacaaaaatttcatgatcattttttctccggtgactatgagttggatttggtagatttagtgtcgttgcgacagacaaaagatgaatcggttaatgattacatccggagattccgagatacaagaaaccgatgctttcaaattcatttagcagagaaacagctagtaggattagcctttaatggtctgcgatattatttaaaagaaagattagaaggcatccaattctttacactagcacaattacaccagagagctttggcttgtgaaagccgaagcaaagaaactactaaaacaattcgtcacaacgtacatgtagtagaatgcgatcaaagtagctcagaagacgaatcagcagaggtgtatgctgctgaaatggtttggccaaagcaggccaaatcttcagcatgtgcctccttacagccggttcaaaagaaacggcaagaggaggttaagtttacatttaatgttggtaagtgtgatagaatatttgatgaattacttaaaaatggcaacattaaaataaatcacactgttccatccgccgacgagctaaaacgtcgtgcatattgcaagtggcataactcattttctcatgccactaatgattgtaatgtatttcgtcgacagattcaatcggccattaacgaaggacgattgaaatttcaggaaatgcaggtggatacagagccctttccgatgaacatgattgacttcgagggcaagaaagtcctagttcggccaaacacagccgataaaggcaaagagacaatcatcggcaatgctaaagaggccgatggggatcgtaaagtttcttgcaggaaagtggtggccgagaagactcccgatggaggggagaccctaaaggtgaccatcacagcctccagtaccggggggcaagcgcaaacagggagacagatgcaggagcccgtgttgcgtatcccggacggtccggagagctctggcggacagtccggccgtactcaggattcacaacgtccacgtactttcaaaccacgacgaccagagataggtacgtggaaaacaaatacatttaaagcagctggtcggttggttaaagccggcccaacttttgatcaattattgtctaaatacgtaaaaaagaaggccggccccagtgaccggccagcaaagcgaccccgctcacccattcatgagcagcgccagggtaggccgattggaccaccccaccaatcggaagaaatgaaaggtcatactatacaagtaagacctaacatacctgcatggacacctccacctccatatccacctatgccatatccgtacacatatttacctccgccatatgtcccaaatcaaatgtggggcatgccaccatatccatttgggatgccacagtaccccgcctggggggcaccccaaacatctgttttcaataggttgacgccaccagtacaataccgattgagcactgctcaatccggtcaccaggcacaaacccaacagaattgccggactactcggccttcaaggccgaccaatccggcaggggggcatatgcctgcagcaactcaaaaaacaacaaaaggggacatcatcaaaataggcaccgcagatgttgtcatacagggagacaataaagggccgatgattttcggcgaatcggccaacgcaaccgaaaaggatacggctaccatcaaaacagccgatccaaaatactccatgcctcgatggtgcccagcgggattgacacgatcccaaaagagaaaattacagcgcctaagagcaaaggagagccaggagaaagaggcggaaaagacatttaatgacacacatccattatacccgccaccgcaaaagaaatggagaccgaaggccgttgagaaaaaacaaacggccacagaaatagaaagtcaatctgcaccaagcgcggaccgtccggccaccccacgcggaccgtccgccgttcaccaggaagcctccaacgacacgacaacatcaatggaagaggacgacctgctgggagaagacctggtcgactacgaggcttctccagaacacccaggtatggatgtaaatattattacattttctgccgattgtacgatcatcggcgacgatgaacctgttgttgcccagtttgattttggtcctaaagaagccgcctttactaaaccaaaagaatcggtaaatcatttaaagccgctcttcgtgcgcggccacattgatgggataccgattgctaagatgttggtagatggaggggcggctgtaaatctaatgccttattcattatacagaaaattaggtaaacaagatgacgaacttgtcaagaccaacatgaccctcagcggtgttggaactgatagttcgatcaaagccaggggagtcacgtccgttgaattaaccatcgggactaagacccttgctgctgcattcttcgtcgctgatgtagaaggaaattacagtttaatcttaggaagagattggattcacgccaatcaatgtataccttctacattacatcaaatgctgatacaatgggtaggcgatgacatagaacaagtacatgctgatgtatcggcctgcatcgctgtggctgatgcccctgtactctggacttacgagactgctacatgtctcacaggagtagacttttctgattatcaattcataagtatagataagaaagttcatgagtctttggtcacggacagttcggccgccaaggccggatggtatggtctttcacaaaagagttcggactttaaggccgaacatctaccacagcgaaaagacagtattacggatgatccggtccccgagaccggaaagtccgccatcacgcaaagatcatctgattcctctgtgggagacatgatagaggaattcagagatcttgataaactaggacaggggtttacatcggccgatcctttggaggagattgacataggagatggtaaaactccaaggccgacttttgtaaacaagaccctggagaccgattctagaaatgagatgatcggtctattgaaggaatattcagattgttttgcttggaattacactgaaatgcctggactaagccgagaaattgtcgaacatcggctgcctattaagcctggtttcagacctttcaagcagaaagctagaacatttcgtccagatcttctcccacgaatcaaggacgaaatccaccggctgctagaagctaattttattagaccttgcagatacgcagagtgggtctccaatattgtgccggtggagaaggagtcagcaactcctaaggatgaatatcccatgcccatagccgatacattaatcaataatgcatcaggaaataggattattagcttccttgatggtaatgacggatataatcagattttcatggccgaagaagatgcgtctaaaacggcctttatatgtccaggcttcattggtttatttgaatgggttgtcatgacattcggtcttaaaaatgctggtgctacttatcagagggctatgaatctgatcttccatgagttgttaggaaacactgtggaagtctacattgatgatattgtagtcaaatcggctgagtttagttctcatatagctgatttgcgcaaagcctttgataaaatgcgttggtatggtttaaaaatgaacccacgtaaatgtgcttttggagtgtcggctggtaagtttttaggatttgtcatccatgaacatggtatagaaatagaccctgaccgaatcaagtctattcggaatgtggggcctccgacgtgtaaggtcgaagtgcagaggtttcttggcaaggtgaattatttacgaaggtttatttctaacttagccgggaagattgatgccttcacccctatccttcggcttaagaatgatgctgaattcacttggggggcagagcagcagaaagcatttgatctcattaaaaaatacttgtcttcggctcccgtgttaaaagcaccacaagtaggagcaccattcagattatacattgcagctgaagacagggttattggggctgttctgacacaagaaactgaggggaaggagcatgtggtgacatatctaagccgaaggttggtggatgctgaaacaagatgttatttactgtctagtcgttgcactgtttctggtcaagccgatgtaatcaagtacatgttgcataacccaattatgagtggtagaattggtaagtgggcttatgcactcatagaatatgacttggcttatgaaccattgaaatctatgaaaggccaagtcatagcagattttattgtagaacatcgggttgatgatattcatgaactagacatatcatacctcactattactccttggactttatattttgatggatcggtttgcaatgaagggcaaggaattggcattgtgcttgtttcaccaagtaatgtctcctttgacttctctagccgattggaaacgtattgcactaataatcaagctgaatatgaggccctcctattcggtttagaactgttaaatggtatgggagtaaaacatgtgaaggtatttggtgattctcagctggttgtccaacaagtgttagaagaatatcaatgtcttgatggtactctaaatagttatcttgagaaatgttggagcataatccattcttttgatgaattcagtattcagcatatctctagagttgagaatcatagagctaacaacttggcacaagatgcatcgggttatcggataaagagagggaaatttcacaaaactgaaaatctgataaccagtgcagagccaaattcccaggtcgcggaccgtccgcgtgttgacgccggaccgtccgaggttaccagaaaggttctcttagtcgattcggctgacaatgaagccgatacaagtgattggaggacacctatacttaattatttgcaaaatcccaatatcaggacagataagaacattcggcgaacagctttcaagtatgttttgatgagtgatgaactttaccgccgaacggttaatgatgtcctgcttaagtgcttgggctcagatgatgctatattagccatggccgaattagtccctgcagccgaattacatcctatcatcaagccttggccattcagaggatggggattagactttattggagaaattcatccttcatcatcaaaggggcatcggtttgtgttagttgccactgactatttcaccaaatggactgaagccgttgctctaaagaacatgacgcacaaggaggtaattgagttcataactgagcatattattcatagattcggcattccccaaaccttgactacagatcaaggtacttcttttatgtcaaaggaggccaatggacaggccgagtctagtaataggacgttgattaatttgataaagaaaaaggtatctgataatcctagacattggcataagattttgtctgaagctttatgggctcatagaatatctaagcatagtgctactaaagtatctccttttgagcttgtctatgggcaggaagcagtgttacctgtggaaataagtttgaatgctgtcaggtttgccagacaaaatgatctaactactactgattattataattcaatgatggataatattgatgaggtgaccgacaagaggatgatagctttgggagcaatagaaaaggacaagatcatggtagctagggcctacaacaagaaggtcaaagcaaaatcattccaagtaggagacttggtgtggaagaccattctgcctctaaggaataaagaccgaaagttcgggaaatggtcgccaagctgggagggtccttataaagtgaaacaggtgatgtttggtaacgcttatttactacaaacattgcaaggcaaggatttatctaaggctttgaatgggcgtttcctcaaacagtaccatcctagtatgtggcaagatgcctaa

SEQ ID NO: 54547 - DNA, 492 bp, Zea mays
  Clone ID: MRT4577_149748C.1
gggaaggaatggcaaggatcgaaaaaacaaaagggattataaagttccccgccaaaaagaatgggcacggccccaaatttaaaacttggaaccatttttttgccccccgggtccaagggatatttacaaaaaggcagggactcatgcaaacggccacgggaaaatcactcaaaaattaggagcttaaaaccatagggggccattttttacgtttggacttcggggctttgcattggcaccaaagaagtccccaccgaccacttgggaaaaacggggcagcccaccattggtataaaggacaaacactaggggctaaacactaaaaaggggccaaaaaattttcaaaggccagttctcattccaaaaaccaaatcggggtttcccccctgggggggggaaaaaaaagctaatcccccaaaaaaggggaaaaaccccttccatggccttaatgtggcaaaactttcaagggaaagggcaattgcattgctgccc

SEQ ID NO: 54548 - DNA, 1596 bp, Zea mays
  Clone ID: MRT4577_149749C.1
atgcctcgatggtgcccagcgggattgacacgatcccaaaagagaaaattacagcgcctaagagcaaaggagagccaggagaaggaggcggaaaagacatttaatgacacacatccactatacccgccaccgcaaaagaaatggagaccgaaggccattgagaaaaaacaaacggccacagaaatagaaagtcaatctgcaccaggcgcggaccgtccgccgttcactaggaaatctctggacaacctgcaccaggcgcggaccgtccggcccccgcacgcggaccgtccgccgttcaccaggaagcctccaacgacacgacaacatcaatggaagaggacgacctgctgggagaagacctggtcgactacgaggcttctccagaacgcccagtttgattttggtcctaaagaagccacctttactaaaccaaaagaatcggtaaatcatttaaagccgctcttcgtgcgcggccacattgatgggataccgattgctaagatgttggtagatggaggggcggctgtaaatctaatgccttattcattatacagaaaattaggtaaacaagatgacgaacttgtcaagaccaacatgaccctcagcggtgttggaactgatagttcgatcaaagccaggggagtcacgtccgttgaattaaccatcgggactaagacccttgctgctgcattcttcgtcgctgatgtagaaggaaattacagtttaatcctaggcagagattggattcacgccaatcaatgtataccttctacattacatcaaatactgatacaatggaattatactgagatgcctggattaagccgagagatcgtagagcatcggctgcctattaaatctggtttcagacctttcaagcaaaaagctagaacatttcgtccggatcttctcccacgcatcaaggacgaaatccaccggctgctagaagctgattttatcagaccttgcagatacgcagagtgggtctccaatattgtgccggtggagaagaaggagacaggtttcattggtttatttgagtgggttgtcatgacatttggtctaaaaaatgctggtgctacttatcagagggctatgaatttgatcttccatgaattgttaggaaacactgtggaagtctacattgatgatattgtagtcaaatcggctgagtttagttctcatatagctgatttgcgcaaggcctttgataaaatgcgtcagtatggtttaaaaatgaacccacgtaaatgtgcttttagagtgtcggctgctgaggataaggtcattggggctgttctgacacaagaaactgaggggaaggagcatgtggtggcatatctaagccgaaggttggtggatgctgaaacaagatgttatttactgtctagtcattgcattgtttctggtcaagccgatgtgatcaaatacatgttgcataacccaattatgagtggtagaattggtaagtgggcttatgcactaatagaatatgacttggcctatgaaccattgaaatctatgaaaggccaagtcgtagcgaatttcattgtagaacatcgggttaatgatattcctgagctagacatgtcataa

SEQ ID NO: 54549 - DNA, 853 bp, Zea mays
  Clone ID: MRT4577_14974C.1
cggccgctcgaggcggcaggccgggatataaggaggggcagggctcccccaaaaaaaaaaaaaaagaaaaaaaaaaaaaaaaaaaaaaagcccgcttacctaatacctagccgccaacagcattctgcttgctcgctctgatcgcctctgccatacgcccgtgatctgctccgctgctaggctcgcttctccgtcgctgcgcgcgccgacgagacgacccgcccggccgctctgctagccgtgtgctccggatcgacgatgcgtgcgccggcggggaggaggcgcgacgaggccactcactttgtcatgagcgattttgcgctaagcaacgaccacgccatgctgctccatggccatggccgcgacaaatcgaacgtcacctacccggcccatccgtccgtgttcccggcaaatccaagacccatgcagggaggtggcttcaacgaatcaccacgccaaacgaggagtttctgtgcacacacagctcggaagaacgacgctgctgtcctcccgataagtactgaagcaaaactcttctccgctgacggatacgctggaatccgcaacgtttcggacgttttctgcccaccagaatggggccatactgggcgagcactggatgatcagcacaagaacaaggagagtgatctgcttctcttcgactggcctgaactggatgacttggaggatctccagacaaacctgagaaaactcgattcggcgtttgagctagggagcgactatttcgatgtcccgatgtggccctcgattggctcgccggacgttcagcttgtgctgagcagctactttggacacccccatccgtcgactaatcctgacaccaacgatcagc

SEQ ID NO: 54550 - DNA, 859 bp, Zea mays
  unsure (1)..(859): unsure at all n locations
  Clone ID: MRT4577_149750C.1
cgttattctcgttcttattctctgtggagtgatcggagttgctaacaccctcacatggacgcgccccctgctcgtgatctccccaggaccgagcgcccctccccaactctcctacaccctcaagtcgagtgggctctctccatgggtgaagcttaggcgccgatgctctccttctctggttcgacatgtcagcttggtgccctctctcccatgcccgatcctgaggtccctgcctcgacctccacatcggcctccatggcgctcttctccctgggcacccagacgtgtgcgcccccttccctgctcttgccgcggcgagctccttccctccaagcaccagccctggacgccaggccgcaggccatagttcccgtgcacttgtccgcagccttttttactccccgcgggctctggaagtgcccagctcgcgccggagcgtggcgaggcttgactaacgcccagccatggtggctgtaggctgagcagacccctctgctccagccatggcgcggacctcctctggtccgagctcgagcagtgaactctccgtggcgccttcccctgcaatttttccccttcctcccctctacttctgtggcgctcagcactcctgccacaggtccggctgcagcaagcgctcttttttcccatggccgagcaggcgctcccaacagccgcgatgcctggtttctctccctagccactacgccgtcatgctccctctgcccctgctttttttcaggacgccgagcaccctccccacagatcgctttttccagctgcgccggacactctgtgatttggncgcgtcgcgtccagaacttccatggctgcctccctggcgtacctcgcgcagcag

SEQ ID NO: 54551 - DNA, 412 bp, Zea mays
  Clone ID: MRT4577_149751C.1
gggatgggtgtcagtttagtggagagcttgaagaacccacaggagtttgttgagaggactactccaaatggtaggtgtactgtgcgagtccaggtcttgaggcttcccattgccctgactaaggtccttgaggaaagtgaacagttgcttggtcaaataattgatgggaaaacagcaaaaagggatggtgttttggatcctcgcctttctcaggaagatggtgattccgctgcaactctaagacagcggatgatcgatgccatagacagtgaattagaagcaatatctaagcaagttgataaagaaaaacttgacaggtatagaaagacatggcttggacaccttgaaagaatctggtcactatgtccttggcaggttggtccaaatatccttcttttggctgaatcaaaat

SEQ ID NO: 54552 - DNA, 5067 bp, Zea mays
  Clone ID: MRT4577_149752C.1
atggcccaagggcacatttccctttcaatagtaagggaagaaatagtcggggcgttccgagataagctcggaaatgcgaccaaagtagctcagaagacgaatcagcagaggtgtatgctgctgaaatggtttggccaaagcaggccaaatcttcggcttgtgcctccttacagccggttcaaaagaaacggcaagaggaggttaagtttacatttaatgttgattcaatcggccattaacgaaggacgattgaaatttcaggaaatgcaggtggacacggagccctttccaatgaacatgatcgactttgagggcaagaaagtcctgactcggccaaacacagccgatgaaggcaaaggcaaagaaatagtcatcggcgatgcaagagaggtcggtgggaatcataaaacttcttgcagaaaagtggtggccgagaagactcctgatggaggggagaccttgaaggtgaccatcacagcctctggcactggggggcaaacacagacagggagacaggcacaagaacccattctgcgcatcgcggacggtccgccatccagacgcggacggtccgacgcttctccggacggtccggcgaactccagtggacggtccggccgtgctcaggacccgcagcaaccacgtaccttcaaaccacgacgacccgagataggtacgtggaaaacaaatacatttaaagcagctggtcggctgatcaagcctggcccgactttcgatcaattgttgtctaaatacgtgaaaaagaaggccggtcccagtaaccggccaccaaagcgaccccgctcacccattcatgagcaacgtcaggcacaggcccaacaagattgccggattactcggcttcctagaccgaccaatccggcaggggggcatatgcctgtagcaactcaaagaacaacgaaaaaagacatcatcaaaataggcactgcagatgttgtcatacagggggacaataaagggccgatgatttttggtgaatcggccaacacaaccaaaaaggataacacaaccaaaaaggatacggctatcgtcaaaacagccgatccaaaatactccatgcctcgatggtgcctggcgggattgacacgatcccaaaagagaaaattacagcgcctaagagtgaaggagagccaggagaaagaggcggaaaagatattcaatgacacgcatccactatacccgccaccgcaaaagaaatggagaccaaaggccgtcgagaaaaaacaaacggccacggaaatagaaagtcaacctacaccaggcgcggactgtctggcctctgcgcgcggaccgttcgtccctcaccaggaagcgtctggacaatctgcaccaggcgcggaccgtccggcccctgcgcacggaccgtccggctttcaccaggaagcgtctggacaacctgcaccaggcgcagaccgtccggcctccgcgcgcggaccgtccgccgttcaccaggaggcctccaacgacacgacaacatcaatggaggaggacgacctgctgggagaagacctggtcgactacgaggcttctccagaacgcccaggtatggatgtaaatattattacattttctgccgattgcactgttatcggcgacgatgaacctgttgttgcccagtttgattttggtcctaaagaagccgcctttactaaaccaaaagaatcggtaaatcatttaaagccgctcttcgtgcgcggccacattgatgggataccgattgctaagatgttggtagatggaggggcggctgtaaatctaatgccttattcattatacagaaaattaggtaaacaagatgacgaacttgtcaagaccaacatgaccctcaacggtgttggaactgatagttcgatcaaagccaggggagtcacgtccgttgaattaaccatcgggactaagacccttgctgctgcattcttcgtcgctgatgtagaaggaaatcacagtttaatcctaggcagagattggattcacgccaatcaatgtataccttctacattacatcaaatgctgatacaatgggtaggcgatgacatagaacaagtacatgctgatgtatcggcctgcatcgctgtggccgatgcccctgtactctggacttatgagactgctacatgtctcacaggagtagacttttctgattatcaattcataagtatagataagaaaggtttcattcctgtaatgctagagccgatggagaatcgggaatttagagatcttgataaactaggacaggggtttacatcggccgatcctttggaggagattgacataggggatgatcttctcccacgcatcaaggatgaaatccaccggctactagaagctgattttatcagaccttgcagatacgcagaatgggtctccaatattgtgtcggtggagaagaaggagtcaggcttcattggtttatttgagtgggttgtcatgacatttggtctgaaaaatgctggtgctacttatcagagagctatgaatttgatcttccatgaattgttaggaaacactgtggaagtttacattgatgatattgtagtcaaatcggctgagtttagttctcatatagctgatttgcgcaaagcctttgataaaatgcgtcagtatggtttgaaaatgaacccacgtaaatgtgattttggagtgtcggctgaggtagaccctgaccgaatcaagtctattcggaatgtaggacctccgacctgcaaggtcgaagtacagaggtttctcggcaaggtgaattatttgcgaaggtttatttctaacctagccgggaggattgacgcgttcacccctattcttcggcttaagaatgatgccgaattcgcttggggggcagagcagcaggaagcatttgatctcatcaaaaaatacttatcttcggctcccgtattaaaagcaccacgagcaggagtaccattccgattatacattgcagctgaggataaggtcattggggctgttctgacacaagaaactgagggaaaggagcatgtggtgacatatctaagccgaaggttggtggatgctgaaacaagatgttatttactgtctagtcattgcactgtttctggtcaagccaatgtgatcaaatacatgttgcataacccaattatgagtggtagaattggtaagtgggcttatgcactcatagaatatgacttggcctatgaaccattgaaatctatgaaaggccaagtcgtagcggatttcattgtagaacatcgggttaatgatattcatgaactagacatgttatacctcactattactccttgggctttatattttgatggatcggtttgcaatgaagggcaaggaattggcattgtgcttgtttcaccaagtaatgtctcctttgacttctctagccgattgaaaacttattgcactaataatcaagctgaatatgaggccctcctattcggcttagaacttttaaatggtatgggagtaaaacatgtgaaggtatttggcgattctcagctggttgtccaacaagtgttagaagaatatcaatgttttgatggtactctaaatagttatcttgagaaatgttggagcataatccattcttttgacgaattcagtattcgacatatctctagagttgagaatcatagagctaacgatttgacacaagatgcatcaggttatcggataaagagagggaaatttcacaaaactgaaattctgataaccagtgcagagccaaattcccaggtcacggaccgtccgcgtgatgacgccggaccgtccggggttaccagaaatgttctcttaatcgattcggctgacaatgaagccgatgcaagtgattggaggacacctatacttaattatttacgaaatcccaatatcaggacagataagaacattcggcgaacagctttcaagtatgttttgatgagtgatgaactttaccgccgaacagtcaatgacgtcctactgaagtgcttgggcccagatgatgctatattagccatggccgaagtacatgaaggaatttgtggtactcatcaatcggctccaaagatgaagtggttgttgcgaaggtctggtttttattggcctagtatgatagctgattgtttcaagtactacaagggatgtcaagtgtgtcaaaaattcggcgacctacagttggtccctgcagccgaattacatcctatcatcaagccttggccgttcagaggatggggattagactttattggagaaattcatccttcatcatcaaaggggcatcagtttgtgttagttgccactgactatttcaccaaatggactgaagttgttgctctgaaaaacatgacgcacaaggaggtaattgagttcataactgagcatattattcatagattcggcattccccagaccttgactacagatcaagggacttcttttatgtcaaaggaggccaatggacaggccgagtctagtaataggacattgattaatttgataaaaaagaagatatctgataatcctaaacattggcataagattttgtccgaagctttatgggctcatagaatatctaaacatagtgctactaaagtatctccttttgagcttgtctatgggttcgccagacaaaatgatctaactgtcactgattattataattcaatgatgaataatattgatgaggtgaccgacaagagggtgatagctttgggagcaatagaaaaggacaagattatggtagccagggcctacaacaagaaggtcaaagcaaagtcatttcaagtaggagatctggtgtggaagactatcttgcctctaaggaataaagatcggaagtttgggaaatggtcgccaagctgggagggtccttataaatactgccagtatgtcacacaccagtacatcaccctaataacggagtactacttactatacgagggtggcacaggggcgtatggaccgtacctgcaccgtcccatcaagctggcggcaagacctagaagtgcagctgaagcgcagtggccattactgaccgcgtcctttggagctgcagcaccggcagtgacaacgcagtag

SEQ ID NO: 54553 - DNA, 5547 bp, Zea mays
  Clone ID: MRT4577_149753C.1
atggtcggttcaagggatagctctgatatttctccaagcaacatcatagagccgtcttgggaaaccttgccggctgacgagcagctccagttcgaggagcacaaggagcggatgatccaggaggcgaaagcaaagttcttggccaacttcaaagtggacaggaacaacaaggtcgtccgacatcgggcgacggatccggcttcgctccaacccacgccagatatccccaatgttgtcacgaccagtcacaacccctttatgggatgccgatggacacataccctgagcaaccgcaaatcggcagcaaatcagccgatctgcacatgcccggaccgtccgcacagagccggtggtctcgcaccggctgccattgatatagtaagggaagaaatagccggggcgttccgagataagctcggagtaagcatggtccctggggggcaatcatatcggaaaccttatgacagccgatttgatcaccacccatacccacagggaaccaggatacccgaattcgcaaaattttcgggtgatcaagggaaaaacacacgcgaacatataggccagttcttagcacaattgggagaattggccgacacagaggcatttcgcgccaaatcttcggcttgtgcttccttacagccggttcaaaagaaacggcaagaggagattcaatcggccattaacgaaggacgattgaaatttcaggaaatgcaagtggatacagagccctttccgatgaacatgattgacttcgagggcaagaaagtcctggttcggccaaatacagccgataaaggcaaaggcaaggaaacaatcatcggcaatgctaaaaaggccgatggggattgtaaagtttcttgcaggaaagtggtggccgagaagactcccgatggaggggagaccctgaaggtgaccatcacagcctctagcactggggggcaagcgcagacagggagacagttgcgggaacccgtgctgcgcatcacggacagtccgccgtcccgacacggacggtctgacgcttcttcggacggtccggaggactctagcggacgatccggccatgctcaggactcgcagcgaccacgtaccttcaaaccacgacgactagagataggtacgtggaaaacaaatacattcaaggcagctggtcggttggttaaagccggcccaacttttgatcaattactgtctaaatacgtaaaaaagaaggccggccccagtaaccggccagcaaagcgacctcgctcacccattcatgagcagcgtcaggtcaggccgattggaccaccccaccaatcagaagaagtgaaaggtcatactgtacaagtgagacctaacatacctgcatggacacctccacctccatatccacctatgtcatatccatacacatatttgcctccgccatatgtcccaaatcaaatgtggggcatgccaccatatccatttgggatgccacagtaccccgcctggggggcaccccaaacatctgtttttgacaggttgacgccaccagtacaagaccaattgagcactgctcaatccggtcaccaggcacaaacccaacaggattgccggactactcggccttcaaggccgaccaatccggcaggggggcatatgcctgcagcaactcaaaaaacaacaaaaaaggacatcatcaaaataggcactgcagatgttgtcatacaagaagataataaagggccgatgattttcagcgaatcggccaacacaaccgaaaaggatacggctaccatcaaaacaaccgatccaaaatactccatgcctcgatggtgcccagcgggattgacacgatcccaaaagagaaaattacagcgcctaagagcaaaggagagccaggagaaggaggcggaaaagacatttaatgacacacatccactatacccgccaccgcaaaagaaatggagaccgaaggccgttgagaaaaaacaaacggccacagaaatagaaagtcaacctgcaccaggcgcggaccgtccggcccccgcgcacggaccgtccgccgttcatcaggaagtctctggacaaactgcaccaggcgcggaccgtccggcccccgcatgcggaccgtccgccgttcaccaggaagcctccaactacacgacaacatcaatggaagaggacgacctgctgggagaagacctggtcgactacgaggcttctccagaacgcccaggtatggatgtaaatattattacattttctgtcgattgtactattatcggcgacgatgaacctgttgttgcccagtttgattttggtcctaaagaagccgcctttactaaaccaaaagaatcggtaaatcatttaaagccgctcttcgtgcgcggccacattgatgggataccgattgctaagatgttggtagatggaggggcggctgtaaatctaatgccttattcattatacagaaaattaggtaaacaagatgatgaacttgtcaagaccaacatgaccctcagcggtgttggaactgatagttcgatcaaagccaggggagtcacgtccattgaattaaccatcgggactaagacccttgctgctgcattcttcgtcgctgatgtagaaggaaattacagtttaatcctaggcagagattggattcacgccaatcaatctcatgagtctttggtcacggacagttcggccgccaaggccggatggtctggtctttcacaaaagagttcggactttaagaccgaacatctaccacagcgaaaagacagtattacggatgatccggtccccgagaccggaaagtccgccatcacacaaagatcatctgatttctctttgggggacatgatagaggaattcagagatcttgataaactaggacaggggtttacatcggccgatcctttggaggagattgacataggagatgattgctttgcttggaattatactgagatgcctggattaagccgagagatcgtagagcatcgactgcctattacatctggtttcagacctttcaagcaaagagctagaacatttcgtccgaatcttctcccacgcatcaaggacgaaatccaccggctgctagaagctgattttatcagaccttgcagatacgcagagtgggtctccaatattgtgccggtggagaagaaggagacaggcttcattggtttatttgagtgggttgtcatgacatttggtctgaaaaatgctggtgctacttatcagagggctatgaatttgatcttccatgaattgttaggaaacactgtggaagtttacattgatgatattgtagtcaaatcggctgagtttagttctcatatagctgatttgcgcaaggcctttgataaaatgcgtcagtatggtttgaaaatgaacccacgtaaatgtgcttttggagtgtcggctgaacagcaagaagcatttgatctcatcaaaaaatacttatcttcggctcccgtattaaaagcaccacaagcaggagtgccatttcgattatacattgcagctgaggataaggtcattggggctgttctgacacaagaaactgaggggaaggaacatgtggtgttatatctaagccgaaggttggtggatgttgaaacaagatgttatttactgtctagtcattgcactgtttctggtcaagatgatgtgatcaaatacatgttgcataacccaattatgagtggtagaattgataagtgggcttatgcactaatagaatatgacttggcctatgaaccattgaaatctatgaaaggccaagtcgtagcggatttcattgtagaacatcgggttaatgatattcatgagctagacatgtcatacctcactattactccttggactttatattttgatggatcggtttgcaatgaagggcaaggaattggcattgtacttgtttcaccaagtaatgtctcctttgacttctctagccgattgaaaacttattgtactaataatcaaactgaatatgaggccctcctattcggtttagaacttttaaatggtatgggagtaaagcatgtgatggtatttggtgattctcagctggttgtccaacaagtgttagaagaatatcaatgttttgatgatactctaaatagttaccttgagaaatgttggagcataatccattcttttgacgaattcagtattcgacatatctctagagttgagaatcatagagctaatgatttggcacaagatgcatcaggttatcggataaagagagggaagtttcacaaaactgaaaatctgataaccagtgcaaagccaaattcccaggtcgcggaccgtccgcgtgatgacgtcggaccgtccggggttaccagaaatgttcttttcattaattcggctgacaatgaagccgatgcaagtgattggaggacacctatacttaattatttacgaaatcccaatatcaggacagataagaacattcggcgaacaactttcaagtatgttttgatgagtgatgaactttaccgccgaacagtcaatgacatcctgcttaagtgcttgggcccagatgacgctatattagccatggccgaagtacatgagggaatttgtggtactcatcaatcagctccaaagatgaagtgtatgatagctgattgtttcaagtactacaagggttgccaagtgtgtcaaaaattcgacgacctacagctggtccctgcagccgaattacatcctatcatcaagccttggccgttcagaggatggggattagactttattggagaaattcatccttcatcatcaaaggggcatcagtttgtgttagttgccactgactacttcaccaaatggactgaagccgttgctctaaagaacatgacacacaaggaggtaattgagtttataactgagcatatcattcatagattcggcattccccagaccttaactacagatcaaggtacttcttttatgtcaaacgaggccaatggtcaggccgagtctagcaataggacattgattaatttgataaaaaagaaaatatctgataatcctaaacactggcataagattttgtctgaggctttatgggctcatagaatatctaaacatagggctactaaagtatctccttttgagcttgtctatgggcaggaagcattgttgcctgtggaaataagtttgaatgctatcaggttcgccagacaaaatgatctaactgctaccgattattatgattcaatgatggataatattgatgaggtgactgacaaaaggatgatagctttgggagcaatagaaaaggacaaaatcatggtagccagggcctacaacaagaaggtcaaagcaaaatcatttcaagtaggggacctggtgtggaagaccattctgcctctaagaaataaagaccggaagttcgggaaatggtcaccaagctgggaaggcccttataaaataaaacaggtgatgtctggcaacgcctatttgctacaaatattacaaggcaaggacttgcctaaggctctgaatgggcgtttcctcaaacagtaccatcctagtatgtggcaggatgcctaa

SEQ ID NO: 54554 - DNA, 470 bp, Zea mays
  Clone ID: MRT4577_149754C.1
gcaaggaagcaggggggttttttttttattttccaaaggaggttcctaaaatcaaacaggggccacggaacattaaagggcgggcctaaatgggggaaagcggcgggttcttttttttaacccgcccgattcccttagagaaaaaaaaaaaccggggtttgaacagaccgggccctagggaacaaaaaaggggcccaagactggaggcccaaaaaagccctggggacagggggggattaagaagggcaaaaacagggcctaaaaaaacctaggggggtgcttaccggggggcgggggcctccctttcccggggaatggacacacttttttcaaacttccaccccggaacattttggataaaacggggctaaaacccaagaaacttcttgccccctttgaaaaaaatttcaaaacgggggagagtggagaactcccccccctatcactacgaggggcccttgggttttaaa

SEQ ID NO: 54555 - DNA, 5460 bp, Zea mays
  Clone ID: MRT4577_149755C.1
atggccggttcaaaggatagctctgatatttctccaagcaacatcatagagccgacttgggaaaccttgccgactgacgagcagctccagtttgaggagcacaaggagcggatgatccaggaggcgaaagcaaaattcttggccaacttcaaagtggacaggaacaacaaggtcgtccgacatcgggcgacggatccggcttcgctccaacccacgccagatatccccaatgttgagttaggaggtaacacgcgtaacacatcggctacaggttgtcacgaccagtcgcaacccctttatgggatgccgatggacacataccctgagcaaccacaaatcggcagcaaatcagccgatctgcacatgcccggaccgtccgcacgaactgcgtttgcgtggccaaatcttcagcttgttcctccttacagccggttcaaaagaaacagcaagaggaggttaagtttacgtttaatgttgattcaatcggccattaatgagggacgattgaaatttcaggaaatgcaggtggatacagagccctttccaatgaacatgatcgacttcgagggcaagaaagtcatggttcgaccaaacacagccgataaaggcaaaggcaaagagacaatcatcgaccattctaaaaaggccgatgaggatcgtaaagtttcttgcaggaaagtagtggccgagaagactcccgatggaggggagaccctaaaggtgaccatcacagcctctagcactggggggcaagcgcagacagggagacagatgcaggaactcgtgctgcgcatcccggacggtccggcacataggcgtggacggtccgggaccccgccggacggtccggagaactccaacggacggtccggctgtgctcaagactcgcaacgaccacgtactttcaagccacgacggccagagataggtacgtggaaaacaaatacattcaaggcagctggtcggttggttaaagccggtccaacttttgatcaattattgtctaaatacgtaaaaaagaaggccggccccagtgaccggccagcaaagcgaccccgctcacccattcatgagcagcgtcaggtaaggccgattggaccacctcaccaatcggaagaaatgaaaggtcatactgtacaactgagacctaacatacctgcatggacacctccaccttatccgcctatgtcatatccatatccatatccatatttacctccaccatatgtcccaaatcaaatgtggggcatgccaccatatccatttgggatgccacagtaccccgcctggggggcaccccaaacatccgtttttgataggttggcgccgccaatgcaagaccgattgagcactgctgaatccggtcaccaggcacaggcccaacaagattgccggactactcggcctcctaggccgaccaatccggcaggggggcatatgcctgtagcaactcaaagaacaacaaaaaaggacatcatcaaaataggcaccgcagatgttgtcatacagggagacaataaagggtcgatgattttcggcgaatcggccaacacaaccgaaaaggatacggctaccatcaaaacaaccgatccaaaatactccatgcctcgatggtgcccagcgggattgacacgatcccaaaagagaaaattacagcgcctaatagcaaaggagagccaggagaaggaggcggaaaagacatttaatgacacacatccactatacccgccaccgcaaaagaaatggagaccgaaggccgttgagaaaaaacaaacggccacagaaatagaaagtcaacctgcactaggcgcagaccgtccggcccccgcgcacggaccgtccgtcgttcaccaggaagcctctggacaacctgcaccagacgcggaccgtccggcccctgcgtgcggactgtccgccgttcaccaggaagcctccaacgacacgacaacatcaatggaagaggacgacctgctgagagaagacctggtcgactacgaggcttctccagaacgcccaggtatggatataaatattattacattttctgccgattgtactatcatcggcgacgatgaacctgttgttgcccagtttgattttggtcctaaagaagtcgcctttacgaaaccaaaggaatcggtaaatcatttaaagccgctcttcgtgcgcggccacattgatgggataccgattgctaagatgttggtagatggaggggcggctgtaaacctaatgccttattcattatacagaaaattaggaaaacaagatgacgagcttgtcaagaccaacatgaccctcaacggtgttggggatagttcgattaaagccaggggagtcatgtccgttgaattaaccatcgggactaagacccttgctgcagcattcttcgtcgctgatgtagaaggaaattacagtttaattctaggcagagattggattcatgccaatcaatttcatgagtctttgatcacggacagttcggttctcaaagccggatggtatggtctgtcacaaaacagttcggactttaagaccgaacatctaccgcagcaaaaggacagtattacggatgatccggtccccgagaccggaaagtccgccgtcacacaaagatcatctaattcctctatggggagcatgatagaggaattcagagatcttgataaactaggacaggggtttacatcggccgatcctttggaggagattgacataggagatgagtgggtctccaatattgtgccggtggagaagaaggagtcaggtaagcttagagtatgcattgattttcgcaatttaaatagagcaactcctaaagacgaatatcctatgcccatagccgacacattaatcaataatgcatcaggaaatagaattattagcttccttgatggtaatgccggatataatcagattttcatggccgaagaagatgcgtctaaaacggcctttatatgtccaggcttcattgatttatttgagtgggttgtcatgacatttggtctgaaaaatgctggtgctacttatcagagggctatgaatttgatcttccatgaattgttaggaaacaatgtggaagtttacattgatgatattgtagtcaaatcggctgagtttagttctcatatagctgatttgcgcaaagcctttgataaaatgcgtcggtatggtttgaaaatgaacccacgtaaatgtgcttttggagtgtcggctggtaagtttttaggatttgtcatacatgaacatggtatagagatagaccctgaccgaatcaagtctattcggaatgtgggacctccgacctgtaaggtcgaggtacagaggtttctcggcaaggtgaattatttacgaaggtttatttctaacctagccgggaagattgatgcgttcacccctattcttcggcttaagaatgatgccgaattcgcttggggggcagaacagcaagaagcatttgatctcatcaaaaaatacttatcttcggctcccgtattaaaagcaccacgagcagaagtaccattccgattatacattgcagctgaggataaggtcattggggctgttctgacacaagaaactgaggggaaggagcatgtggtgacatatctaagccgaaggttggtggatgctgaaacaagatgttatttactgtctagtcattgcactgtttccggtcaagccgatgtgatcaaatacatgttgcataacccaattatgagtggtagaattggtaagtgggcttatgcactcatagaatatgacttggcctatgaaccattgaaatctatgaaaggccaagtcgtagcggatttcattgtagaacatcggattaatgatattcataaactagacatgtcatacctcactattactccttggactttatattttgatggatcggtttgcaatgaagggcaaggaattgacattgtacttgtttcaccaagtaatgtctccttcgacttctctagccgattgaaaacttattacactaataatcaagccgaatatgaggccctcctattcggcttagaacttttaaatggtatgggagtaaaacatgtgaaggtatttggtgattctcagctggttgtccaacaagtgttagaagaatatcaatgttttgatggtactctaaatagttaccttgaaaaatgttggggtataattcattcttttgacgaattcagtattcggcatatctctagagttgagaatcatagagctaacaatttggcacaagacgcatcaggttatcggataaagcgagggagatttcacaacgctgagaatctgataaccagtgcagggccaattccccaggtcgcggaccgtccgcgtcgagacgccggaccgtccggggttaccagaaatgttctcttaattgattcggctgataatgaagccgatgcaagtgattggaggacacctatacttaattatttaagaaaccccaatatcaggacaaataagaacattcggcgaacagctttcaagtatgtcttgatgagtgatgaactctaccgccgaacagtcaacgacgtcctgcttaagtgcttgggcccagatgatgctatattagccatgaccgaatactacaagggttgccaggtgtgtcaaaaattcggcgacctacagttggtccctgcagctgaattacatcctatcatcaagccttggcctttcagaggatggggattagactttattggagaaattcatccttcatcatcaaaggggcatcggttcgtgttagttgccactgactatttcaccaaatggactgaagccattgctctaaagaacatgacgcacaaggaggtaattgagttcataactgagcatattattcatagattcggcattccccagaccttgactacagatcaaggtacttcttttatgtcaaaggagaagaagatatctgataatcctaaacattggcataagattttgtctgaagctttatgggctcatagaatatctaaacatagggctactaaagtatctccttttgagcttgtctatgggcaggaagcagtgttgcctgtggaaataagtttgaatgctgtcaggtttgccagacaaaatgatctaactgttactaattattataattcaatgatggataatattgatgaggtgaccgacaagaggatgatagctttggaagcaatagaaaaggacaagatcatggtagccagggcctacaacaagaaggtcaaaacaaaatcatttcaagtaggggacctggtgtggaagaccattctgcatctaaggaataaagaccggaagtttgggaaatggtcgccaagctgggagggtccttataaggtaaaacaggtgatgtctggcaacgcctatttgctacaaacattacaaggcaaggatttgcctaaggctttgaatgggcgtttcctcaaacagtaccatcctagtatgtggcaagatgcctaa

SEQ ID NO: 54556 - DNA, 4920 bp, Zea mays
  Clone ID: MRT4577_149756C.1
atggtcggttcaagggatagctctgatatttctccaagcaacatcatagagccgacttggaaaaccttgccggctgacgagcagctccagtttgaggagcacaaggagcggatgatccaggaggcgaaagcaaaattcttggccaacttcaaagtggacaggaacaacaaggtcgtccgacatcgggcgacggatccggcttcgctccaacccacgccagatatccccaatccaaccccacctatgtttgatcaaagagccggtggtctcgcaccggctgccattgatatagtaagggaagaaatagccggggcattccgagataagctcagaattcaatcggccattaacgagggacgattgaaatttcaggaaatgcaggtggatacagagccttttccaatgaacatgattgacttcgagggcaagaaagtcctagttcggccaaacacagtcgataaagacaaaggcaaagagacaatcatcggcaatgctaaagaggccgatggggaccgtaaagtttcttacaggaaagtggtagccgagaagactcccgatggaggggagaccctaaaggttgacgccaccagtacaagaccgattgagcactgctcaatccggtcacgaggcacaaacccaacaggattgccggactactcggccttcaaggccgaccaatccgacaggggggcatatgcctgtagcaactcaaagaacaacaaaaaagggcatcatcaaaataggcactgcagatgttgtcatacggctaccatcaaaacagcgatgattttcggcgaatcggccaacacaaccgaaaaggatacggctaccatcaaaacagccgatccaaaatactccatgcctcgatggtgcccagcgggattgacacgatcccaaaagagaaaattacagtgcctaagagcaaaggagagccaggagaaggaggcggaaaagacatttaatgacacacatccactatacccgccaccgcaaaagaaatggagaccgaaggccgttgagaaaaaacaaacggccacagaaatagaaagtcaatctgcaccaggcacggaccgtccggcccctgcgtgcggaccgtccgctgttcaccaggaagtctctggacaacctgcaccaggcgcggaccgtccgacccccgcacgcggaccgtccgccgttcaccaggaagcctccaacgacacgacaacatcaatggaagaggacgacctgcggggagaagacctggtcgactatgaggcttctccagaacgcccaggtatggatgtaaatattattacattttctgtcgattgtactattatcagcgacgatgaacctgttgttgcccagtttgatttcggtcctaaagaagccgcctttactaaaccaaaggaagcggtaaatcatttaaagccgctcttcgtgcgcgatcacattgatggaataccaattgctaagatgttggtagatggaggggcggctgtaaatctaatgccttattcattatacagaaaattagttcatgagtcgttgatcacggacaattcggctctcaaagccggatggtccggtctttcacaaaacagttcggactttaagaccgaacatctatcacagcgaaaagacagtattacggatgatccggtccccgagaccggaaagtccgccatcacacaaagatcatctgattcctttgtgggggacatgatagaggaattcagagatcttgataaactaggacaggggtttacatcggccgatcctttggaggagattgacataggagatggtaaaactccaaggccgacttttgtaaacaagaccctggagaccgattctagaaatgagatgatcggtctattgaaggaatattcagattgttttgcttggaattacactgaaatgcctggactaagccgagagattgtcgaacatcggctgcctattaagtctggtttcagacctttcaagcaaaaagctagaacatttcgtccagatcttctcccacgaatcaaggacgaaatccaccggctgctagaagctaattttattagaccttgcagatacgcagagtgggtctccaatattgtgccggtagagaagaaggagtcaggaaatagaattattagctttcttgatggtaatgtcggatataaccagattttcatggccgaagaggatgcgtctaaaacggcctttatatgtccaggcttcattggtttatttgaatgggttgtcatgacattcggtcttaaaaatgctggtgctacttatcagagggctatgaatctgatcttccatgagttgttaggaaacactgtggaagtctacattgatgatattgtagtcaaatcggctgagtttagtcctcatatagctgatttgcgcaaagcctttgataaaatgcgtcggtatggtttgaaaatgaacccacataaatgtgcttttggagtgtcggctggtaagtttttaggatttgtcatccatgaatatggtatagaaatagaccctgaccgaatcaagtctattcggaatgtgggacctccgacttgtaaggtcgaagtgcagaagtttctcggcaaggtgaattatttacgaaggtttatttctaacctagccgggaagattgatgccttcacccctatccttcggcttaagaatgatgccgaattcacttggggggcagagcagcaggaagcatttgatctcattaaaaaatacttgtcttcggctcccgtgttaaaagcaccacaagtaggagcaccattcagattatacattgcagctgaagacaaggttattggggctgttctgacacaagaaactgaggggagggagcatgtggtgacatatctaagccgaaggttggtggatgctgaaacaagatgttatttactgtctagtcattgcactgtttctggtcaagccgatgtgatcaaatacatgttgcataacccaattatgagtggtaggattggtaagtgggcttatgcactcatagaatatgacttggcctatgaaccattgaaatctatgaaaggccaagtcgtagcggatttcattgtagaacatcaggttaatgatattcatgaactagacatgtcgtacctcactattactccttggactttatattttgatggatcggtttgcaatgaagggcaaggaattggcattgtgcttgtttcaccaagtaatgtctcctttgacttctctagccgattgaaaacttattgcactaataatcaagctgaatatgaggccctcctattcggcttagaacttttaaatggtatgggagtaaaacatgtgaaggtatttggtgattctcagctggttgtccaacaagtgttagaagaatatcaatgttttgatggtactctgaatagttaccttgagaaatgttggagcataatccattcttttgacgaattcagtattcggcatattgctagagttgagaatcatagagctaacgatttggcacaagatgcatcaggttatcggataaagagagggaaatttcacaaaactaaaaatctgataactggtgcagagccaaattcccaggtcgcggaccgtccgcgtgatgacgccggaccgtccggggttaccagaaatgttctcttaatcgattcggctgacaatgaagccgatgcaagtgattggaggacacctatacttaattatttacgaaatcccaatatcaggatagataagaacattcggcgaacagctttcaagtatgttttgatgagtgatgaactgtactgccgaatggtcaatgatgtcctgcttaagtgcttggacccagatgatgctatattagccatggccgaagtacatgaaggaatttgtggtactcatcaatcagctctaaagatgaagtggttgttgcgaaggtctggtttttattgtcctagtatgatagctgattgtttcaagtactacaagggttgccaagtgtgtcaaaaattcggcgacttacagttggtccctgcagccgaattacatcctatcatcaagccttggccgttcagaggatggggattagactttattggagaaattcatccttcatcatcaaaagggcatcaatttgtgttagttgccactgactatttcaccaaatggactgaagccgttgctctgaaaaacatgacacacaaggaggtaattgagttcataactgaacatattattcatagattcggcattccccagaccttgactacagatcaagggacttcttttatggcaaaagaggtacgtgaatttgctgaattatacagaattaagctgcttaattcgtctccatattatgctcaggccaatggacaggccgagtctagtaataggacattgattaatttgataaaaaagaaggtatctgataatcctaaacattggcataagattttgtctgaagctttatgggctcatagaatatctaaacatagtgctactaaagtatctccttttgagcttgtctatgggcaggaagcagtgttacctgtggaaataagtttgaatgctgtcaggtttgccagacaaaatgatctaactgctactgattattataattcaatgatggataatattgatgaggtgaccgacaaaaggatgatagctttgggagcaatagaaaaggacaagatcatagtagccagggcctacaacaagaaggtcaaagcaaaatcatttcaagtaggagacttggtgtggaagaccattctgcctctaaggaataaagaccgaaagttcgggaaatggtcgccaagctgggagggtccttataaagtgaaacaggtgatgtctggtaatgcctatttgctacaaacattacaaggcgaagatttgcctaaggctttgaatgagcgtttcctcaagcagtatcatcccagtatgtggcaaaatgcttaa

SEQ ID NO: 54557 - DNA, 3975 bp, Zea mays
  Clone ID: MRT4577_149757C.1
atggccggttcaagagataactctgatatttccccaagcaacatcatagagccgacttgggaaaccttgtcggctgacgaacagctccagttcgaggagcacaaggagcagatgatccgggaggcaaaagcaaagttcttggccaacttcaaagtgaacaggaacaacaagtcacaacccctttatgggatgccgatggacacataccctgagcaaccgcaaatcggcagtaaatcagtcgatctgcacatgcccggaccgtccgcacgtgagcgcgaaccgtccgggccagccacagtcgggcccatttttaatgagttaccccgacatgcacccgagccacaacatacgacacataatttaaactacccagtcggacggttcgcatacaacaacggacggtccgcatataatcacggacggtccgggccaatgcccggacagtccgcgcatgaactttttgaggaggattgttacatgaatcctcacctgtcccagcaacacttctcaccacactatgcaatgcatcagcccattaattcaaaatccaaagcccaggaaagctttctggccccacctagaaggccagaaaggaatgatcaaacctatgagccatatagggcgaatggcaatgcaccacgaaccgcgttcgcatggtatgccactttacctcctaattctatttcatcatggggggatttagaacaaaaatttcatgaccactttttctctggtgactatgagttagatttggtagacttagtggccctgcggcaggggaaggatgaatcggttaatgaatatatccggaggttccgagatacaagaaaccgatgcttccaaatatacttagcagaaaaacagctagcaggattagcctttaatggactgcgatattatttaaaagaaagattagaaggcatccaatttttcacgttagcacaattacaccagagagctttggcctgtgaaagccgaagcaaagagactgccaaaaccattcgtcacaatgtccatatagtagagtgcgatcaaagtagctcagacgacgaatcaacagaaatatatgctgctgaaatggtttggccaaagcaggccaaatcttcggcttgttcttccttacagctggttcaaagaaacggcaagagtaggaaagtggtggccgaaaagactcctgatggaggggagaccctgaaggtgaccatcacagcctctggcactggggggcaaacacaaacagggagacaggcgcaagagcccattatgcgcatcgcggacggtccgccatccagacgcggacggtccaaagcttctccggacggtccgaagactactggcggacggtccgactacactcaggacccgcaacaaccacgtattgcagatgttgtcatacaggaagatagtaaagggccgatgatttttggcgaatcggccaacacaaccaaaaaagaagatatggctaccatcaaagcagccgacccaaaatactccatgcctcgatggtgcccagcaggattgacacggccccaaaagcggaaattgcagcgcctaagagcaaaggagagccaggagaaggaggcagaaaagatattcaatgacacacatccacagtacccgccaccacaaaagaaatggagaccaaaggtcgttgaagaaaaacaaacggccacgaaaatagaaaataaaacaacacttgtgcagcaccctgtaggtacaacacatagcttggccaacaagaccggacaatctgcactaggcgcggaccgtccgccttcggagtccggaccgttcgcaccacaccaggaagcctccaacgacataccaacatcaatggaagaagacgacctactgggagaagacctggtcgactacgaggcttctccagagcgcccagggtttacatcggctgatcctttggaggagattgacataggagatggtaaaactccaaggccaacttttgtaaacaagactctggagaccgatcctagaaatgagatgatcggtctattgaaggaatattcagattgctttgcttggaattacactgagatgcctggattaagccgagagatcatagagcatcggctgcctattaagtctggtttcagacctttcaagcagaaagctagaacatttcgtccagaccttctcccacggatcaaggacgaaatccaccggctgctagaagctgattttattagaccttgcagatacgcagaatgggtctccaatattgtgccggtggagaaggagtcaggcttcattggtttatttgaatgggttgtcatgacattttgtcttaaaaatgctggtgctacttatcagagggctatgaatttgattttccatgagttgttaggaaacactgtggaagtctacattgatgatattgtagtcaaatcgtctgagtttagttctcatatagctgatttgcgcaaagcctttgataaaatgcgtcggtatggtttgaaaatgaacccatgtaaatgcgcttttggggtgtcggctgctgaagataaggtcattggggttgttctgacacaagaaaccgaaggaaaggagcatgtggtgacatatctaagtcggaggttggtggatgctgaaacgagtattcggcatatctctagggttgagaatcatagagctaacaatttggcacaagatgtatcaggttatcgggtcgcggaccgtccgcgtgaagacgccggaccgtccggggttaccaggaaagttctcctaatcgattcggctgataatgaagtcgatgcaagagattggaggacgcccataactaattatttacgaaatcccaatgtcaggacagataagaacattcggcatacatctttcaagtatgttttgatgagtgatgagctctaccgccgaacagtcgacgacgtcctgcttaagtgcttgggcccagatgatgctatattagccatggccgaagtacatgaaggaatttgtggtacccatcaatcggctccaaagatgaagtggctgttgcgaaggtctggtttttattggcctaatatgatagctgattgtttcaagtactacaagggttgccaagtgtgtcaaaaattcggtgacctacagttggtccctgtagccgaattacatcctatcatcaagccttggccttttagaggatggggattagactttattggggaaattcatccttcatcatcaaaggggcatcagttcatgttagttgccactgactactttaccaaatggactgaagccgtcactctgaagaacatgacacacaaggaggtaattgagttcataactgagcatattattcatagattcggtattccccagaccttgactacggatcaagggacttcttttatgtcaaaggaggccaatggacagtccgagtctagtaataggacattgattaacttgataaaaaagaagatatctgataatcctaagcattggcataagattttgtccgaagctttatgggctcacagaatatctaaacatagtgctactaaagtgtctccttttgagcttgtctatgggcaggaagcagtgttgcctgtggaaataagtttgaatgctgtcaggttcgccagacaaaatgatttaactctcactgattattacaatgcaatgatggataatattgatgaggtgaccgacaagagggtgatagctttgggagcaatagaaaaggacaagatcatcgtagccagggcctacaataagaaggtcaaagcaaagtcatttcaagtaggggacctggtgtggaagaccatcctgcctctaaggaataaagaccggaagtttggaaaatggtcgccaagctgggagggtccttataaagtaaaacaggtaatatctggtaacgcctatttactacaaacattacaaggcaaggatttacccaaagctttgaatgggcgtttcctcaagcagtaccatcctagtatgtggcaagatgcttaa

SEQ ID NO: 54558 - DNA, 498 bp, Zea mays
  Clone ID: MRT4577_149758C.1
gcacgagtattggccaagtttgaagcacgagcataaccttgatgtcatgcacatcgaaaaaaatatttttcttcatcaagctgttcggcatgccagacacggacatggctgaagcacacaacgtcgctgccaaggagaaggcggtggaaatgctggcagtgctcggcaatgattgatgtagagttttaccagagcagcgtgccaagattgcccatgcccatttcatttagagacagagtcggttgggatgtgttacagagctctgccaactgttaatggaacatgctgttctgcactagctttgatttcctcatagttgctattgtgcattgtaatgtcaaactgcgaggattggaaggcagaactctactccttcactgtgtcagtttgtttgagggataacagttcagttatagcagttctgaagtctcgtatgagccaaaacttaaactgaatgacctaacagaaaaaaaaaaaaaaaacccgggggggggcccg

SEQ ID NO: 54559 - DNA, 471 bp, Zea mays
  Clone ID: MRT4577_149759C.1
aggatcaaaataatttaattaaatcaacaaataaaaggcatatggtaaaagaacaggaatcgaccatgccgccccgccccagcaacaatggaaacaaggggggggggggttgggttaagttgaccaagacaacacaaggactgacctaccaacaacggcatgacatgccacactggctagttacatagaacaaaccacagcaaacactggccacctttgctctcgccagggcaagggctgattcgccacaaaagcagcacatctccccgggaggggggcactcaattttcaccccgtctgccttaatgattcagccttgggctaaaaatttgaggaaggggcatatacattggaaaggctctttgaaccattttctttcaaacaggctgagcaaacaaagggatctagttttttggcctgtgcaatggccatagccatgcaagagggatggaaccaggccttgcaagcttc

SEQ ID NO: 54560 - DNA, 561 bp, Zea mays
  Clone ID: MRT4577_14975C.1
gttatgaactcgctggacacaaaccttgagaaaagcttttacagtaattcagtggattgtttaaaatagggacatgaaactgtaaacgacactatttgtaaagtaaaatttaaaatagaggatgaaataggagatataagatgaagatagcctcacaaccacgattttacgcactcgctatgcgctggccacttaatctccatccttgtcctgttgagccccttcgcggcgcgaagaacggccttgagatcggctaccttcgcccgcttggtgcggaagcagttggcgtgcacggtggccacctgcgccgcgtcccggttgtcctggcagaagccgctgaagcgcgccttgtccaggatgcgggcgcccacgcgaagccggcggaacgcgccgcgccgcttcatccggttcagcacgtcctggtccttcatccccgccgagacctgccgcgccgtgtgccactcgtcgaacagcgccaccgtgcggtcgttggagaccacgaacaagaagcctgtgttcagctcgttgccggcgtagtcgtgcggcatgccgttgaacttg

SEQ ID NO: 54561 - DNA, 380 bp, Zea mays
  Clone ID: MRT4577_149760C.1
cccacgcgtacgaccacgcgtccgtccacgcgtacggccacacgaacgacgccatcaacgctaggctcgacgccatctgccccgacgaactcttctgcgctgacacactcgcgctcgccgggcgtgactacgacaggctgactaaaggaccgggcatcccgctcccgactggccggacggactgtaacaggacggaggccgtcgacattgctctgaactcggcgacggcggacgccaacatcaacgagatgatcgaaccgttcgctaaaaagtgcaaactaaccgccaaggacgattgccgtactctacgagcacacacacaaaataaggcactggactccatgaagccaacgtggatagacaactgctggggtacaaac

SEQ ID NO: 54562 - DNA, 282 bp, Zea mays
  Clone ID: MRT4577_149761C.1
gaggattcaacataaagcataacgaagtgcttcctttaatttctaaacgagcatacaatcaccgagattcacagccacgttcacacacaagtacaaaaaaacagatctatactaattctgcttacgacatacccgaatgctagccgagcgaagacaacattatactattgctacaagaacaaggcggcggtcacgatcatcttctgcaagaagcatgctcagttgtcgtctccgtcgacactgttctaggaggaggcattcttcttgtggagcagatgctga

SEQ ID NO: 54563 - DNA, 458 bp, Zea mays
  Clone ID: MRT4577_149762C.1
ttttttttttttttttttttttttttgttttttttttttttttttttttttttttttttttttttttttttttttttaaacaagggccccccttttaaaaaaaaacattttggtttatgcaggaacaatttccaaggggggcggacttttttttaccctgttttaaaaattcccccatttccccaagttccaaaacacatcccccccccctttaaataaaacacatttttttgtttttcagccctaaaaaaaaaaggggaatgcttttgggcccccccgggggatcccttatgctttgaccccttgcccctgaaaccggaattttttattttggttccaactcatggggcattatccgggggggaattggaaaaaacaaaaccccggggggccaaattttggttaaaaacaaaccccaaacgggcacctttttaaaggccccacgggtttttgagttc

SEQ ID NO: 54564 - DNA, 717 bp, Zea mays
  unsure (1)..(717): unsure at all n locations
  Clone ID: MRT4577_149763C.1
aattcggcacgaggttcggttgggtccttagcttggccttgacgcttctatggtgcgctttcctgtgcttaatctgttggtgatgtatttagtgatcagaggcgggtagtttagtttgcgaccgtttctcttcgttgatcccctcccccttttctacgtttttatgcaggtttcatgtgtttttcttatatcctgtttctgattcatttttccctaattccttttcctaaactctggtgcccttcagtactagtctttactactgctagtagtatcacaaacggcatcaacatttttgttccccactttatcagtagtataatggaaaaacgtctggcgaaattcggaaatacgcttttgggatgcttctgataaccaacgaatgtgctcttccttgttttagatcctatttcaatctgaactttccgcatggatccttttttttttattaggcttgttttgatttcactcctgtattgggttttgctctacgtaaaaccaatagtggatttgtttacacggctcggtagttatgctactctggcgatcgagttatgtaattatgttactctggatcggcttcgatttgttctggacaggatcattacgctgtgtggcttttgtttgcttcacttttcgagagcgtnccttttctgntatgcatnngctgagttgctataaacatgtagcagcactgcactgcactacaaccctcgt

SEQ ID NO: 54565 - DNA, 249 bp, Zea mays
  Clone ID: MRT4577_149764C.1
cccacgcgtacgcggacgcttgggacgtctattcttttgatttgatgacagaatgcaggtacctttttcctatgcttgtgcttgtatatggacatatggtgccagtattatatacattcgcaggtatagtggtgcaactattattatttatgatgtcttttttggctagattacagttgatattacaggaagtgctatacaagttcatactgttcaacagttaaatcaaaaatttaatggttgaatctt

SEQ ID NO: 54566 - DNA, 397 bp, Zea mays
  Clone ID: MRT4577_149765C.1
cgggaaaggcggcgccatcttctaggagctttatgatgtatactgcaataatagaggagtcatgctgatatgtgcgacctctcagtaataaagtattatgagatctatattttaaatccaaaaaaaaaaaataaaggaaaaacaaaaagaagctaaaaaagaatagaagatgagatagaaggacatgtagaaaaaacagaattagcaaagtgttataggggggggagagaaaagaaaatgggtccaagaggcccctgaacttgacgctttgcttcagttacggaggtgaaggtgcccccttggggaaaacaagcctacacctgtcgctgcgctgaagaacctgggggacaaatattagcggaaaaaacccatcggtgggaaaaaagggaaaacaggg

SEQ ID NO: 54567 - DNA, 926 bp, Zea mays
  unsure (1)..(926): unsure at all n locations
  Clone ID: MRT4577_149766C.1
gccccgagcttgcattgaaggaaccctccctccacctccaccgcccgagacccgagggagacgaggatgaggacgacgacgaggcagacgatgacgaggtcgatgatgatgacgacgacgatgaagacgaccaccgcgcctatagggactgctgccggtggctgaaggaggtggagccggactgcgtgtgcgaggcgctgctccgcctgccacccttcctcgtcaagccccagcacaagtacaccgtcaaggtgggcaactcctgcaagttcacctacaggtacgcggacgaacgggagcgtgactgatgatagaactgaaggccgccgggcacgcacgcctgcatatggcgcgagagcgactagcttaattgtatacgtacgtgctgtgcccatacatgcgcatatatacggtaacggtatatagatactaagtgatacatgattcgagaccgacgacgatcgaggattcgaggtcgtccggttaccgacgatgacgaccgtaacgacaccaccagtcactcctccgtggccgtggtgggaaacggaaaccacacccacagcggcggcagcatacgacgccaccgctcccgcagccgtaggcccgccgccacagacaccgccgtggtcgtctgcgtgacggcgacgagaacaatgacgaggacgaagacgaggatgaggacaatgatgaagacgaggatgaggacgacgacgatgaagacgacgacgatgacgatgatgatgacgacgacgatgaagacgaccaccgcgcctatagggactgctgccggtggctgaaggaggtggagccggactgcgtgtgcgaggcgctgctccgcctgccacccttccttcgtcaagccgcagcacaagtacaccgtcaagtgggcaactcctgcaagttcanctacaagttcggcggcgtct

SEQ ID NO: 54568 - DNA, 340 bp, Zea mays
  Clone ID: MRT4577_149767C.1
cggacgcgtgcgcacacactttgtatcaccaagtaatacattgacaggatcacaagtgggggatcaatgatctaccccactagcacctggaagacccaactgatcttcactaacttcgtaatgctatcctagcgcgctgttgcaacatctagcaccgatactttgtatgccccgtgtgatgccatgcaccaaaaccagatctctttctgctgctgaaacaaaaaccgacgtacatgagtgttctgaccatacctgccgctgtccattctctagaataacatgcgtctggagctggaagtcaaccttgcatacttcctttgtatggagctaagcattctga

SEQ ID NO: 54569 - DNA, 279 bp, Zea mays
  Clone ID: MRT4577_149768C.1
cgaggcggccgggatcaccatcgacatactgcgcgacacagcgtagtgtagtgtagttccggagaggttggggagagtagtagtgatccgcaatgtcgacggaggaggctgttgtggctgaggtcccggtgaccgaggtgccagcggaggtcccggcggcccaggtggccgaggcgcccaaggcgaacaaggccccccaccagatcaccgcgcttctcggagcacgctctccgcctcctggaaaacttcctcccaccctccaaactctaacacgtcccc

SEQ ID NO: 54570 - DNA, 531 bp, Zea mays
  Clone ID: MRT4577_149769C.1
ggtattctagggacttaggaaacgatcctaagaaccagaaactctaacaggscgagctgcagcacggaccagaggcacatgacggcttgggtcagactggtggagctcgcatggatttctattagaccagggtgagctcggatggaggccagggcagcaccggagagggagctcggcgagctcaaccaccagggggtgcgacgaccaagaagacgagcaacatcggccagctatggccggacccggagaagatgagggaggccgaggcgagcttgagcagggagagagcgctcgggcgccatgggcgaggatctccagtcaggggcacgaagaagcggcgcttgagggaggagaccggaggggaggcgaccagcgtgaaggccaccagagggactcgcgcgcgcgggagctccgcggtgccggagctggagcaggaacgcgccggggaagagcagcagcagggagagcgcagtccaagcgccaccaatggatggacgtcgagggatgagcgtcgtgagggttgagagagag

SEQ ID NO: 54571 - DNA, 287 bp, Zea mays
  Clone ID: MRT4577_14976C.1
agcttgcttatttgagaagtaggaagccatgcagtagattttgtatccaaaagccgtgtacttgtttttgtctgatatgtaatctagcgcatgtcacacatatgtattcccttcctttgattgaagggctaatggtatgatgtcttttttttttgataaaaaaaaaaaaaaaaaaaaaaaaaaaaaaaaaaaaaaaaaaaaaaaaaaaaaaaaaaataaaaaaaaaaaaaaaaaaaaaaaaagaaaaaaaaattaataaaaaatttataaaaaaaaaaaaaatttaa

SEQ ID NO: 54572 - DNA, 352 bp, Zea mays
  Clone ID: MRT4577_149770C.1
gggcaggggaaaaaaaacaacccctggttttaaaaaaggggcccccaacttttatttaaaaacaaatgggacccgggatttttcccccaaacaaacaggggggggggggggtttaaaaaacaaatttttttcccccccaatttatccccttggggggggaaagggccaaatcggggaacctaaaaaagatttttggcgcgggagggggggggttctccccctgggggcgcctggcataggccccgtcctttccaaacttgggaacctcctggccccggaagagccaaaggcccttcaccttggaggggggctcagaccctatcacgaccatcttcccagaggcgtgcttgcg

SEQ ID NO: 54573 - DNA, 170 bp, Zea mays
  Clone ID: MRT4577_149771C.1
atatgggtctacgacactacacgtactgctggtactactgcgtgctaactttaatccgagggcagcgcacagctagctagcacataaccttctgtctggaacgagcttatgtatatgtgcaccaaccggaaccggaggcttgcggacgctgatctgccacgaagtctact

SEQ ID NO: 54574 - DNA, 250 bp, Zea mays
  Clone ID: MRT4577_149772C.1
cctcgaggccggccgggatctcttatcatctgcgcctctacatttcttctctctctgctcctccgcctccggctgatgcatacgagacaagaatcgacgtggcgtcactcgacacgatgaccacttacgaatctgaaggcgacgctggtgcgtccaaaacgctacccagcatgcagcgaatcggcagcctgtgcacggtagagcatagcgcgtctctgcacttcagctcagtacacagtagaccccgatc

SEQ ID NO: 54575 - DNA, 335 bp, Zea mays
  Clone ID: MRT4577_149773C.1
cttttcttcttttgttcttgtcttattgggctatcttcctttttttttacgaaagcacctgaagcccctcccacgctttactttctgtaccacgggctcacgggtaccataatggaccccccctgcctgtggttcatgctaattggcatctccttacctcccatcttcttataaatcttggtggcttcgggactcatgggccccaatatccttatatggctgtacacatttcccctcaagaccactaccaagatacttgtcgcgttgctcatgccattccatgtactaacgatttagggcccctttaacttgtactgggttgagatccccaagct

SEQ ID NO: 54576 - DNA, 385 bp, Zea mays
  Clone ID: MRT4577_149774C.1
ataaattcttcgttctacttcaaaaaaaaaaagaaaaagaaaaaaaaaaaaaaaaaagaaaaaaaaaaaaaaaaaaaaaaaaaaaaaaaaaaaaaaaaaaaaaaaaaaaaaaaaaaaaaaaaaaaaaaaaaaaaaaaaaaaaaaaaaaaaaagggcggccgacaataagagagaacctaaacccggaaaaaaattaggaaccgcaccctgtaggggacaaaatttccctaaagaggaccggattaaaacaaggagcaaaaaaggcaaaaaattgtacccggggaaaaatagtaaaccgtaaacattaccaaccaagatccaaccccaaaccaaaaggtcaaaaccatgggcgcccaaaaaggcggataaatcaaaataaatggca

SEQ ID NO: 54577 - DNA, 844 bp, Zea mays
  Clone ID: MRT4577_149775C.1
aacgatccccctgcgttccgaccgatcgtgtttccgtctcagttcccacctccgcggttccgcccctaccgcatcccgccgcccatggccgccgtcgtctccgacctcgtcgactttctcaacgcctcgcccaccgctttccacgccgtcgatgaggcgaagcgactgctgaaggcggcggggttcgagcagctatcggagcgggaggagtggtcggggcttcagcccggccggaagtacttcttcacacgcaaccactccgccatcgtcgccttcgctatcggcgccaagtacgttgccggtaatgggttccacatcattggcgcacatacggacagtccatgtctgaagctcaagcctgtcaccaagataaccaagggaggttatcttgaggttggagtccaaacttatggaggtggattgtggtacacatggtttgaccgtgaccttactattgctggtagggtgcttgtgcgagagaagaaggacggtgtggtctcttatgggcataagcttgtaagggtgcaagagcctatcatgagaatccccactttggctattcacctagacaggactatctcctcggaaggtctgaagattaacaatcagaatcatcttgtcccagtgctgggcacattgattaagcatgaaatgcagaaattagtggaaggaaatgttccaggggagtcatccggtgccgaaaacacaaagcaccatccactattgttgcagttgattgctaaagaggctaattgtgaagttgatgagatctgtgatttcgagctgcagctgtgtgatactcaaccaagcgttgtagcaggtgccatgaaagaatcatcttttc

SEQ ID NO: 54578 - DNA, 266 bp, Zea mays
  Clone ID: MRT4577_149776C.1
aggcgttagcttctaggccgctgccattgctgggattggaggtgaaaaagctggcggttttgccccgtattatgtagatgaaccaatggatttcaaaatcaacaccgatgagattatgacttcactcaagtctgttaatggacaaatagaaagcctcattagtcctgatggttctcgtaaaaaccccgctagaaactgcagagacctgaaattctgccatcctgaactcaagagtggagaatactgagttgaccctaaccaaggat

SEQ ID NO: 54579 - DNA, 538 bp, Zea mays
  Clone ID: MRT4577_149777C.1
ggaatgtgttgtcaacaatatcgtcgatcaggcaattctcgataacaattttagttacaacggagttcgactttgcttgcatttggttaagaatttaaccgcaacaagttcgaaaggtccattcaaaactttgctggttaaacgttgtcaacgtgaacatgctcgtcgagttgctttggcaaccgcaaccgatcgaggcacttttacgtggattaacattgttcatcgccgatttgtgcactaaattaaatgaaccagaaattttggctgccgtgccagatttgttacaaagtttgttgggacaatcgtcggtggaaaacatcaagacttcttgtcaggttttgaagttgtgtggattttatgtggactcgtatttgaatcaaacctcgtcgaaggcaatggatgaacttttcgaaaaacttaatcaaattaagtccagtattgagaattcgggtgttcaagcattgatcaaatcagtagaagatgctcgagaacgtaaatggtattccaactcaacaccagttgcttgtaacggaac

SEQ ID NO: 54580 - DNA, 179 bp, Zea mays
  Clone ID: MRT4577_149778C.1
ctataaatgtactttcttatttctggtacgccacaaaaaaaggaggcatggctcttattttgccttgtacccgttatcaggtctagatcaggtgccaccgcttacactctgtggtggccacccgtctgggcctgtcagaaccggtgagctcggtccggtctgccgtccgcgggctctca

SEQ ID NO: 54581 - DNA, 251 bp, Zea mays
  Clone ID: MRT4577_149779C.1
gccgggccgggctttataaagactgtgacgactcaacgcctctctcactctgagaccggagatccggtgtccgcgtgatgaaaggcgcacgaacccatggccgccgcagaggttgcctgcaccgacggcgatctcatcctcagcgacgatgccatcgccatcaccgccgagaagagcgccacgatcgggaaggcggacacgatcaacgccgagtcctactggccggcactcttcgccaagctcctggagaa

SEQ ID NO: 54582 - DNA, 382 bp, Zea mays
  Clone ID: MRT4577_14977C.1
aattcccgggttgactagctcactagatagtggccgcccttttttttactatctttggggggtttttttaaactcttccgggcgcttttcccccgcccctcttttcttcaccgccccactgaaccaaaacaaaataccacatgtcaaccgcatccaatctcaaacacacagggtttttgggccccccttacaaggattttcaaaataattttaccacaccgggcccctcggactggcccattctaaggaaggcttctgaacaaattaaaaagtcccaggggcgcttaatctccccagggtgggggtccaacaagggccccttgggggcccaaaagtttgaaactctaccccgtaaaagacccggcccttttttgggcattcc

SEQ ID NO: 54583 - DNA, 973 bp, Zea mays
  Clone ID: MRT4577_149780C.1
gggtactggaggccggcccggaggggagccgtgtagcctgtagagtgcggggagcaggagccggcggagccatggcgaccactctttcgttatcctctcccctcttcctcggagctccggccagagctagagatgtggttccgtacggagtgacttcggctagtgtatcactgatgactctaaatatgccaggcaagggttacacgagtagagttcgttgtcgggagcagcagcgacgaacgacaatagtatctatgcttggaaggaaatcaacggctagagcaactgttgtcccagaccccgactataggttaccaatcgctatacttgggattgctagtgcttttgcatatgccgacaatcttctcgctgctgcacctgtaggactgctggggcttcttcttttgttccagactacaagagtgaggttcgtctttgataacgaggccctggaggtgaaggttggagagcagctgcaggagtcaggtgaaaatgtattcgtcggcggcaagaaccgttggaagtactcaacgttcgtaaactgggagctgtggtggccacagtttcctgtcttggtttacttcaaggagacccaaacgaagcccgaaggacagatccacttcttccctgtgatattcgatggtcgacaattgtacgatgtgatggtggagcgtgctgggccctcgaagacgagtggccctaaatagttgcagctgatcttcctaccgtcgttttgctccctcgggctccctcacatttaaattgtaaaaatggtaaaattatatacaaacggggttcgattccaaccacggttcttagctttaaacccatcttcatacgtacctaaccaacaaaaacacacatctatgtgttttatattttatattttgtatttaaacataaatataaatataaatcgtaacaatatatatatatatatatatatatatatattgttaggatcgtaggtggg

SEQ ID NO: 54584 - DNA, 803 bp, Zea mays
  Clone ID: MRT4577_149781C.1
caggagcttgacgcaaaggggagccgtagcctgtagagtgcggggagcaggagccggcggagccatggcgaccactctttcgttatcctctcccctcttcctcggagctccggccagaggcaagggttacacgagtagagttcgttgtcgggagcagcagcgacgaacgacaatagtatctatgcttggaaggaaatcaacggctagagcaactgttgtcccagaccccgactataggttaccaatcgctatacttggtgagcactaaagttaggattgctagtgcttttgcatatgccgacaatcttctcgctgctgcacctgtaggactgctggggcttcttcttttgttccagactacaagagtgaggttcgtctttgataacgaggccctggaggtgaaggttggagagcagctgcaggagtcaggtgaaaatgtattcgtcggcggcaagaaccgttggaagtactcaacgttcgtaaactgggagctgtggtggccacagtttcctgtcttggtttacttcaaggagacccaaacgaagcccgaaggacagatccacttcttccctgtgatattcgatggtcgacaattgtacgatgtgatggtggagcgtgctgggccctcgaagacgagtggccctaaatagttgcagctgatcttcctaccgtcgttttgctccctcgggctccctcacatttaaattgtaaaaatggtaaaattatatacaaacggggttcgattccaaccacggttcttagctttaaacccatcttcatacgtacctaaccaacaaaaacac

SEQ ID NO: 54585 - DNA, 820 bp, Zea mays
  Clone ID: MRT4577_149782C.1
ggtaccctcgggtacggccgggaccttccgttcgattcccttcgcgtctttcttcctctgctggactcaagtactcccatggcggtgttgttgcttaattcactgcaaattagagcagaaaattatgtgtcctagaagatgaagagctcatgtctacttggatcagtttagcctagtcagtgtagaactgtttgacttccgagttcagatatttagctagcatagccaagtgaattttgttcctccagtgggtcatcaaggtgtgcatgtgtcctgggagagagagaagaaaatccagtctgcaggatggatgcaatggcacctgaagaatatgcctcgcaatccaagctactgcaagaattcaccaacgtcccaagcatcgacagtgcttccatcctcaaaaccaacgatgaggacagatccagagcgatgttctccattagccagccagacttactggcgaacaccaacaggaaatacgttttgtattctcatattacgacgagagccggcaccggcaccacctctccggatttccagtggtctcctttccccactgaaacaaccggagtgtccgccaccgttccgtccccttccgggtcgaagctcctcgtagtgcgaaacggggagagaggatgccccaccaagctcgaaatcgtttgtcagtcacatgtggagaaggagatacacgtagcaggttctgtgcacggtcctctctacacggatgaatggtttcatggtgtttcttggaatcaagaagagaccttggtagcatacgtcgctgaagctccagcccccaccaggaccacctttcaatctt

SEQ ID NO: 54586 - DNA, 1244 bp, Zea mays
  Clone ID: MRT4577_149783C.1
tagaagactctcgagactagttcctggcctctgcgtatgcgcctaggcgagcccgtgcgctggttggcctcccggacgcggccgcggcgggcgatggggtcgtcggcgccggtgagggcggcgggaggcacaagggatcccggcgagaacccggcggtggggaggctgcgggagctcttcacaggcgacgcggcagatgggtgggagaagtcctgggagtttggtgtgaccccatgggatttgggaaagccaacacctgtcattgaacatcttgctagatcaggaacactcccaaaagggagagctttggttcctggatgtggaatgggatacgatgtggtcgctcttgcaagccctgaacgttttgttgttggcttggatatttctgatatggctgttaagaaggctaagcagtggtcatcctctttgcccaatgcagattattttacttttctggctgaagatttcttcaagtggataccaagtgaacaattcgaccttatatttgattacacgttcttttgtgcacttgacccgagcttaagggtggcttgggcagagacagttaatcggcttctaaaaccagatggagagcttcttaccttgatttatctgataagtgatcaagagggaggaccaccgtacaataatacagttgctgactatcagaaggtactggaaccactgggtttgaagtctgttcttatggaagacaatgagctagccattaaaccacggaagggatgtgagaaaattgggcggtggaagagatgcgcacaccaatcatctctgtgagagaaagcagtggtattttcctaaacaaagaaataaaagaagaatagaccatgtagctgcctcaattatcggatacttcggtgctcctgctccgtcacctttagtcgtcaatgaaattctagcttcaattggggagatgcatagagatctcagttgcctagaggtgtcgcctttagtggctacctgagtacctgtgccactacattcattgcttttaatatggttcagtcgtgaattgtttggatgtaattgcttaattatgaattctgtttgatcgagtagttttgcatggattgtgctggttttggtaagccttgtgcttactaataccatttgaccttcttttctcttctcttgatgaaaaacatgtgttacgggaaaaaaagaatatatggaaggatcaacttcttacaaaaaaaaaaaaaaaaaaaaaaaaaaaaaaaaaaaaa

SEQ ID NO: 54587 - DNA, 285 bp, Zea mays
  Clone ID: MRT4577_149784C.1
ccaaacatctgtacctgtcagatctgaagctacggcgatcgcgattaccagactgccaaagtgcacttgagatgtgcgcgtaggcagttcacttccgtaatcggattcgcaagctttcggacgcctaccggaacctgtggagatttccaggaaggagattgccactcaactaactctcacacagtcctagaggtgacatgcattggagctccaagatgcgtcgtacgccatctctcccgagagctttggactacagcactgtcgacgtgacgatacggtggctgt

SEQ ID NO: 54588 - DNA, 824 bp, Zea mays
  unsure (1)..(824): unsure at all n locations
  Clone ID: MRT4577_149785C.1
gggtaccctcggagcctgccggggctaccttccgttcgattcccttcgcgtctttcttcctctgctggactcaagtactcccatggcggtgttgttgcttcactgcaaattagagcagaaaatcctgtgtctagatcaagatgaagagctcatgtctacttggatcagtttagcctagtcagtgtagaactgtttgacttccgagttcagatgggtcatcaaggtgtgcatgtgtcctgggagagaaagaagaagatccagtctgcaggatggatgcaatggcacctgaagaatatgcctcgcaatccaagctactgcaagaattcaccaacgtcccaagcatcgacagtgctttcatcctcaaaactaacgatgaggacagatccagagcgatgttctccattagccagccagacttactggcgaacaccaacagaaaatacgttttgtgttcccatattacgacgagagccggcaccggcaccggcaccacctctccggatttccagtggtctcctttccccactgaaacaaccggagtgtccgccaccgttccgtccccttccgggtcgaagctcctcgtagtgcgaaacggggagagaggctgccccaccaagctcgaaatcgtttgccagtcacatgtggagaaggagatacacgtagcaggttctgtgcacggtcctctctacacggatgaatggtttcatggtgtttcttggaatcaagaagagaccttggtagcatacgtcgctgaagctccagccacaccaagaccagctttcaatcgttccggaacccnnagggaaagaagttgttccgaggga

SEQ ID NO: 54589 - DNA, 2555 bp, Zea mays
  Clone ID: MRT4577_149786C.1
gccggccgggctgggacctttcgttcgattcccttcgcgtctttcttcctctgctggactcaagtactcccatatggcggtgttgttgcttcactgcaaattagagcagaaaattctgtgaagacaagtggcaaaaatccaattatctccggtgggtcatcaaggtgtgcatgtgtcctgggagagaaagaagaagatccagtcaggatggatgcaacaatggcacctgaagaatatgcctcgcaatccaagctactgcaagaattcaccaacgtcccaagcatcgacagtgctttcatcctcaaaaccaacgatgaggacagatccagagcgatgttctccattagccagccagacttgctggcgaacaccaacagaaaatacgttttgtattctcatattacgacgagagccggcaccggcaccggcaccggcaccacctctccggatttccagtggtcccctttccccactgaaacaaccggagtgtccgccaccgttccgtccccttccgggtcgaagctcctcgtagtgcgaaacggggagagaggctgccccaccaagctcgaaatcgtttgccagtcacatgtggagaaggagatacacgtagcaggttctgtgcacggtcctctctacacggatgaatggtttcatggtgtttcttggaatcaagaagagaccatggtagcatacgtcgctgaagctccagccccaccaagaccagctttcaatcgttccggatacacaggggaaggttgttccgaggaagactgcagtgcctggaaagggcagagcgtgtgggaggaggactggggtgaaacgtactccaagaaaggaagaccctcactgtttgttcttgacatttccagaggggaagtggtagcggttaaaggcgtcccaacatcgttgagcgttgggcaagttgtttgggctccggaatcaccaggtgcaggcacaagtatctggttttcgttggatggtcagagcgcaacgggttcttccagaacactgctagaaaactcggcatcaagtactgctccaacaggccatgtgctctctatgcagccccttgccctatccaaggaccagagccgccaggctacgaccagcagcagtgatggtaaatcaggctccggcggtgcggtggcgcaacctaaccccaggcttcagcagtgcattgtttccacggtcagccgggatggaaggcttctggtcttcctgtcttcaaaacaagcccggtgcacacaacgctcctgtgttgattctgtattcgtggcgtgctcttgcgttagatggcaccaatgttcttgctgtgtcaagtagtcccatcgaccctccttccatcagctagggacgacgtctcgccgtgacaccagctgagggtgaagcacgtagatggacctgggatgaagttactagtccattcatggcatccaacagcaaggttaagtccttgttgctgcatcacagcgtcagcatacttaaaatccctgtccctagcccatctgctgacctctctgacggtggcaagcttccactcgaggccatattcgtgtcctgcagctgcaagggtagctcacgcagtccaactgttgtggtccttcacggcggcccacactcggtgtccgtatcaagctactcaaaatcctcggcgttccttgcttcgcttggattcaacctgcttgttgtaaactaccgaggcacgccaggttatggagaggaagccttgcagtcgctccctggaaaagttggatcccaggatgttcaggactgccttgcagcgctagacttcgccgtcgaggaagagctggtagatgcgtctagagtagctgttgtcgggatctcgcatggtgggttcctgacaacacatctcatcggtcaggctccggacaggttcgccgtggcagctgctcggaaccctgtctgcaacctgtcgctgatggccggcaccaccgacatcccggactggtgttacgtagtggcctgcggaacccaagcgaagcgatacgcctctgaagcgccttcgccccaccatcttcgtctcttctaccagagatcgccgatcgcccatgtctctaaagtcaaagcgccccttcttatgcttcttggcggagctgaccttcgagtgcctgcttctaatggcctacagtacgcaaggagcctgatagaaagaggaggcgatgtcaaaatcatgatgttcccagaggacatacacgaaatcaatttaccgcggtccgatttcgaaagcttcctcaacattggggtatggttcaagaaacatctgaatgcagtggcatgaagcagatccggcctggtggttcatctaggcgaccatgtacagcattgctactttaagtttgtcaagaattcaaacttttttgtgaaaaaataaatgctcattcatactggtttcataaaaaaaaaaaaaaaaggcccctaatgtgccctgaagacgacgacggcggctgttttccaggcctctactgttcatccgtgctacctgattcttggctctccgacggacgtacagtgatattgacatctgcttggagaag

SEQ ID NO: 54590 - DNA, 372 bp, Zea mays
  unsure (1)..(372): unsure at all n locations
  Clone ID: MRT4577_149787C.1
aagggcgggaaatggctccgcttctcgctgctgccatgaaccgcgcctgccgnccatcctggccttacgagccacctaccaggacccaacaatgagagtttctcccgccaccccctgccgccttcttccccccgagaagcaagcgaaggagaaacctcaacttcactacacgaaactgaagagcacgcacacaaaatggagcccaaatgctgagcccctcgcaaaccccacaaaggaactggcccccccctgacttcacccccggcgccgccacttcagcgaaccaaatcttatgtgctcgcaacgaagatggaaagggggaaagcaactgggaaccccttctgcccacaaacaccccgcaaaaggatacta

SEQ ID NO: 54591 - DNA, 316 bp, Zea mays
  Clone ID: MRT4577_149788C.1
gacaaggaaacgcacgaccgaggacgaaggaggaggagagcaccaagcaagacaccgacgcccgccgcagagggagcgacgactgaacaggcaagaaaagcagccccaccgccaacaaggaggggcgacaacaacaacagagcgacagggccacggcgagacgagggagggaaggccacgccccggaggcaccgggagcagcagaaaagcgaacgaggcgcgcagcgaacaaggagaagaaggagagcaatattttttttgagcccccccccccccccagaacgagggcccaaagcacaacaggacacggcgacgc

SEQ ID NO: 54592 - DNA, 535 bp, Zea mays
  Clone ID: MRT4577_149789C.1
cccttctcccccctcatctactccccctttttttgttcctgtgcctgtgcattggcttgtgatgggggccacttctccttcaggcctggagctcaccatggctgtccccggcctcagctcctcctctggctcagaggggtttgtttgcaacaacaatatcagcaacaacggtggcgggaacatgagggacctggacatgaaccagccggcgagcggcggcgaggaggaggatttcctgatgggcggcgtggaagaggacgaggaggagcggggcgccggcggaccgcaccgcccaaagaagctccgcctctccaaggagcagtcccgcctcctcgaggagagcttccgcctcaaccacaccctctcaccgaagcaaaaggaggccttggcgatcaaactgaagctgcggcccaggcaggtggaggtctggtttcagaaccgcagggcaaggactaagctgaagcacacggagatggagtgcgagtacctgaaacgctgcttcggctcgctgacggaggagaaccgccgcctgcag

SEQ ID NO: 54593 - DNA, 1487 bp, Zea mays
  Clone ID: MRT4577_14978C.1
gggacacgaaggtgtgtggggtcatgatctatgccaagctcgggcgctagggctggggtgtacgggtgttgatgtttatgcaaaaactacagcggaaataagccatgaggcgtgctctgtgtcacaggatcacgtgctatggtaggaccgggccccggattttgtctacgccattgattccagcgatttggccggggtcagtagctaacgttccatcccagaaaaccccatcttatcataggaagtctaccagttttgccaccaaggtcacaccatccaccacggccatggagtccggcgcagacgaggtggcgttcgagtccccggcacatttccgcatctacaagagcgggaggatcgagcgcctgaaccggcccccggtccttcccgccggcctcgacgaggccaccggtgtcacctcaaaggacgtcgtcctggacgccggcaccggcctttccgtacgcatctacctccccaagctccaggaaccatccaagaagctcccggtcctcgtctacttccacggcggcgcgttcctcctcgagtcggccggctctgccacgtaccacacctacgtcaacccgctcgcagccgccgcgggcgtcctggtggtgtccgtggactaccgcctggcaccggagcacccggtcccggcggcctacgaggactcgtgggccgcgctccagtgggcgacgtcggcgcaggacgagtggatcgtcgagcacggcgacacggcgcggctcttcctcgccggcgacagcgccggcgcaaacatcgtgcacgacatgctgatgcgggcgtccggcgccggcgggccgcgcgtcgagggcgccatcctgctccacccgtggttcggcgggaacgcgcccatcgagggcgagccggagggtgccgcagcggccaccgctgggctctggacgtacgcgtgcccgggcgcggtcggcggcgccgacgacccgaggatgaaccctctcgcgccgggcgcgccgccgctggagaggctcgggtgcgcgaggatgctggtgtgcgccgggaagaaggacgcgctctacgtgagggaccgcgcgtactatgaagccgtggcggccagcgcgtggcccggggacgtggcgtggctcgagtccgaaggagaggagcacgtcttcttcctcccgaagcccgagtgcgagaacgccaagctgctcatggaccgcgtcgtggccttcattgccggggcctgacttgctctcttgtggccttgttggcgcggcaccgcgcgacgcagcatcaggtcgccattgaagattgaagttgtggacttgtgggcaagtttctctcgctgaatattggtcttgtctaaatttttttctggtacaagtgtggtactgaagtcttgaaactgattttttaataagcaaactataagtccacattattcattaaaaaaaaaaaaaaaagctttgtgaaaggagctgccagttttaaccaaaaagggggggcggttcaaa

SEQ ID NO: 54594 - DNA, 553 bp, Zea mays
  unsure (1)..(553): unsure at all n locations
  Clone ID: MRT4577_149790C.1
ccccgcgtcctcccgaacactgcaaggtgactggaactggcaccggctctcacaccaactacagcaccaaggccatgaggtacgccgggggctacgaggtgatcaaggaaggtgatcaagaagctcaggaggaggctcagggagcacatcgacggctacggggagggcatcaagcgccgcctcacggcccgccacaagaccgccttacataaacaccttcaaatgaccgcgtggcgaacctccgcgcgtgcatccacatcggccacgacaccaaggaaagactgcaaggaatacttgcaggaccgcaagatggattccaacatggacccctacatgatcaccggcatgatcatcctcaccaacatactgtggaaaggaaactgataaaaccactgatgttttcctgcacgcatgcatgcgacccgtgctgtcactaattgctattcaaattctgattcccgttctcaattatgataccagttattattacggtgttcagagaactgctataaaagcccgaataaagacggctctaatgatttnggtntttttt

SEQ ID NO: 54595 - DNA, 321 bp, Zea mays
  unsure (1)..(321): unsure at all n locations
  Clone ID: MRT4577_149791C.1
agctggaattcgctcgaggatgttttcctttcttatttttatacggcatatatctgaacgggcgtcgagattctgatatgtccacgaagaaaatgtcataattacaattaaaacacagtacacactaactttatggataggatgggtcggtttgtagtgcattctgattggtgaagggaattacatcgaacatacttctttctttatttttctcttttttttgtgagatgaaaataaatactactaacaatcttatatgtataatgctgtatttacgggaatgtgtaccgttacgtaaaataaaatgagacaatattntgg

SEQ ID NO: 54596 - DNA, 242 bp, Zea mays
  Clone ID: MRT4577_149792C.1
tcgttaactatcggaatttcaaaaacccatggatatggtgacctagacaatttacacacaaggccggacacacgatggttgaaatcatacgggagactgatagaccaccgccctcaaacactaaagagcggagaattgacacgcaataatgggtgctgggacaaacatgatcaggacagatgatgaacgtgttatacacgccactcgggttgtaagaataacccgtctgatcaagaactcat

SEQ ID NO: 54597 - DNA, 225 bp, Zea mays
  Clone ID: MRT4577_149793C.1
atggcggccgacaacccgcccgccggcggcggaatcgacgacgtcttccccacgaggcagaagaacaacctccgagtttgtcccgtcacctcccccgccgacggaggaggaggcggggcaaccgtggccaagcaggaggcggcacctcatcggctatcgagcgagtcgacagcgccggtgccccgatgggggacacgtcgggcgtcgacctcgcgtctgagatga

SEQ ID NO: 54598 - DNA, 771 bp, Zea mays
  unsure (1)..(771): unsure at all n locations
  Clone ID: MRT4577_149794C.1
gtacctcgnagccggccgggtgaattatcccaccaccctagcatcaaatcccacatatataagcaccactgacctgatgcctccattccttgcatggtttgctccagaggccagagccatgtgacccaccaccaaagaatgtcctgacaaggtgcttctcgctgaccatcgaaacacagagcttcatgtctgcccagtacttgcaacacacgttctagccagtaagattgtaattcttttggtagcttgcagtcttgcacactcgtaggaagctaggaacgtaggattgtggtggcccctgggtagcggcgtagcgcattgcgcattgttgtgagaaactacgagtgcacatcaatagccggcggtacgaatgtaaatttttttaattcacaagcaactagtagattgtaatgaagttttcttcattgtgaatgaacatggtataatggagacttttaaggctgttagaaagataagcccagcatcaaagaaatagaataggtgtcttatttgaactatgttggaagtattaaattttctggaggcaaattttatacctatttgtggatttgaagatttttgtaacacaagcttttgtgcttgtactgttaggctgacaatttacatttgagatattaaaaaaatcccacttattgaaacaccctatctttaaatcctatataaatgccactgaactgatgcatccattccttccatggttggctccagagccatgtgacttcctaccaaagaatatcctggcaaaaagtg

SEQ ID NO: 54599 - DNA, 264 bp, Zea mays
  unsure (1)..(264): unsure at all n locations
  Clone ID: MRT4577_149795C.1
atggtgcttatgctctctacctggaaccacccctgagtttacttattgacatgctatacatcaacctgagcagcacacgtgacgatgcaactccgcacaggaggaataatgacncatccttgcgtgctgtattaaaactcggtcaagatgaccatatgtaatgaagtataacatcctcacgctggtacgcctctacatgtacttcatagagtggatgccttgcctcatatagcataaatcatccatgtccatggcatgaatact

SEQ ID NO: 54600 - DNA, 538 bp, Zea mays
  Clone ID: MRT4577_149796C.1
cggccttcccgggtcgcccaccttcgcggcgcgtgggccggttacggcgttctcggtcgcgcggggaccgggggcggccggcgggctgcggcgctcacggcgggatctattcgcggcggcgctgttcatcacgccgggctcgcttcgacccgtcttgggcggcggccgcgctggtgctggtggcggatgatatgcgcgcgggcggaggggctgggacacatgcggaggccggccggcgttctaacactagcgctcatgccgtcacctactcatcgctacgactcatcggggatcgcctcctacatgctctcatcggggactgggcgtgccaagcgaccaggagctcggtgctcagagggcggagcgggccgacactaatggcggcgggcagacagagcgggaagagcgagaaggattggaatcggctaccatttctttcgccttttgtcctctctgcctttcaaatttcttccttttttttagggaatttaggtacttcggtcaatctcaatggccattgtttcattttacagttttt

SEQ ID NO: 54601 - DNA, 301 bp, Zea mays
  Clone ID: MRT4577_149797C.1
ctttgggctgatttatgtgcttgtggatgtgcgggcgaggacacgaagaccatgcgaaagaatcctacgtacgtctcgaggggttgagcacctcagccagaagacggtgtgcactgatgtcatagactcgctcgactctccggttcctgatctagactcacatgcggagacgcgtagggcgcactcatatacttcgtcgaagaatcctgcccgcaaggccgagatcatcccatgggctagatcccgccgtctatcgcgactgctcgatatccgtgtatccccagcctgccgacgcagccgt

SEQ ID NO: 54602 - DNA, 342 bp, Zea mays
  Clone ID: MRT4577_149798C.1
ggctactgtcacgctagaagccaatgactatctgatgtggaggcaccgaacaagtggtccagagggggaccggactgatggagtgcaccgcacacagaaaaattgtcaatacctccaatggctaccactgagtgggggtcgagatgtacagaaaggtcagcggcccaaaagcacgaaccgacggacgcttcaccgggacggatcaacattgcttaaacacgtgttcataccatcccgaccccgataagcctctcggccctgagacaaccaaacaacctcttacctaaccggacacgaacaggctattagggatggtacacctgcaggctctttaaaaagccg

SEQ ID NO: 54603 - DNA, 426 bp, Zea mays
  Clone ID: MRT4577_149799C.1
aaaaaaaaggcccttttttccttaaggcagcagagggcccaagtccctttcccggggaaaggtcctttattcagggaaccagcagttgatttcaaaatatgaggaaagggcaagcataacccccatttaaaatccgtccccaactttgcccccaccccaccgggaaaataaatttttcattggttgcaaaaccccaagcacatgcccagccccactttttacaaacccaatgggggggcaaatttaggggcccaaggcccaaattggctttatgacaaatttaaaacccttgttcaataaggaaatcgccgaccctttccaccacaatattgaattgccctggagtcattgcctcatcataaatcccgataatcagggacatgccagtttttttgatagaaaggcctccagggcctttttttcttg

SEQ ID NO: 54604 - DNA, 883 bp, Zea mays
  Clone ID: MRT4577_14979C.1
gaaggcacaaagaagccaggaaaactaggagccactcgcgcctgagcgtaaacatctgagaaactgtcctctgagtttaaacatatgagaaaatatcatcttgtcttaaaacaacactacattactgccaagaaaacatgcactgaaagatctgctcaccctcgcagttacctctagtaagaacaaagctaaactgaaattcacaccttggcccaagctacagcgagatgctagattcagcgatcagaaattgagctgttcagtcgaaatctggcaccaagatcgccttctctgccgcctcctcgccctcttcatcgccttgcgcccgtctgggttcactgaccccttctcgcaccccctcgacacatccatcatccttccccagcttcttctccctgtccctaggctgttccccgaccaccacgactgtatcctcctcttctgcgcgcccaccgaccactaccgcgtcctcgtatccgcctccgcgtcctccgccgacgaccacgacttcgtcgacgctgccgacgcccgcaacgccgccgccgacaagggagacgggggcggccccgcagtcgagtccggcgtcatccacgcagcctcctccgcgtggtgccgagacgcagtcctcctcgtcggagtcttcggagaagggcagccgggcgaggcgggaggagacggccgcggcagcgagggagaatgcctcagcgatagactccggcgggagcgcgcagtcctcgagccccgcgtcttccagccgcggcggccggatgggcacgccgccgcctacagtgagctcttcctcgcccgccattggattcaccgcccgcttgcgtcgaatcttcgaggttagggacggacctaccgtaacagcgaggtgggcggc

SEQ ID NO: 54605 - DNA, 367 bp, Zea mays
  Clone ID: MRT4577_1497C.1
attcccttgtccaagtggaggctgcccacagatgggtcactatgctgatagatatcctgggaaaacaaatgatgtgggccagaaattttatctagacactggtgatgccagtacttttgcacgttggaggtataaggtatctgtcacactgtctggaaaaaaggttacaggacacatactagtttctatgttcggaaataaaggaaactctaagcagtatgaaattttcaagggcactctcaaaccagatagtactcattccaatgaatttgactcagatgtggatgttggggacttgcagatggttaaatttatttggtataccaatgtgatcaacccactttacctagagtgggagcatccaaga

SEQ ID NO: 54606 - DNA, 631 bp, Zea mays
  Clone ID: MRT4577_149800C.1
aaaaaaaaaaaaaaaatttaaaaaaaaaaaaaaaaaaaaaaaaaaaaaaaaaaaaaaaaaaaaaaaaaaaacccccggggccaagggccaccacctttctttcccaaatttggaaggttgttcgtcgccctccctccaggcgggaggggccccaatccaaatccaggggggaaacagggaatcaaaacgtatcctcaaggaattaagggacctgaaaaaggaccctccaacgtcatgaagggaaggccctgttggggagaatatgttccattggaaggaaaccatcaggggcccccctgaaagcccatatgcgggaggggttttctaagggaaaattcttttccccccgaattaccttttaaagcctcaaaaggaatttttaaaaacaaaggtcttccatccaaacttcaaaagaaaggaaagcatatgtctcaactttctaaaggagcagggaagccctgttttaacaatctcaaaggttttgttttcaatcggctcgcggttaacggatcccaacccaaacaatcctcttgcccctgaaatggctcacatgaacaaaacggatcggcctaagtacaaggaaacagcccgcagttgaacccaaaaatatgcctggggatgaaaaggaaat

SEQ ID NO: 54607 - DNA, 500 bp, Zea mays
  Clone ID: MRT4577_149801C.1
tcgagcggccgcccgggcaggtacaagcttttttttttttttttttttttttttcaattttttgctctcttttttttttgggggaaagaactttttcctgaattatatcacaagttgcttaacaaaacaagcacgaagaaccctctggcgtttgaaaaaataaaagccccccggaggtgatccaagcccccgttgtaacccacctgggaaccgaatacaagaaaaggtttttcccccctaaacaaacgggcccaaaatgggaaccccccccacctcggcccggcccccccctagggggaatcctgaaaaaagccaaaaaaccgggggccggtggggctttcatttagggggccccattccccccaaaggggggggtaaaacaaaaaacgggcccccgggtaaaaacggggggccggggaaaaccccggcgtaacccaaactaaaggccctgagggaaaacccccttgtcccaaagggggaaaaaacaaaaaaagcccccc

SEQ ID NO: 54608 - DNA, 383 bp, Zea mays
  Clone ID: MRT4577_149802C.1
attcggctcgaggtccaggtgaagcgtccgtatcgcggcgacgggggcggttcgcctaaagagtcttctgtcgttgatcagctgaatctcctattgatcatatcactaattgggaacgaaccgactcgctgagtgcctgttgaaggggcattgacacaaccgctaaacaaagcagaccatgacacaaatgacccaaccacgggcgttcaaagacaacacgttctttccagacacttaccgcgaggcaagagagtgcctgcaaaaagtccattcagcgacctgtgcgccaggatacatgttatcaccaccgtgatctgaatatcccgagcacgatctctctctgtaagcatatggcgcccgctatggctactagcaccatctgc

SEQ ID NO: 54609 - DNA, 134 bp, Zea mays
  Clone ID: MRT4577_149803C.1
ccccccccattacaaaggggtttaatcttcccatgccattgcataaaatatgacccattgcaaacgtaaggcagcttcccaagatcacaacagagggcctatgttcatttcccccccgtgggcggacccctggg

SEQ ID NO: 54610 - DNA, 215 bp, Zea mays
  Clone ID: MRT4577_149804C.1
gcgctgatcgtgcgcgcggaggacggctagaaacatttatgcatctctgttatctgggatggctgacacactgctagcttgggaagaggactaatgggttctcggcgaaatgcgacatgttaatagcgcgagtgagtagtgtcgacaggtactgtccttgcacatttaagacccgcattagaggacgcgcggggcgtcgggcaacatggtggaca

SEQ ID NO: 54611 - DNA, 219 bp, Zea mays
  Clone ID: MRT4577_149805C.1
ttctgccttgatatacaatagtctaatgtctacttactttggcatacatacatggtgtacctctaagagtaccaccctaccgtactgagcttgctggagggatacactgcggtggacttacaaagtcggccgccgagaagactcattatattgggctagatgctacgcctacactgtggccttctccggagatgtcactattgggctcgcgactacttg

SEQ ID NO: 54612 - DNA, 134 bp, Zea mays
  Clone ID: MRT4577_149806C.1
gacacgcgtgcagtgacagccttaccaagaggatgtccaagatgagtgccaacctctatgcggcggctgacgcttctgcttacaactgatcataactatgatcagtgcttaaagactatttcaaggcatattat

SEQ ID NO: 54613 - DNA, 257 bp, Zea mays
  Clone ID: MRT4577_149807C.1
atattgtagcatatgtcctttcactgttgatttgttcgcttcacacaaaaaatagtgaacgtcgattccagcccaaactttcgtttggtccacccagtcttgctgtagacactgtagattcaacaacacaattggggcctttgcctggcccaactttattcaggtctcttattcctagacctgcaatctcctttgccatggtcgatttcaataatttaaaacatgttgataatgagtgccatatatattcttagcga

SEQ ID NO: 54614 - DNA, 356 bp, Zea mays
  Clone ID: MRT4577_149808C.1
ctgagcatgtcatgatgtttttacttgctgaaatgggaacaagctgttcacttgatgggcatcagaggtgggggatcaaaggtagaggtggcgccaaaaacttctaagcaatcctgatgagatacatcaatgacgtccgtcatctgcaatggatgcaagagccctcataccattctgtgcaaagaaaatcgtatgttcttccttcgctgcgaacagcgcggatcttcacaggtccggatcctccaatcaaagctggattcactgctcacgtcagctcgtcataaggcatccgcatctatatggacgctggtgttggggtcattcccaactcaacactacatgattatttgccgact

SEQ ID NO: 54615 - DNA, 844 bp, Zea mays
  unsure (1)..(844): unsure at all n locations
  Clone ID: MRT4577_149809C.1
cattgggaccctcgaggccggccggggccgctctctgaccaactccttcacctcgttttcttgtcctcaccacttcgccgtcttctgcaacccacgcttctgcaaacccaccccctctccacatctacttttctcttcacttcacaatgggttacgaagactccgtatacctagccaagctggccgagcaggccgagcgctatgaggagatggtcgagaacatgaaggccgttgcctccgcagaccaggaactctccgtcgaggagcgaaatctcctttctgttgcctacaagaacgtcatcggtgctcgccgcgcgtcctggagaatcgtcacctccattgagcagaaggaggagtccaagggcaacgaggcccaggttggtcttatcaaggagtaccgccagaagatcgaggccgagttggccaagatctgcgaggacattctcgagtgccttgatggccacttgatcccctctgctgagagcggcgagtccaaggtcttctaccacaagatgaagggtgactaccaccgctaccttgccgagttcgctgttggtgacaagcgcaagacctctgccgacaagtcgcttgaggcttacaaggccgccaccgaggttgccgcctccagcctggcccctactcaccccattcgcctcggacttgccctcaacttctccgttttctactacgagatcctcaactcgcccgaccaggcttgccaanttggccagcaggctttcgacgatgccattgctgagctcgacaccctgtctgaggagagctacaaggactctaccctcatcatgcagctcctcagggacaacctgaccctctggacatcgtc

SEQ ID NO: 54616 - DNA, 2494 bp, Zea mays
  Clone ID: MRT4577_14980C.1
gccggccgggctgggacgcagacgcagacgcagacgcagacgcctccggcctcccgccccgcacccccagcacgtctcactcctcggtttcttcttcctcctggcagcgggcagagaagtccagtccagcccccaccgcgacgcccgatgccgattccgcattaaactactcgctcatcgcccaaaagcttcgctgatcgggacggcggcccccttcgcataaacaccgtcgcttcccctcctcaccaacccttccaagttcccactgtctctgctcggccgctctccgtcccctttccaccgcctgccccctcttcctcctcctgctgctggtagcagcagccaggggggcggtactaattgggaagtaggtgggcggaggccgcggccgccagggatggtggccgtcggcggcggcggcggcgggggcggggcccggcggaggcgggcgtggcggtgggccatgcgggcggcggccagcgccgtcctgtggacggcggtcgtgcaggtcgcctccatcgccgggctgttccgcccgcgggtcctcgccgactgcggcgggaagggcggcgctgccgccgcgtccggcctcgccgcgctcgccggcgaggacagcctagcggcgaggctgtcgccgccggcgctcgtacccaagagaatttacaaaagcaatggctacctgctagtgacttgcaatggtggcctcaatcaaatgcgagccgggatatgtgatatggtgactatagcgcgccatctaaatctaacgcttgtggtccctgaactggataaaaggtctttttgggctgacccaagtgattttggagatattttcgacgtggaccacttcattaattccttgagagatgagctgatgatagttaaagagcttcctttgaaactacagttaagaactatataagagactgtactcgatgcctcctgtcagctggtcgaatgaaacatactacctaaagcggatattacctcttgcgaggaagcacaaggtaatccatttcgataaatcagacgcccgccttgcaaacaatggccttccgattcagctgcagatgctgcgttgccgagtgaactttgaggctctgagattcacaccacagatcgaggcccttggcagaaagctcatctccactctccagagacgaagtgggcagtttgttgtgcttcacttgcgctacgaaacggacacgttggccttttcaggctgcacacatggctgctctggtaaagaaactgaggagctcactaagatgagatatgcttatccatggtggaaagagaaagagatcgattcggaagtgaagaggctccaaggactctgtcccctcacaccagaggagatcactctagtgcttaaagctctagggttcacaaaggacactctgatatacattgcttccggtgaaatctatggcggtgaaaggcgcctggccgtgctcaaggctgcgtaccctaaactagtaaggaaggagaagattttatctcccgatgaactgcggccgttccagaaccattcgacccagatggcagcgctggattacatggtctctctagcaagcgacattttcattcccagctacgacggaaatatggcaagggttgtcgaaggccaccgcaggtatatggatttccgcaagaccatcgtcttggacagaaagaagctcgtcgagctgttggaccttttcaaagggggcgctctatccgggcactgtcctggataaaaggtctttgtgggctaccccaagtgattttggagatattttcgacgtggaccacttcattaattccttgagagatgagctgatgatagttaaagagcttcctttgaaactacagttaagaactaagaagagactgtactcgatgcctcctgtcagctggtcgaatgaaacatactacctaaagcggatattgcctcttgcgaggaagcacaaggtaatccatttcgataaatctgacgcccgccttgcaaacaatggccttccgattcagctgcagatgctgccttgccgagtgaactttgaggctgtgagattcaccagaacgcctgcgaccacatttcctcctcacagaataaagcaggaaaagaagctgggaaccctacggggttcttcagaaagaagagatgccgctcgtgcatccagtctgctcctttcctaccatctgtcgtagttgttgttgtaacccttctgtcagttttttcattctattgttcggttgctccccttcaactgctccagttttcagttcttctagccggggcgggtagctcatgcaaaagtaggagtccagctttctggaagtttcttgtactaggtccgcgatgcataacagagatttctgaatcctgacagaaccttattactttcccttgagggatcaaatttcggcgacggaataattgtttggtttccagcatcacatatatggacggctgtggttgctgaacggagagcaaactctatttataagacgtatt

SEQ ID NO: 54617 - DNA, 450 bp, Zea mays
  Clone ID: MRT4577_149810C.1
ggggcccaatcccaatgggggggggcaaaatttttttttccaaaatttaaggcaaatagtttgggggaggggccattcccccacccttcccccttattaaaacagaggggcccctttttaaccaacttttttcgttgaaaacaaggggaggcaaacaaatccttgttttccgttcaccccatgctttttttaaaaaaaaatttttattttttttacaaaacattagctcccataaaaaacaaaatttagctaactccttaaatttatccaaaaaattccggttttaagttaaagctttcccctaaaaattgccttgacaaagggggttaacagagggggggggatttacccccacagtttgtcaaaaagccaattttatgggcgatgaaaagttttttccatgctctcccccaaatcaaggaacaccccatttttttttttagtcgggga

SEQ ID NO: 54618 - DNA, 581 bp, Zea mays
  Clone ID: MRT4577_149811C.1
gcatatgagacaacactgagcatcgtctagctatctcgatcgaactggccagttgtgagactccgtcattgggggggtgggggggggagctcacagatagcgttagtaagagaggcaggagggtgaccaaatatagcttcccagcaccctattaggagtcaggatagtgtagagcgaagtgaatacagcctattgttaatcagcccggctgcatatcatatcctacccagtagtaatcacaatgcctgcgagccgactaaggctgctgctgctaccaacctacgcattaagcccggacctatgctgacgccaggaacgaatgcagcgtctgcggcgaccgatctactacagggtcatatacgtacggccggcaagccaactactgcggctaacgagctactagccgggcttatactgactgcacgtacactgccgataagtgctgctactaaggcagcagctaccgagcgaccgctaggatttataatcacaccctgacagcaaactacggctgctgcggcgaccgacctgctacccggtattagcctgacggcatgcactctgcctagaaatgcggctaa

SEQ ID NO: 54619 - DNA, 228 bp, Zea mays
  unsure (1)..(228): unsure at all n locations
  Clone ID: MRT4577_149812C.1
gcggagaagatggcnccgttcggcgangncngctggggtggcgacggaggggaggcgctgctggggcgggacccgctgcncagtggcagcgcgccgccgacgatggaggccggcncggaggcagcggtggcggcggagagggtgtttngcagcgttngtggcggcgcctcgttcttctccggtatcaacggncacgnattgnncncaaagatgnaacgagnncactat

SEQ ID NO: 54620 - DNA, 411 bp, Zea mays
  unsure (1)..(411): unsure at all n locations
  Clone ID: MRT4577_149813C.1
cccacgcgtncgcagcttgttaggagtaacttccacccagttttaatgcacccagggtctatctctagctgctccaatacttaagttgcgatgaatgttttatatattcaattgatctttcatcttctgtcatgcatatttctatggcacgacgttaagatgtttcatgcttgtcattcctttttgccatggaattatgaattttcaattcactaatattctaattcctagttctttcaatttgacaaagatcatggagagcctagagcatgcaattaaacgtgatgcaccaataattgcggagtatttaggtggtgctgtgaactgtgatgcttaccatatgactgacccgagatctgatggtcttggtgtttcatcttgcatcaagcaaagtctcgaagatgctggtgt

SEQ ID NO: 54621 - DNA, 3165 bp, Zea mays
  Clone ID: MRT4577_149814C.1
atgcgccacaccctccaaaactgcagggacttcaagcactccgtcggacacggtcgacccttccaacctctaccgcctcccccacctcgaggagcgccaggggagcctcgacaacctcaacaacaggaagggggaggaggcggagccttcccgcgcatcgacagagaagtcaacgtcatcttcggcggacatgggtcgcaggaaagcaagaggcaacaaaagctcaacgaccgtcagatactggtggcgactactggtccccctgccccgtatcgatggtccgaacacccgatcaccttcattcaagtggatcagtggctcaacttcgatcacccaggcaagtacccgctcctcgtcgacccaatgatccgagaaagccgggtaaagaaggttctggtggacgggggaagcagcatcaacgtcactttctcccggacgcttcaaggcttgggagtcaacctcaaagagctccacgagtcagacactcctttcttcggcatcgtgccgactgaaggagagtatccgctcggacacatctacatgccagtcaccttcggaactctggagaactacagaaccgagtacctgaggttcgaggtggcgaactttgactgtgggtacaacgccatcgtcggcaggcctggattggcgaagttcatggccattccacattatacatacatgatattgaagatgccaggactcctggcaaaagaagacgaggaaaaaacagcattcatcactccatttggagctttctgctatacctccatgtcgtttggtctcaaaaacgctggagcaacttaccagagagccattcagacatgcttagccgatcactggggcaagcgtgtggaagcatatgtggatgatgtggtgatcaaaacagaaaactcagccaatttcattgaagatttacagctggtcttcaacagtctgcgattatatcgatggaagctcaatcctgaaaaatgtgtcttcggagtaccggctggaaaattactcggattcattgtcagccaccgaggaattgaagctaacccagaaaagatcgaggctatcatgaggatggaagcaccacggtcacagaagaaagtacaaaggcttactggatgcatggcggctctaagcagattcatatcgaagttgggagaaaagggactgccattctacaaattgctcaaaaaggtggacaaattccagtggacttcagaggctcaggaagccctagatgcactaaagagattcttaacaacaacaccagtactaaaatcgccacgtcgaggcacgccaagtcaatcagccaaagatttactgttatatatctcttgcacgactcacgtggtgagcaccacgttggtagtcgagcgagtggaagaaggacatgcttatccagtacagcatcccatctattttatcagtgaagttctaggaccttcaaagaaaaaatatcctcaagttcaaaaactattgtatgcagtacttctaactgcgcgcaagctccgtcactactttgacgatcacaaagtcatagtagtcactggatttccaataggggatattctccacaacaaggaagccatcggaaggatagccaagtgggcctgcgagctaggagctcatgacatggagtttagacctcgaactgcaatcaaaactcaggcgctagttgactttgtatcagaatggaccgagcaacaaatgccagataacccagagactgcagaagtatggcggatgtatttcgatggatcactgaaactgcagggggcaggcgcgggaatactcttcattgcaccaggaggtgaacaactcaaatatgctcttcagttactattttcagcatccaacaacgcaacagaatatgaggctctgattcatgggctgaacattgccatatcactgggcatcaagaggttgatgagagatcgcaatgcggcgacagatgcgttgtcaaaactgggatccagtcgggctcaggtcccgtctggaattttcatccaagaaataccatgcccgagtattctcgtggatcggatagaagagtgcaatattctgtgtcaaccagagctagaccctgatgactggagagagccaatcatcaggtatatcaagaatgaggaggaaccagatgatagaaatgcagcagagcgcattgcaaggcagtcagctcattatactctcatcgggaaaacactatacaggaggggtgcaacaagagttctcatgaagtgcattctttcaaccaccgggaaacatctgctagaagaaatccacgcggggcaatgtggggtacacgcagcatccaggactctagttgggaaagctttcagatctggtttctattggccgacaacaaagagtgccgccactgagctagtccagagatgtgaagcttgtcaatacctgtcaaagcaacatctaccagcacaacaactgcaaaccatccctgtaacatggccattcgcatgctggggactggacatgattggcccttcaagaaagctcagggaggatatactcatttcagaattctttgatttctgtgagcaaaaaagcattcagataaaatacgcttcagtggcgcatccgagagcaaatgggcaagtagaaagagccaacagaatgatattagaagcactcagaaagaaggtcttcgataagaatgaaaagttcgcaggaaagtggatcagagagttgccatacgtggtctggagcctcagaactcaacctagccgagctttgaatgggaacactcctttctttatggtttatggttcggaggcagtgctacctactgatctcaagttcggggcaccaagattaatcttcgaaaacatagcagaagctgaggccaccagactagaggacgttgatatactaaaagaagaacgattaaatacggtgattcagtcagctcggtatcaacaaactctaaggcgttatcataacaaagttatacgacatcgatccttcgcagtaggagacctcgtcctccgccgaattctaacgggggaaggacgacacaaattgtcaccactatgggaaggaacgttcataatagcagaagtcactcagcctggatcatatcgcctcactcaaatgaatggcacggaaatagggaacccatggaatatagagcatctcaggaagttctacccttag

SEQ ID NO: 54622 - DNA, 541 bp, Zea mays
  unsure (1)..(541): unsure at all n locations
  Clone ID: MRT4577_149815C.1
tcgtttcattatttccatggcggcaggaggaagcagccaccaccaccacactagattccaccacaagnaagggacgagggagcagcttcgtccgctcggcgggggtaccggtcgaggtcccgccgtagtaccacggtagggccactggtgtaccgagaggggtggtgtcacactgggccgagaaactgagtacgtacgacgtacatagaagggagggagagaggagcacaatgcactaagcagcactctttggtgaggccggcagccatcgtccgccaggcgccttctgcactctacgtagaagcatcgaggcggaagaaggacccgggaacacgcgcatccgccacaagatcgaggaggaggtcgtggtggcggcggccgtcggctcctgcggtttcctcttccacgagcaccacgagaagaagaaggaccacaaggaggccgtagaggccttggtgaataaaaacaccacttgttagggtgattgatcctcccatataaacgaccctacccaggtgctacgcgtgcgtgatggagtgat

SEQ ID NO: 54623 - DNA, 752 bp, Zea mays
  unsure (1)..(752): unsure at all n locations
  Clone ID: MRT4577_149816C.1
ccggggttgttttatgtattatttgctccctacaacacaaaaagttgaaaaaattaccgaatttgtttccgaatccataccaaattttatatctattatttgagaaaatgtaggatgaatttgaggtttaccttttatgaatcttagcaaggtggatgtcaaaaacaagaatataaatatgtattgtatattctatatcctatttattcacaatcaaaaaaaactgattaccgaattaataccgtttccgaccgttttcatccctaaatatagggagaaccgttgcgggaggtaaaaaaataggagataaatattaatgatgtgacgtaaaaaattaatataatggagaaaatttagtggaaatcgatgtggacagcttcagacaccacccaatcatcggtgaagtacacggaagcagaaacggaggcaaatgaagtttctgaagagaacgcgagagcgcacagaacgacagtagttaaccatttttcagatatcttatgccgattggaaattaggtaattgccgttggctagaacacgactgcaattaccgacttgtccattagtctgtaaaagttagatgtcaacgaaactataacaacaaaaatcacctatttttcatgagcgtagatntattttcattaacttctaatctaaaaaactaaattttatggacgtaggcttattttcgttagactagcttagaaattatccagattagtgctcactaagagcacgttcggtagacatggg

SEQ ID NO: 54624 - DNA, 272 bp, Zea mays
  Clone ID: MRT4577_149817C.1
gctctggcatgggaggttctggaatgggaggctacggaagagatggaatggataatcagggaggctatggatcagttggaagaatgggaatggggaacaattacagtggaggatatggtactcctgatggtttgggtggttatggccgtggtggtgaggcagtggaggttactatgggcaaggcggcatgagtggaggtggatggcgtgggatgtactgaaagcaaaaacaccaacatacaagtcttgacaacagcatctggtctactagac

SEQ ID NO: 54625 - DNA, 448 bp, Zea mays
  Clone ID: MRT4577_149818C.1
gttcgtgaccttctctcccatcccgatttcccttcccaccgacatccctcgccttcatgaggtcttgactgcggcggaggcggcttctttgatcggtagcccaattcccccgactaccgcccttagcccgctgctgctgcttgtcaaccgcatccgctttagtgtccgtttgctcacgtcttcttcgagctcgccgtgttataagatttacaagatgtttacataatctctgcaattgagtttgacaaatttgtgaatcatcttgctactggagatagaggtggtcatttggttttgttcgaaagatcagacattgcttataattcttgttgaagagaacttgataggcaagaatatcttgtttttatagcatttttatttccttttctatacccaaatttataattctttaaacctttgcttgacctaccttataagttttgaatat

SEQ ID NO: 54626 - DNA, 966 bp, Zea mays
  Clone ID: MRT4577_149819C.1
ggcgcgcgccgtggtgctgtccgccgcgggcccgcacttctgcgcgggcatcgagctcgggggccccggggacccgctgtccgccgcctccgccgatcccgtggccgccgcggaggggctccgccgcgcggtcctcgacatgcaggcggcgctcacggccatcgagcggtgccggaagcccgtcgtcgcggcggtgcacggcgcctgcgtcggcggcggcgtcgacctcgtggccgcctgcgacatcaggtgctgctccagggacgcctccttcgtgctcaaggaggtggacatggccatcgtcgccgacctcggcgcgctgcagcgcctcccgcggatcgtcggctacggcaacgctgctgacctcgcgctcaccggacgcaagatcaacgccatggaggccaaggacatggggttggttaccagggtctttgattccaagcaagacttggatgcgggcgtcgcaaagatcgccaaagaaatagctgacaagtcggcatgggcggtgattggaaccaaggccgttctgctgagaagcagggatgcgaccatagaacaaggcctggagcatgtagccacatggaacgcgggtatgatgaggtcgaacgatctgaaggaggccatcagagccttcctggagaagcggaagcctgtgttctccaagctgtaatgatcagataccatcataccatacctctgtgttacttaacaagtggtgctacgtatctggaaatgcaaaggaataaagtgtgctaggagtagacaattgtcagggaaaaagaaaaaaaaaatgcctgttctcgatggagctgtgaaggcatttttccatgtcagttgagcttaccaaagttgttttggtcggtatggatgaaccgggggtgttactgttttgttacctgttccagtctgtacgtagattcatctcttctgcaccgagacaaaatgccaaacaatcatctggagttc

SEQ ID NO: 54627 - DNA, 211 bp, Zea mays
  Clone ID: MRT4577_14981C.1
gggaacaaaaacatacatcaacttatttatatatatcctttcattccccccccacgaaaaaaacaaaggtcgatacccgaaatttgatctaccctgtctacaacacgatttccttgggttattacaccaaatgggactaaaaggcccccaacgaaaaggggcccccttcatatacaatgaagctaatcaaggaaccggggggggtttctcc

SEQ ID NO: 54628 - DNA, 333 bp, Zea mays
  Clone ID: MRT4577_149820C.1
gtctagatcgcgacggccgccctttttttttttttttttttttttttttttggatagcgcaatatttattctgagaaaaggacgcagaaccacacgaggatctagcaagtcaaatcggaaggccgagctaccatacctaatactatagcctccacggtctcaccggatttgctactttacatgcagcgtggataatttggagttttggacgagtgcacgtactgagcgcaaagtttcgccggttcaaaacctgtggatccccaaaaaaaaacatgtgatttaaaacttggccgagaggacagagtatgtacttgaatcagtaattcacacttg

SEQ ID NO: 54629 - DNA, 494 bp, Zea mays
  Clone ID: MRT4577_149821C.1
ctccgtctctctctctgcttgctgtgtgcttccattctgttagataggctaacatttggtatcagaagtccgtcgatccttggatctcgcatggcgaccacaggcgcagttgatgcccagctcaccctcgcgttggaatctcaaacgcgctccctgctgtctgaattggacaagcgcatccatgccatcgactccaagtgggcaaaccgcgtgggaatcctggagactcaagttgccgattccaccaagcgtttggagtcgttctccagggggatccatgaagacctggaggcccgtttggtgacagccgatgaagccgtggatgatcggatccgctatctggaggcgagtacgatctcccgtgtcgcggtgctcgagtcgtcttctcaagccgttgagctctggcggccccaaatcgatgcgtcgattgacgggctctacgccaacatccagacgattcgcgccgacatcgcgcagatcgtgacccaacaacc

SEQ ID NO: 54630 - DNA, 1651 bp, Zea mays
  Clone ID: MRT4577_149822C.1
gtcactccgccgggcgctggccgatcagggtcaccttctccaaagaatacatggaacaatgatcgatttaaccgccgctgttactgatccgtccaggagcgatataagtcagaagatgattatccctatccgcctccgcttaccttagatgtctccgggatccaaaaacaagaacaagagcgagcagagcgtggcgacaaatcacccgctgccttttatcccgcaaccagcagcagcgaggccgcgagaggcaggtagtagccgcacgccacatcaacccaccacggatggccggcggcggcgaccgtgacgcatccgacgcggagctccgcgcggggttcgagaccctggccgtgacgcggccggacccttccgcgggggtctacgaggtccgcctcaaccgcccggcgcagcgcaacgcgctgagcccggccgcgttcgcggagatcccgcgcgccatgtctctgctggaccgcgccccctcggcgcgcgccgtggtgctgtccgccgcgggcccgcacttctgcgcgggcatcgagctcgggggccccggggacccgctgtccgccgcctccgcccgatcccgtggccgccgcggaggggctccgccgcgcggtcctcgacatgcaggcggcgctcacggccatcgagcggtgccggaagcccgtcgtcgcggcggtgcacggcgcctgcgtcggcggcggcgtcgacctcgtggccgcctgcgacatcaggtgctgctccagggacgcctccttcgtgctcaaggaggtggacatggccatcgtcgccgacctcggcgcgctgcagcgcctcccgcggatcgtcggctacggcaacgctgctgacctcgcgctcaccggacgcaagatcaccgccatggaggccaaggagatggggttggttaccagggtattcgattccaagcaagacttggatgcgggcgtcgcaaagatcgccaaagaaatagctgacaagtcggcatgggcggtgatgggaaccaaggccgttctgctgagaagcagggatgcgaccatagaacaaggcctggagcatgtagccacatggaacgcgggtatgatgaggtcgaacgatctgaaggaggccatcagagccttcctggagaagcggaagcctgtgttctccaagctgtaatgatcagataccatcataccatacctctgtgttacttcacaagtggtgctacgtatctggaaatgcaaaggaataaagtgtgctaagagtagacaagaatgccgtctgcggtagcatttggcgaaacatccattcttgtaaggggaaaaaaaaatgcctgttctcgatggagctgtcaaggcatttttccatgtcagttgagcttaccaaagttgttttggtcggtatggatgaaccgggggtgttactgttttgttacctgttccagtctgtacgtagattcatctcttctgcaccgagacaaaatggcaaacaatcatctggagttcaaagtcatctggggctttgaccgaactgggacattcactacagtctggtgcacaagaaatgaatctgcgtacaaactggaataggtactcaaaacagtactctctgtcctgaattagatttaaaaaaaaaaaaaaaaaaaaaaaaagtcgacgcggccgcgaattcg

SEQ ID NO: 54631 - DNA, 833 bp, Zea mays
  unsure (1)..(833): unsure at all n locations
  Clone ID: MRT4577_149823C.1
gccggccgggccgggagtcgctctaaacgggcttgcaaggctgcaactctctcgtcccggcaaaggtcacaccttcctccctcgtccacatccgtgcctccagccaccggccgcctagggcggcgctcttgccaccggctgtcgagcccggcgaccttgccgccgtttccacgccgcctgacctgcccccacgacctgttgccgtcacgccatccgacctgccccaggacagcccaagcccccgcgaggccgcgacctgctggggaggagattgataggagaggtggtcggcggcgtggataccaacgacggagacatagggattgccgcccgtcgccccctgtttccgacacgctgaagcctcacgccacgagcgagcagagggccccaactgccagcagcaaccttaggcactggttgcttgaagtaaccaaacattcggacgcgcataaaatcgccacgcacgcatcgctggtttgccgccgcagagcagaaggcactccaggaccgcagcgtgcgctgcagacgctgaaggctggatgtggctggaagaggtgaggcggagggagcgtggagagcttcgcgctcggcggtttgaggccgccgcccgagcgtgccgcacggcctcgctcgcgctctccaatcgcaaggagtttgtcaccccacatcacggcgccgtcaactcgctccaggttgatttgacagaggggaggtacctgctctccggggcatcggatgggtcggccgctgtgttcgatgtgtggaacgcgaccgaatatgaaaccgggttcatagcanagcacaggaacatactgcttgtggacagcaacacc

SEQ ID NO: 54632 - DNA, 552 bp, Zea mays
  Clone ID: MRT4577_149824C.1
ggggaaccccccccagggggggaataaaaaaaaacccccccccccctcccccgggaaaacttttggaaaaaaatttttccaaagggttggggggggcaaaaaaaaaaaacgggggcccctgtttgtttcggtttttttcgccccccttttttaaaaaatgggggggggggaaaaattggggtttctttcccatcccgggggggggaaaaaaaagttttttttggggcccaggatttaaaaggggggggtttcttttttttccaaccccccacccgttttggggtttagggggatttgggggggttttccccccaccaattttttaaaaaccgggctaaaaagctgggcgttgggcaccccccacactttttggggggccaaaatctgccaaaacccaaacaaaacggggccgaagggactgggccacaacctgaccatggggtaaagttaaaaaaggcccccggggcgcccctcagggggaatttaaagcggtttttttttggccgccgccccccccccatttggccctggggcatcggggcaccaaccttt

SEQ ID NO: 54633 - DNA, 795 bp, Zea mays
  Clone ID: MRT4577_149825C.1
atcctccctcctccaccatctttggcggcgccgcatgggcagcaaccacctcggcgtcggcggcggcgtcgtccccccaccccgcggtgcttgcgtgctctgttcccgtcctcctcgcacgcgattgcccccgcgcccaccgcatccagtgcctggcccgtgctccctagcctatacatcgcaccctgccctcgtctcgaggtcgccaccctatcctcatcttcggcggcgccgtctgtcgctcacctgtccacctctccccaggctctacgaccgcaccctctccctctacctcgacaaagccaagtgccggggcaaccgcactgccgctctcaatggcctctgccgccttggcgaggccatcaaggagtgcgaggaggcgctccagattgatccgtactacggccacacgcaccaccgcctcgcatccctacatataagactgcaggtatgtgatcgtcggggaagggaacgctgccggttacgtcgccaggacgttcgtcgagcacggcatggctgatggccgcctctgcgtcgtctccaaggagattgcacccgccaagcgtgaagggctacccctatctcatctagaaattctggatgctgttgttatctcgtaagtttagtcacctaatcattggggttgatagctacttctgtgtgtgtattttagaaatatgttttttgctgaagtttctattgcctacgtcataaggtcccctcagacttcttcgactgaagttgatgttcagaaatttattgaaaagcaggtgagcctgtgtggaacatttgctc

SEQ ID NO: 54634 - DNA, 719 bp, Zea mays
  Clone ID: MRT4577_149826C.1
cctcgaggccggccgggaaattatctatcaccatcactactacgaatgcaatcctctcacaagttatgtagcttttcgcccgctgagatctcaatctcacctcgtatacatgacgtactgcggacttaggaactaaaagttccagcgcatgtagggggtgttgtggcccaattgatatctcactacgcaacagaactatgaacatgcaaaccgaccacacgatgaacgatgatggcatgtcctcagatcctcgaacagtgacgagaatggcttcctatccttcggacaacaaggaagtccgaaagaagacgactaggcaccatagctcgggtccatgctctcgttaccaagggcacttcatgggcccagctaccgtgtactcttcgttccactcgcactcgacgtctgatatatctgccctacagaaccaccgccgactgctgcagaatgctgtgagatcccctgtgctctgcatagcatcatatgtgcatcagagcatgcgctgtaccgactcgctcacatcgcagcggctgaaggcttctatcgcaaatgtgatgaacctgcatgactacaacccatctagagagatctgcggaataggaaaactctgcatgaattctgccattctcctacactccagagagagatacacctcaatcgagaggcccatcgctcgtgctactattccaccaaccatcggatcatgcgcctgtggatgg

SEQ ID NO: 54635 - DNA, 428 bp, Zea mays
  Clone ID: MRT4577_149827C.1
ggcagtcccacaagatcacagcacatacgcttactccattccactcggccgcgaccgcgaccgcgacggcgagcgaggggccgtggtgggacgccgcgccgcttctgcagaaagaaaaaggccaggactcttgatttgctcctcgcgggggttcggtcccatggcggcagctgcgctggcaatggcagatcaggtggtggccgagctccgagtgaggtgtgagacgccgccgtcgatgctgcgcgaggtggccgtggagatggcccgcgagatgggcgcggcgctggagaaggacggcgggagcagggtcaagatgctactctactacgtcgataagctccccacagggagagaggaaggattattctatggattggacctaggaggaacgaatttccgcgtcttgaaagtgcaactaggtgggaatg

SEQ ID NO: 54636 - DNA, 775 bp, Zea mays
  unsure (1)..(775): unsure at all n locations
  Clone ID: MRT4577_149828C.1
ggcagtcccacaagatcacagcacatacgcttcctccattcccactcgccgcgaacgcgaaccgcgagcgccaacgaagggccgaggtgggacgccccgccgcttctgcagaaagaaaaaggccaggtgaggtgctcgacgcgggagacgaggcggagtagcgccagcgtcccattcccggccaacctccctgttcatctccatgccgacctgactcggactcttgatttgctcctcgcgggggttcggtcccatggcggcagctgcgctggcaatggcagagcaggtggtggccgagctccgagtgaggtgtgagacgccgccgtcgatgctgcgcgaggtggccgtggagatggcccgcgagatgggcgcggggctggagaaggacggcgggagcagggtcaagatgctcctctcctacgtcgataagctccccacagggagagaggaaggattattctatggattggacctaggaggaacgaatttccgcgtcttgaaagtgcaactaggtgggaatgcgaagcatgtcgttgaccgtgactccagagaagtcggcattccgccacatctgatgtcagggagctcctcggagctttttggtttcattgcttctgaattggccaagtttgttgacgatgatgagaagtgcgctaacatttcgaatggcaagaagcgagaaatagggttcacgttttcgttcccagtgaagcagcgttctgtagcttccggtacgcttgtcaagtggacanaggcattttccattaatgatgct

SEQ ID NO: 54637 - DNA, 2413 bp, Zea mays
  Clone ID: MRT4577_149829C.1
gcgggcagtcccacaagatcacagcacatacgctttctccattccactcggccgcgaccgcgaccgcgacggcgagcgaggggccgaggtgggacgccgcgccgcttctgcagaaagaaaaaggccaggtgaggtgctcgcgggacgggaccggagtagcgccagcgtcccattcccggccaacctccctgttcatctccatgccgacctgactcggctcccatttccctgcgtagtgcggagctccagtgaaggaaccaaacagcgcaacacacgaacacaccaggcggcaggctccaccccgtccttttcctgccttttccccccgtcgagttaatccatccagtcgccaaaagctttgctaaatttcacgtgtctcgcctcgagtcgtccctaatccgacgatgccttgttctactcctaaaaaaacccaaagatcctgactttctcttgctgctagcctcccttttcccttctcccttaatcgcactgttggaagctcttcgctgtcacccccacccacctccggcgctcttttttagcattttccttgggctctggactccaaaatcccagccttttgtttgcttctctgtctcctgctgattggtgtccccgggtccaggactcttgatttgctcctcgcgggggttcggtcccatggcggcagctgcgctggcaatggcagagcaggtggtggccgagctccgagtgaggtgtgagacgccgccgtcgatgctgcgcgaggtggccgtggagatggcccgcgagatgggcgcggggctggagaaggacggcgggagcagggtcaagatgctcctctcctacgtcgataagctccccacagggagagaggaaggattattctatggattggacctaggaggaacgaatttccgcgtcttgaaagtgcaactaggtgggaatgcgaagcatgtcgttgaccgtgactccagagaagtcggcattccaccacatctgatgtcagggagctcctcggagctttttggtttcattgcttctgaattggccaagtttgttgacgatgatgagaagtgcgctaacatttcgaatggcaagaagcgagaaatagggttcacgttttcgttcccagtgaagcagcgttctgtagcttccggtacgcttgtcaagtggacaaaggcattttccattaatgatgctgtaggcgaagatgtggtggctgaactgcaaacagccatggagaagcaaggtctggacatgcatgtagctgcattgattaatgatgctgttgggacgctggcgggagcaaggtactacgacaaagatgttgtcgctggtgtaatatttggcactggcacaaacgcagcatatgttgagaaggcaaatgctattccaaaatgggagggtgagctgccccattcaggagacatggtcatcaacatggaatggggtaacttcttctcatctcatctccccatcactgaatatgatcaagaattagataaggagagcttaaatccaggagaacagatttacgagaagttaacgtcaggaatgtatttaggtgaaattgtaaggagggtgctccttaaaatatcattgcagtccgccatttttggtgatattgaccacactaagcttcaaacccatttccttctgcggactccacatatttcagcaatgcaccatgacgaaacatctgatctgaagattgtggccgaaaattttgaagaaaacctagagattacaggcacatccttggaggctcgtaagctggtcgttgaaatctgtgacattgtggcgacaagagcagcccggctggctgctgcggggcttgcagggatcctcatgaagatcgggagagatcacagcgtcgaggaccaacggtcagtcatcgccatcgacggaggactgttcgagcactacaccaaattccgccggtgcttggagaccacactgggtgagctgctaggagacgaggcgtccaaggcggtggccatcaagcatgccgatgacggctcaggaataggtgctgccctgattgcagcttcacagtctcagtacaaaaacgacttagtggccgtcaagcatgcagatgacggttcaggagtcaagtatgcagaagacaagcgtgcagatgacggttcagaaataggtgctgccctgattgcagcctcgcaatctcagtagagagatgtccgagtggtatagaggtagcaagtagctatgatttgtttccaacgtcttaactgtccagcgtctgcagtttagcatgctagagctggatgcgatctgtaaccaaaaccaggcttggccaactggctgttcataattccaataacagcagggttgcagatgtctcctaaaaaaaaaaaaaaaaaataatatttctcttactcttatcctttatatctctacactactccaatag

SEQ ID NO: 54638 - DNA, 871 bp, Zea mays
  unsure (1)..(871): unsure at all n locations
  Clone ID: MRT4577_14982C.1
acaagcgacattttcattcccagctacgacggnaaatatggcaagggttgtcgaaggccaccgcaggtcgtccgatttccgcaagaccatcgtcttggacagaaagaagctcgtcgagctgttggaccttttccagggggcgctctatcctgggacgaattctcggacgcagtgaaggaggcacacaggagccgcacgggccagcctgcggaaagaaaggtcgtcccagggcagcccaaggaagaggactacttctacgctaatcctctagaatgcctcggctccaacgggggactacgggacgtctcctgacgacgctttcctggaaacacgccgccgatgaacgatgacaccacctcagccctacagcacaccgtgtgtgttcgtgttcatcctcaccagtcaccgccaccgccacctttgtacagctgaccaaaggccctgcccatctaccacaagtgcatgcaggttcaccagatcagaacgcctgcgaccacatttcctcctcacagaataaagcaggaaaagaagctgggaaccctacggggttcttcagaaagaagagatgccgctcgtgcatccagtctgctcctttcctaccatctgtcatagttgttgttgtaacccttctgtcagttttttcattcctattgttcggttgctccccttcaactgctccagttttcagttcttctagccggggcgggtagctcatgcaaaagtaggagtccagctttctggaagtttcttgtactaggtccgcgatgcataacagagatttttgaatcctgacagaaccttattactttcccttgagggatcaaacggaaaaaaaaaaaaaaaaaaaaaaaaaaaaacaaaaaaaaccaac

SEQ ID NO: 54639 - DNA, 473 bp, Zea mays
  Clone ID: MRT4577_149830C.1
cactccaaaacagttatgacccccataacccccacggagaaaataaccctcactagagggaacagcaactacatcttcgaccataaggacgcattcaactctaacaatatcgcctccacctgcatctagatatacaacgtcatctctaaagatactacatatctccttttcactgaccactactatgttcacagcattcatgagcatctttgcaatccttatattcctcttctttgacaactgtcgtaggatagtgcaacacccatagacgctaccattgctaactacatcttgcgagcacgatttcgcctaatctgcctcttcgcttatgacatcttcaggactatagctattgatcttggcgcagtcacgtcactagtttccggctttcatgtaatgaacatcgatacttatgcgaaagtccggactactttataggacataatgtgcgtctgataggcatttattactga

SEQ ID NO: 54640 - DNA, 789 bp, Zea mays
  Clone ID: MRT4577_149831C.1
cgggatcgctatcagctacttcaactctccaccccaagtctgactacatctcagcccttcactacacatcacacactcaagatgcacttctcagctcccgccttcatcgctctcctaacagccacccttgcaatcgccgccccttctgccgagccaaacaacaagtgggccgacaaatacaacgacaagaagaagtatatcaaggactgcaagaaggacctcgacgacaagtggaagcagaaggatgaccactggaagaagaacgagaagctcttctacttcgatgcagagtacattgtaaaggccgttcccgaagaggtcgtcggcactaaccaggctcctgcacctggtcagcctggcgccaagggtctcttcaagtatggcatcaacatcgcagacaataccatctgctacaacatcaccctatccggtgtcaccggtgcctaccagtctatggctctgacctcaacacacatccacgaggcgcccaagggccgcgcaggacctcctcgtattgcctttcccaaccccgctaggcccgatgagcgccgcatctccactggatgtctcactgggcccttcaagactggcattcttgccaatggtgttgatacgggtgacaacttccacgtccgccagattgttgccaacccggctggcttcttcactgacactcacactgcgcagtttgtgcctggtgctgttcgtgggcagctcaagtaggtttgcgcatctgtcgggctgatggctacttgcttgttgattgggattgtttgtggatttgctcgg

SEQ ID NO: 54641 - DNA, 366 bp, Zea mays
  Clone ID: MRT4577_149832C.1
atacaataacttgggaaagtggtggaatgtcacattctaaaaaatagcctattacattaataagattccaattctcaaaataaaatgaaacaaacgggaactaggaaatcattagtaagattccaattctcaaaataaaatgaaacaaacgggaactaggaaatctggcactaatttgatagagttttttcaggctacatgcatcaggcatgcaaaactaagaaactagcaagtgacacgggggagtgcgtgagggagcagagaataaataaacacggaaagaagagggaactggtgtgatgaccaccgctatacagctgaccgatcataacactgcccgcttcaacggtaagctactgccacgag

SEQ ID NO: 54642 - DNA, 419 bp, Zea mays
  Clone ID: MRT4577_149833C.1
ggcaaaaaacaaccatgaaggggggcccgccacaaattgaacatcggttaaaggcaggacaaaacacaaaaacaggtgatccctacccaaactaaatcgggacaaacaggcaaaactggcgggaaaacagtatatcacaacgggaagggaaaaaacatgctagttccaatccatgaacatcactaagcacgtaaattctgagcccccggaagggcttcctgcaaattcttcaccgcactggcatagaaaacgaagcccaaaaaccaaaactcagggttataaacaaaaaccacctgaagggatttctctgcggcatttggcccgcttggggaaaaaaaaattgaccgcagttgaacaagggggaagaccaccttggagaaaccccactcagttttgcctccaacctgggatgcaagggg

SEQ ID NO: 54643 - DNA, 298 bp, Zea mays
  unsure (1)..(298): unsure at all n locations
  Clone ID: MRT4577_149834C.1
ctagttcttagatcgcgatctcagttcntagattcggcgagcggggnacggcacgactnaagtnnaagctgcgtncgaacnnccggggaaaatttaaattttcccgggaaacccgggtnaaccctngacnagggcggtaacccnananctttttccccctnatnaagntggaagnttncgttcattttaaggaaggctttggggncgttaaattcccaattggggttcaatnaagncttggtttttnccccttgntggtngcaaaaaatttcggtttaattnccncgggcttcnaana

SEQ ID NO: 54644 - DNA, 426 bp, Zea mays
  Clone ID: MRT4577_149835C.1
ccttcaatttttttttttttggttttttttatttttttttttttttttttttttttttttttttaagggaaggggtcttccaaaagatggggcattggacaaacaggtggcccgaaggactcaggtggttaaaaatattcacctttgggcccgccccggaccccctttttccgaaaggcagggcataaaatgcctttcctcccctaaagggtgggctcccagcttaaaaaagcatctggggaggttccgaaaaaaaatttgaactttaaacccttttttttttttccaggacgttccgcctataaacttttaaaggtttttttccgggcatccaggctttttttatccacaggaactttggaagccattgggccatcctttttttgggccggcggagttcctacaggaggatcagaaacagtgggg

SEQ ID NO: 54645 - DNA, 348 bp, Zea mays
  Clone ID: MRT4577_149836C.1
ctttttcttttttttttttttaatcgaacaaattctttctcttgctgaaaagctaggacctcactctgacggtgagtaaaaatggatcgatgtacacgaagaatatgcagtgctaggtgcaaagctgattgcagaggtccttgatcctgtcctgcgacgccggcgccacgacgtacgtgcggttgctgccgccctcgcaaacgacgctgagcgtgttgttctcctgcgtcggggccgtgcacgtggtcggcgacccgtcgcaacttcaacttctggtgggcacgcagctgaagtagtggcaccacgggcacatgctggtttggcctcttaccccgcggaaaaaacaac

SEQ ID NO: 54646 - DNA, 394 bp, Zea mays
  Clone ID: MRT4577_149837C.1
tgccgcgaatctgactgtgttgacggcgcgggtcacctctgtcatatcccgtgtaagatggacgataaagcgcgagtggctggcggataaatcgtcgtagtaggactccgcgaataacaggaagatgatccccacctcatcctccagtacatgaatgactcgggtcgtctgctgaaggcctacgctcatcttccagagacgctcaggctcgacgaagttgtacaagtccatgcgcccgaggagcgggaggagaactgtgactacgactacttccagttcgaggacgaggacatcgacgagatataagaattctgtctctccttccttccggcacattttattattattatgggattccttttcgccttccggctaatataatattatgtgactt

SEQ ID NO: 54647 - DNA, 129 bp, Zea mays
  Clone ID: MRT4577_149838C.1
ctcaactacctgcggccgaacatcaagcacggcggctacaccgacgaggaggaccggatcatttggtcgctctacagctccatcggcagcaggtggtcgatcatcgcgtccaagctccccggccggacc

SEQ ID NO: 54648 - DNA, 509 bp, Zea mays
  unsure (1)..(509): unsure at all n locations
  Clone ID: MRT4577_149839C.1
gtgcggcgctcgagccggccgggctgcgnnnnnaaaannnnggacaatcgtcaatactcacaccaggacttacccgcccaacccgcccttcaaccacacatcatgtctcacgagtcggtctggtactcccgccctaggacctacggcaagggctctcgcgagtgccgcgtttgcacgcaccctgctggtctgatccgcaagtacggcctcaacatctgccgtcagtgcttccgtgagaagagcgccgacattggctttgtcaagcaccgataaattcccttaccctttattcaaacggaaatcgaaccggagtaggggcggcgcacaaacttgacgagatgattacttgacgatacgaaatggccacctcgggacccccggatcttttcttttctttttcacttgcaactacgggaaaaaagaagaagaggggtggatggatttagcatgggggggacgcgaggcaagataggaaacaagagctgaaaatgatagcttttttttacttg

SEQ ID NO: 54649 - DNA, 111 bp, Zea mays
  Clone ID: MRT4577_14983C.1
gatgaagccaacctgataaataatactactcttattccatgtatatgacgaacctcagagctggaaaagaacttgacggaggtggacatacaatatgaagaatttgacatt

SEQ ID NO: 54650 - DNA, 124 bp, Zea mays
  Clone ID: MRT4577_149840C.1
atgtcgagaacgaggccttagcgagaatccaaacaagagactgaattttactaaatttgctataatcttgctctatcgctcataagcattctataagaggacaccaccaatgaagagtctggcc

SEQ ID NO: 54651 - DNA, 1447 bp, Zea mays
  Clone ID: MRT4577_149841C.1
ttgggagcctcgaggccggccgggccgggatcacttcctagctagtccttcttactcaacacattcgacgatcttgagtgcaagcaagcaggcagacatggcggcggctactgcaccaaagacgatgccgtcgtccgttttcgccgccgcactgctgctcctagccgcggcggcgtgccaggccagcccttactaccctctggagctagggtactaccgttacacttgtccccaggccgaggctatcgtcaaggccagcatggagaaggccatcgcccagaaccctggcaatggcgccgccgtcatccgcatgctcttccatgactgcttcgtcgagggctgcgacgcttccgtgcttctcgacccgaccccgttcagcccgaccccggagaagctggccgcgcccaacaacccgagcctgcgcgggttcgagctgatcgacgccatcaaggacgccctcgaggccgcgtgccccggggtcgtctcctgcgccgacatcatcgccttcgcggcgcgcgacgcgtcctgcttcctgagccagggcaaggtctccttcgacatgccgtcgggccgcctcgacggcaccttctccaacgcctccgagtcggtcaagttcctcgtcccgcccacgtccaacctcagcgacctcgcctccagcttcgccgtcaagggcatgtcgctggaggacctggtcgtcctctccggcgcgcacaccgtcggccgctcccactgctcctccttcgtctccgaccgcctcgacgtcccctccgacatcaaccctgcgctggccgccttcctcaggacccgctgcccggccaacacgacgaccagcgacgaccccaccgtgatgcaggacgtggtcacgcccaacgccatggacaaccagtactacaagaacgtgctctcgcacaccgtgctcttcacctccgacgccgcgctcctcacgtcgccggagacggccaagttggtgctggacaacgccaagatccccgggtggtgggaggacaagttcgagaaggccatggtcaagatggccagcctcgaagtcaagactgggcaccaaggacaggtcaggaagaactgcagggcgatcaatcactactagcaaacagctggttgttgatcagcttgcaccactgcaatgtggaagaccttcagaaaaagaaaaactgcacagtacgggtgatggatggtgaaggatcaatcggttcagttgtgttggtgtttaatttgttcatgacctgcaagcgtgtggtttgttgtatgatatggcaactgttgttattatctttccatttgcctttgatttgttgaaaacctggagaggtttgtatctgttattattctttggtttgtgtttctatatttggattatcaaataaagttgaatatataagttcagttcttttaaaaaaaaaaaaaaaaaaaaaaaaaaaaaaaaaaaaaa

SEQ ID NO: 54652 - DNA, 2320 bp, Zea mays
  Clone ID: MRT4577_149842C.1
cccacgcgtccgcccacgcgtccgctcggtcggtccccgcctcttccctcttgacgcctagggttccaacggcgtcctcgccgacgccgacacaccctccaatccaagatgtcgcatcccatcaccccgcgccgcaccacccgctcgtccgcggccgatcccgcctcaccgacctccccgtccggacccaggccccaaccgacgcccaggcgccaacccgtccccaccgccgccgcgaacgcgaagcgggaggaaggagaggagcacgagcggagccccgtcgacgcgctcctccaggcgctacccggccgccgcgagcaggcgacggacctgctccggctcctggcgcccgcgccggcgctcccgctcctcctccacgggggcgccgccacggggaagacgcgcgcgctcctcctcgctctccgccacgtgcgcccccgcccgctgcgcgtcgcctacgctgccctgcgctcgctaccgtcccctcgcgccctgttctcctccgtcctcgcccaactcagcccgccttcgtcgtcctccgcctcctcccgcctgcgcgtccccgacaagccatccgacttcgtcgccgcgctccgcgacgcgcttgctggcctctccgcgcggggcgaggccgtgtatctggtgttcgataatttggaggttgttaggagctgggacaagggtggccagcttctggcgctcctcctccgcctctacgatctcctccgattgccgcaggtcgtgctcgtctacgtgagcagtgctacacctgacgcgtactactccctggtgttcgataatttggaggttgttaggagctgggacaagggtggccagcttctggcgctcctcctccgcctctacgatctcctccgattgccgcaggtcgtgctcgtctacgtgagcagtgctacacctgacgcgtactactccatgactggctctgtcgagccgaatcacatttacttccctgattatacagtggacgaggtacgagacatcctgatgcgaggccatctaaatccgaagctgtactcatcgttccttagtgtggcgctgaagccattgttccgggtaacaaggagggtagatgaactggtggctgcactggagccacttttcaggaggtactgcgagccattgggggatttgaaggccgttccggatgagagcatcaaaagaaggttgtttgaacatatacagccacatttggctgttgccatgaacgagactttcattgttcccacgagggtttctgtggatgaatgcaaagaccacagttctcgtgggaaggccagtagtaaaagacagtttggcagtagggatggcttgccgactgaattggagttccacatgtctgtgtctgcgaaatacttactattgtcagctttcctggcttcaaggaacccggctactcttgatgcagctttgttcgattcaactggagggtcagataacaataggcgtgagagaaagagctctcaagcatcgatgaatatgaaggacaccatggccgaagagatgcttatgaaaggccccggcacatttcctctggagaggctcttggctatatttcagtgtatcacatctgtgtcagaagatgatctcggtgatgttgaatgttctgatagtatgatgaatggaagtggaatgactggtttgatgtcagatgttcttttgcaactgtcaacactttgcaattctaatttcctctccaaaagccggagctgcccgatggaaggctcagctagatatcgatctaacattgatgaagatttagcactcaaggttgccaggagtgttagtttccccctctcgaagtatatttacagaagatagcctttgcatccttagcctaggctgtaacaactgttgtctgttgttgttgggtttagactataatgggatccaatttgtctatttcacaaggtggtagagcatcaagggataaagcaaatgctatatgctctatcttctttagtgtgttgacttctgatagtcctgtttctcagtcagacaacgagtacggtgtctgatcctggatctagtggtaacttaacattctgagctttatggagatgtctcagaagtagcattatgtcaatagctcgtgccattcagacagaaaagaaccattagcatctgaatatagccatgctgcttagtttgctagatattcttttcttcacaattcaaatgtaatgcggtttttgtggtgcacagtggtaccacgattctatctgaaacgatcagtgcccctttgtccaagtccaatgttgttgtaatgatctgtattaagtgattattccattcccccccc

SEQ ID NO: 54653 - DNA, 440 bp, Zea mays
  Clone ID: MRT4577_149843C.1
tattcggcacgaggggcgaggtctgctctggtcacctctggcgatcctcctccttcgcccattgcctccgccggtcaattcccttcgctggtactcagagatcggcgccctcctcccgtcttcccacgcttgccggcactaactcagagtagtgtcgctcaatgaatttcctctaccgaactacgcagcctgcattcgactgagctgccaagaatttcagagcaagatcacaggaatgccttacaaaagacgacttcaacactggagggtctcattgcggacgattcacaccaccagccctgctctgcccacagcgaagatggagctgctaataatgggtccagggatatcaggggggattcttcatgtgttgatttgaaaagcccagtcccactgaagacacatgccgatgtgatggaagacgaaggatggatcacaat

SEQ ID NO: 54654 - DNA, 709 bp, Zea mays
  Clone ID: MRT4577_149844C.1
ggccgcttttttttttttttttttatgaaattcttggattattggttagtgcgcacaaagtacactacacagtatacagcatgagggacaccgcacgtatactgacacgggctgtgcatgcaggtgcagtatagagtagagaagggagatggagtgatcagctagctgtgcggtatcggcgaggtgcctccgcggcggcgcgtgtccggtggcggatccacgaagccgtagtcttgtcccgccgccgccgcagcagcagcgccgagcagcagctggtcgccggcggcaagtcccttctcctcctgcgagggtgctgcggtgttcacctgcagggaggagtccgcgccaagcaccggcgacggcgaggacgacggcggacgcggctgttgccgtccatgacgcgctgcgagtccggcggcggcggcgccggcgccgcagctggccgtgcacacgccaaccgcgagaagcagcgccaccgccaggcaggcgcccgacgttgctgccgccgccgcgagcagcagccgcgacgacgacgacgaccgcatataatatggaagaaggttatgagtacacgggcggctcgatcgccgtcgtatgctcatatagagtagactgcgcgtgcggcattcgggcatccggccggccagcaggccaggagcaagcgatgctggcagctggttggctggctgtgtcagtggtacggcgcccg

SEQ ID NO: 54655 - DNA, 1717 bp, Zea mays
  Clone ID: MRT4577_149845C.1
tgtcaatacagattgtttttacatgcatggtgtatccagcattgatccttgcatacatgggacaagctgcttatctgtgtaagcatcatatcatggaaagtgactacaggatcagattctatgtgtctatgccagcagttgtgggaagccaagccgtcatcactggtacattctcaatgatcaagcagtgcgcttctctgggctgctttcctcgggtgaagataatccatacatctgccaaagcacacgggcaaatatacatccctgagatcaattggattatgatgatactgtgcttagctgtaaccattggttttaggaacacaaaacacttgggaaatgcatcaggattggctattataaccgtcatgctggtcacaacgtgcctgatgtcccccgtgatagtcttgtgctggcataagagcatattccttgcgattggcttcatcctgttctttgggaccattgaggcactgtacttcttagccgcactcatcaagttcatgaggcactgtacttcttagccgcactcatcaagttcagggagggagcctgggtcccaatcgttcttgctctcatcttcatcttgataatgtgcgtctggcactatggcaccatcaagaagtacgagtttgacgtccagagcaaggtctccatcaactggctccttggactcagcccgaaccttggcattgtccgcgtccgtggcattggcctcatccacaccgagctcgaaaccggcatcccagctatcttctcgcatttcgtcaccaacttacctgcctttcaccaggtagtctcaatcttccattgtccaaagttgagacatggattcagaagtacgtttgccctgctattgagtattgagaatcgttggtcatgaccaggtactcatatttatgtgcatcaagaacgtgccgataccacatgtccggcctgaagagcggttcctcgtcggaaggatcggccccaagcagtacagaatctaccggtgcatcgtcaggtacggctaccaagacttccacaaggacgacgtggagttcgagaaggagctggtgtgcagcgtggccgagttcatccggtcagggtcgtccaagctgaacggcacggccgaggaggtcgacgaggaggaggagcagcgcatggcggtcgtccgctccaacagcgtccgcatgctggaggaagaggccacggtgcagaacaccgtcggggtcggcccgtcgtcgcgggccagcagggagatacagtcgccgtcgccggccccggcgactggggttgggcccaagaacaagaagcgggtgcggttcgtgctgccggcagcgagcccgaagccggacgccggcgcgcaggaggagctgcaggagctgtcggacgcgcgggaagccggcatggcgttcatcctgggccgctcgcacgtgaaggcgaagagcgggtccggcttcctccgccggctcgtgatcaacttctgctacgacttcctgcggaggaacagccggggaccccgctacgccgtcaccgtcccgcacgcctccacgctggaggtcggtatggtgtactttatctgactggactgaactgaacagccccctgaaactaactctgggagtgagaaactcagaaacataggaacatgaaaagataagatgaggtgaaacaaaaaaaaaggttttcagctgtatatgctaggttttgtaaaaaaaaaaaaaaaaaagcggcc

SEQ ID NO: 54656 - DNA, 295 bp, Zea mays
  Clone ID: MRT4577_149846C.1
ttgaagcagtggtaacaacgcagagtactcggttttttttcttcttttctttcatcactttcttcttgcacagtgactgtatctgcctcacctgattatcgcctgaagcactaaattataatacaccggcgaattcgaatatttggcgcctgcttgtttatttttgaactaatgcacgacggccatagacggagccctttcttcttgtttaacgacggagattgtattctgggaatccctctctgaatacatcccaaaaaagcactcctgggaaaaaaaaggacaccaaaaagta

SEQ ID NO: 54657 - DNA, 387 bp, Zea mays
  Clone ID: MRT4577_149847C.1
attggtttcaggaacacaaaacacttggggaatgcatcaggattggctattataaccgtcatgctggtcacaacgtgcctgatgtccctggtgatagtcttatgctggcataagagcatattccttgcgattggcttcatcctgttctttgggaccattgaggcactgtacttctcagccgcactcatcaagttcagggagggagcctgggtcccaatcgttcttgctctcatcttcatcctgataatgtgcgtctggcactatggcaccatcaagaagtacgagttcgacgtccagagcaaggtctccatcaactggctccttggtctcagcccgaaccttggcattgtccgcgtccgtggcattggcctcatccacaccgagctc

SEQ ID NO: 54658 - DNA, 2939 bp, Zea mays
  Clone ID: MRT4577_149848C.1
cattgggtacctcgaggccggccgggaccgaatcacatcctgtcacgcctcctgctcaaattcctaacgcccgagaaaccaagaaccggggtgaggccgctgtgcgacgccgtcaccttcacctaatcccaacttccccactagtcctcaagtgtctctcttcttctcttcggttacaagagcagaccggagttaccgggcggtggaggccgcgatgaagagccctcctgtcatggatcccgaggcgccgccatcgccgccgctgccgggcactcctcccgatgacgaggaggagaagcggggaggacggaacggggtgccatggcggatgacgctgagcctggcgtaccagagccttggcgtggtttacggcgacctcagcacgtcgccgctgtacgtgtacaaggcggcgttcgcggaggacatccagcacacggagagcaacgaggagatcctcggcgtgctctccttcgtcttctggacgctcacgctcgtcccgctcctcaagtacgtctgcgtcgtcctccgcgccgacgaccacggcgaaggaggcaccttcgcgctctactccctcctctgccgccacgcgcgcgccgcgctcctcccgccaggacgaaccgccgccggggacgaggaccagttcttggacggagccgacggtggcaccaagaaggctacggcgcagaacggcaatgcagtgacgctgggcgggggcgctgctgccagcgtcaggaggctgctggagcggcacaaggtgctgcagcgtgtgctgctcgtgctggcgctggtgggcacctgcatggtgatcggcgacggtgtgctcacgccggccatctccgtgttctctgcagtttccgggctggagctgtccatggagaaggaacatcataagtatgtggaacttcctattgcctgtatcatactggtttgcctgtttgcactgcaacactatggtacacaccgggttggcttcatttttgctccagtagtggtcacatggctcctatgtataagcgtgattggtgtttacaatattattcactgggaacccactgtatatcgagcattatctccgtattacatgtacaagttcttgaggaagacacagagaggaggttgggatgtccctgggaggaatactgttatgcgtaactggttctgaagcaatgtttgccgatctagggcattttaaccagttgtcaatacagattgcttttacatgcatggtgtatccagcattgatccttgcatacatgggacaagctgcttatctgtgtaagcatcataccatggaaagtgactataggattggattctatgtgtctgtgccagagaaaattaggtggcccgttatggcaattgctattcttgcagcagttgtgggaagccaagctgtcatcactggtacattctcaatgatcaagcagtgcacttctctgggctgctttcctcgggtgaagataattcatacatctgccaaagtacacgggcaaatatacatccctgagatcaattggattctgatgatactgtgcttagctgtaaccattggtttcaggaacacaaaacacttggggaatgcatcaggattggctgttataaccgtcatgctggtgacaacgtgtctgatgtccctggtgatagtcttgtgctggcataagagcatatttctggcaattggcttcattgtgttctttggaaccattgaggcactgtacttctcagcggcactcatcaagttcagggagggggcctgggtcccaatcgtccttgcttttatcttcattttgataatgtgcatctggcactatggcaccatcaagaggtatgagtttgacgtccagagcaaggtctccatcaactggctccttggtctcagcccgaacctcggcatagttcgtgtccgcggcattggcctcatccacaccgagctcgaaactggcgtcccggcaatcttctcgcattttgtcaccaacttaccagccttccaccaggtactcatattcatgtgcatcaagaacgtaccaataccacatgtccgtcctgaagagcggttcctcgttgggaggatcggcccgaagcagtacagaatgtaccggtgcatcgtcaggtacggctaccacgacttccacaaggacgacattgagttcgagaaggagctggtgtgcagcgtcgcggagttcatccggtcagggtcgtccaagttgaacggcatgcccgaggagttcgacgaggaggagcagcgcatggcggtagtccgctccaacagcatccgcatgctcgaggaaaaggctacagtggagaagaccgtcggcccgtcccaggccagcagggagatacggtcgccgtcgcccactcctcccccggtggttggccccaagaagcgggtgcggttcgtgctgccggcagcgagcccgaagccgaatgccggcgtgcaggaggagctgcaggagctgtccgacgcgcgggaggccggcatggcgttcatcctgggccactcccacgtgaaggcgaagagcgggtccggcttcctccgccggttcgtgatcaacttctgctacgacttcctgcggaggaacagccggggtcccaactacgccgtctccatcccgcacgcctccacgctggaggtgggtatggtgtactttatctgactggactggactgaacagccccctgaaactaactctgggagtgagaaacataggagcaggaaaagataagatgaggtgaaacaaaaaaaaaagttttcagctgtatatgctagatcttgtaagtaactgctggtgagttccgttgtaaaatgcagccctgttttcttgttaggcattcagcttctctcgtaatccactagaaaatttattattattatggactagtttggtaacctattttttcaagaaatttttattttttgaagggaaattagttaatttttc

SEQ ID NO: 54659 - DNA, 978 bp, Zea mays
  unsure (1)..(978): unsure at all n locations
  Clone ID: MRT4577_149849C.1
cggggctcgtctccttgcttgcgcttcctccgtccccctagccgctgcaggtcctagttgccccacccctcacgccaatgcagcttccccctgttttgttgctttgaccgccttaaacacctcagggcctgcagatgtcgcaccgaatcacatccccttcacgcctcctgctcgaattcctaacgcccgagaaaccaataacctggtggtgaggccgctgagcaacgccgtcaccgtcacttaatcccaactcccccactagttgtctctcttcttctcttcggttacaagagcagaccggagttagcgggcagtggaggccgcgatgaagagcccctctgtcatggaccccgaggcgccgccaccgcctccggcgggcactcctcccgatgacgaggaggagaagcggggaggacggaagggggtgccgtggcggatgacgctgagcctggcttaccagagtctcggcgtggtgtacggcgacctcagcacatcgccgctgtacgtgtacaaggcggcgttcgcggaggacatccagcacacggagagcaacgaggagatcctcggcgtgctctccttcgtcttctggacactcacgctcgtcccgctcctcaagtacgtctgtgtcgtcctccgcgccgacgaccacggcgagggcggcaccttcgcgctctactccctcctctgccgccacgcgcgcgccgcgctcctcccgccaggacgaaccgccgcctgggacgaggaccagttctcggacggagccggcggtggcaccaacaaggctacggcgcagaatggcaatgctgtgacgctgggagggggcgccgccgccagcgtcaggaggctgctggagcggcacaaagtgctgcagcgggttctgctcgtgctggcgctggtgggcacctgcatggtgatcggcgacggcgtgctcacgccggncatctccgtgttctctgcggtctccgggctggagctgtc

SEQ ID NO: 54660 - DNA, 786 bp, Zea mays
  unsure (1)..(786): unsure at all n locations
  Clone ID: MRT4577_14984C.1
aatccttccttccttccttccttccgtccgtcctcactcccctcctcctcctcccggcgatcgcagagaattcgccgccgccgccgcgacccctcgtccgtcccagccgaaacccctcggcgcccgtccgcctcctcccggatctccccggccgccgcccgagcgccaagagcatattgacgaccaaggggccttgagagataggatatactggtacacgtattggcatgttaagaagaagcaccggagctacttggtgtagccattatcggacgtgcgctacgccgttgtccgcaacattgtgagtagttactgaagttacgtctgtaatctgtttccaaccttattaattctggacctggtgcattcgcaaagatgggagtttaccttagtacgcccaaaactgagaagctatctgaagatggggaaaatgatcaacttaaatttggactttcatctatgcaagggtggcgtgcgagtatggaagatgctcattcagccttgctagatatcgatgagggcacatcattcttcggtgtttttgatggacatggaggaaaagtggttgccaaattctgtgcaaaatatctacacagggaagttctcaaaagtgaagtttatttagctggtgacctgggagctgctgtccatggagctntcttcagaatggatgagatgatgcggngtcaaagaagctggcgagaactacaggcacttggagataaataaacagnttactggcatgatagaagggctgatctggtcctcgagaggcagtgattcaaa

SEQ ID NO: 54661 - DNA, 458 bp, Zea mays
  Clone ID: MRT4577_149850C.1
ccaggcacaaaacttggtcatggacccttcactcatacgaactctaaaaggagggccccccccctggggggggggggggggaccccggctgggggtgaaaaaacgcgcgggttggggggcggccacggtggcggttgggaaaggggcccgggcttgggccgcctgggctgtgtggaaccgcaacacctgggggtgtgtgaacaggggacaagggctcaccccagctatcggggtgaacggtgggaaatggtgctgcggtcacaaagccggaaagcatacggcccccaagcgtttgaaggaaaaaaatgggtgggggttggcaccacgaacccgccttaatggcgttgggctcactgcccactaaaaagccgagttaaccggccctgcctggtggattgagaaaacctcctacgcgcggggagaggcagcatggttttttgggccatcttgcggttcct

SEQ ID NO: 54662 - DNA, 437 bp, Zea mays
  Clone ID: MRT4577_149851C.1
aacggtaaaccatatttatttaggttcaacagtaattagatattacaccaaaagttaatactaactattcaaacttattaccaacatcattcgagtgtgaatcattatcgttaccattatatttcgtaaaccaaacagcacctctagattacatccagctatactattacaaaactgacaaagtaacagatccatcactccaccacaaaatcacaactagagagagacaggcctgttcgtttggttttaatccgtaccagtccgaagcgaacaactctgctttaattcaatttttcaattagttcgttgactttgtcgccccggttgcctgagtcgccaccatccctgtacggtttcctcttcatctgcagcctcctctccggacacttgagcaaaaaagcatgaggaacctcgctcgagccgaattccgagcttac

SEQ ID NO: 54663 - DNA, 382 bp, Zea mays
  Clone ID: MRT4577_149852C.1
aggacgcgtgggcggacgcgtggctatatctggctcagggcatcctccagcgtgacccgtgctaggttctcgaccagagatgaatgggccagctggttaagcttgctacagacaggggctagcaaagctaggcctaacttgaacgtggacattggtggagaacatggtggagagcctcaatcggtagctttattcgccaagactgggctggattacgttgctcgctcccttatcagggtcccgatcgctatgctagctgcatatcatgtgccagtctgagggtgcctctgttaggtcgcagccggatcacctgctggtgctacatgtgatgaatcatgatactactatgacagagccatgctactgtgagagcatcagtagc

SEQ ID NO: 54664 - DNA, 447 bp, Zea mays
  unsure (1)..(447): unsure at all n locations
  Clone ID: MRT4577_149853C.1
cccccgaggccggccgggaaccncancngcncnccnnnngcncggagggcacacacgggccggncnccgancnccgancccgganccccgcgccganccaagaagcaganncccggcaagacccgcaccggaaagaccancacccgcgagggggagcccncngacaccanggacaacggcaaggccaagacccaggacaaggggggggggcccccggaccagcagcggggcagccgcgccggcaagcagcgcgaggacgggcgcacacgggccgaccacaacacccagaaggagagcaccccccaccnngaacgccgccacaggggaggcaggcagancccgcggaagaccccgacgggaaagaccaccacccgggaggggcagacgacggacaccaccgacagcggcccggccaaggnccagggcaaggagggcaagcccccgggc

SEQ ID NO: 54665 - DNA, 385 bp, Zea mays
  Clone ID: MRT4577_149854C.1
cggacgcgtgggaagcatttcacggtttggtgcaaagctggacagtcaacaacatagcggcatgccggcatcacgattcaaccaacagaattgcagctcagcttgataaggcatgaacataaaagcattgaaggccagaaaagtgtatgtgatgaaggattgaagtttttggaaacgtagcagcatcaggatcttggagattatattatagtaggcgtacctacatttatacgaacaaaaaacgctggtcttaaaggccagaaaagcaagctaatgagcgctacagaaaatatgtgttattttgaactgcaatgttcagtctttatggaggtaaaccaaaagtactggttttgaaggggctgcagaagcatgttaagagcactac

SEQ ID NO: 54666 - DNA, 584 bp, Zea mays
  Clone ID: MRT4577_149855C.1
agcgccatgagcgtcctttctcatcactgcgcgactccttcgcaagaccctgtctgcgcgtctcctatgattccaaggcctgtaacgcaactgcctaaaaactgctaatcaacccttgaattcatctactaatccaactatccccttttcttcgatcgccgcgatcgagagctttgattctcccgggtcgagcaggtaggcttgcaggagagccagatgagacaccatgaccacaaggaggaaataagagggtaaccgcctccgacaccgccacactgaatttatcactgaagatggtaaggaagggaacatctgtggatgcccacagatcgaaaacatcacatcactaggtgatgccgagatcccctaggttaaattcgcggatgtggtacggtgctagaaaacatgcggagccgcttagtacccagtcttctacgtgaagacaaccgcagctgaacaatcgtccatgatgaactgtatgaaaacaggataaaaggttacatatcagatgcttctagaagcatgaaaagattcaaagatgctgccaactgcttagagcggaatccggtatggacaaaaattgt

SEQ ID NO: 54667 - DNA, 215 bp, Zea mays
  Clone ID: MRT4577_149856C.1
gtccgtctgtctccactctacagatgtgtcgcttcgtctctctcctctatgttgcgaccccctatcgtgtgtgattctatcaattattctacggttagctcgtctcgcttcgcgatggtcaagggctacctcgtcgtgcctcagggatctgccgtcgcaacagttacgaaggtcaagtggttggtggtcaagcactggagcgccgtatctctctg

SEQ ID NO: 54668 - DNA, 668 bp, Zea mays
  unsure (1)..(668): unsure at all n locations
  Clone ID: MRT4577_149857C.1
cctcgagggccggcacggacaccggcatcgatgttcccgccggacaccaccgcgcacttgcggcggccggcaacgcggcggcctgcggccagcgccaacgcaccggcgccctcggcgatgatgtgttcttccagtgccagccgcaccagggtttcgcgcagctcggcttcgcgcacgatcaccacgtcgtccagcagcgaggtgcacaggcggcgggtcaggaagccgggaatcttcacccgcacgccgtcggccagcgaggcaacgggagcgatctcgcgtacgtcaccgcggatcgcacgtgccatcgaatcaacgccttccacctgcgcgccgaccacgcgcacgccctgtgatttcagtgccagtgcaacgccggaggccaggccaccgccgccgatcggcacgatcaccacgtccggcgcgtgcgcggccagctcgatgccgaccgtgccctggccggcaatcacatcggcatcgtcgaacgcggacaggaaacggtagccgtggcgctgcgccagttcgaccgcgaaggcgtaggcctcatcgtaactgttgccatgctggcgcacggtggcgccccagtgagcgacgccggcgatcttggtggtcggtgcgccgtgctgnttttttttngtttncgtnttttttcttttttttttgttttt

SEQ ID NO: 54669 - DNA, 306 bp, Zea mays
  Clone ID: MRT4577_149858C.1
cagcagagacaggaaggatggaacagggacacacacacacacacaccaatggtcggctagcatacactctgagtccataaggatgaccactaacggctcgcacgcatgctggctagcttgaagagagccatgcgacccaaagctagcacgcgtatgccaggtgtaccaagacgatatttgcgagggctctgctagctttgtgcgtggccgtataaagcagccaggacaggaacatcaataccactagctccgtaaacaagtactacgcggcggtgcacgccgacaaattgcggccattggaccgtc

SEQ ID NO: 54670 - DNA, 656 bp, Zea mays
  Clone ID: MRT4577_149859C.1
caacaatctcctgcttccaagcactaacaaatcaaccactaacaagtcaaagcaatcctggaactgactaataaactgaccaaaactccaaaccaactgaaacggaagaccttgccacttgtcaagcagctgttgccggcttgctgcagtctcaggcgtgttactgctgtgctcatgccatgcctgcactgctcttcttggagagcctgctgcagtgcttgctctgcataacagcagggactaaagggtatgttttacctatttgacttatcattgtgtgatcgtcttagttgatatcagattttgggaatattttcctgaccacctgtggaccattgctcagctcctgttgttagccaatctgttctcctgaatattgtttgagttatggctgtaaattacctatataatttgttattacacttgctactcagttgaatctactagtttataatgctgtgataatcaaccaacctgcctttgttgcatagtgccatagttgtagtggcttcctaacttttcactgttatatttgaattaagagcatcaattgttgcaaatgattttttccctgcatacataaccaattaactacttttttattcaggtccacatatgctaaatctatacgtgactcaaagcctgcccgagagagg

SEQ ID NO: 54671 - DNA, 295 bp, Zea mays
  Clone ID: MRT4577_14985C.1
attcggctcgagcctcatacctgctgtcttctgtgccgctccgctccgggggcatctgcctttgcacctccatgcctcgatctgtatcttctcacggcggatgacgcactacaacggatgcttcacccgcggaccttatcgacaccctccaaggtcgctaaccgttctatttgatggctggtcccaacatgcttgaatctgaagaccacgtcctgaagatggccaaacacatcatagcagttactaccaaacttggagttccactcctgttcaagtccacatttgataaatcaaa

SEQ ID NO: 54672 - DNA, 505 bp, Zea mays
  Clone ID: MRT4577_149860C.1
ggggatatatttattaaaacaatccgttcaatttggatatacaagacctggcccataaaaaacaaagtttacttttgcggggcggtttcgttttcatccataaactgcccagggcgaagcaacatatatgccatggccaggggcctcatctgccatatgtagaacctatcatccgaaaatggtttttgtattctctccaggagttcaatattcactatgcccccaatgcaaagggtcaagcgttgaagcttgaaggtttaaaaaaagttcctgggggggttgcaatcgttgcagaaaaaatccttgcgctaaagcagggacctcggccaacctttttttgggaagaaaaaagcacgggactgctaatgctgtaggctattgaagtaggcgatgaaaaaaatgatacccgttgttgttgcccccggaggtcctgaggatgcaaccatccattgcccgggggcatcaactccccgtttatggctcgggttcggcctcgggccgaatt

SEQ ID NO: 54673 - DNA, 712 bp, Zea mays
  unsure (1)..(712): unsure at all n locations
  Clone ID: MRT4577_149861C.1
tgttttcgttgacgtcgatgacacatccctactgatcagagccaagtctgacgggacactgaggactttgatgaacgtccaaacactgtttgataggattaagtcttccgagaccatatggttcatcgatgaggaccagttggtggtgaatctgaagaaagtagagcaagagttgaaatggcctgatgtagatgaatcctgggaatccctcacatctgggatcacccagctactgacagggatcagcgtgcacatcgttggtggtcacacgcgtcggatgggacccggagtacacgcgggctgttgcgcagggctgcctcgtcgcactcaagcagctcaccttagcagacaagaagctagcagggaagaagagcctctacatcaggcttggttgcagaggcgattggcccaacatcgagcctccaggctgggaccctgaatccgacgccccaccgaccaatatctgaaacaatcctccgcccagttgtattctaggagaattctctgcatcaccattccggactagttttttcagtgtaataaataagagaggaacttgtcatcaaaaaaaaaaaaaaaaaaaaaaaaaaaaaaaaaaaaaaaaaaaaaaaaaaaaataaaaataaaaaaaaaaaaaaatntaataatataaaataaaaaaaaataaattnagggggggggcccttttaagggaacaagtgttacccccggg

SEQ ID NO: 54674 - DNA, 271 bp, Zea mays
  Clone ID: MRT4577_149862C.1
gcaccatgttggaataatttaggggacggtgctgtcccacccggatgagttcgtgaccgaacgactggtttgactatggccctacagggccatggctcttccaaggaggacacgatgacgaacgatgaactgatggctcgcactggaaggctgagggagcaagctgaacacggagatgtacagccatgactgcggactgaaagaaggagctggctcatcccagtggttgagctgctatatgagcttgatgacacaaggcctaattttgtcg

SEQ ID NO: 54675 - DNA, 1512 bp, Zea mays
  Clone ID: MRT4577_149863C.1
caaaaaaaaaaacactgcggaggtcgcgggcgggccgggaacttgttcagggagttccactccactctcccataatgaggataggggcaggggcgaacatggctgcgtgctcctccgttccctgctccttccccgcgaagcctgaccctcaccgccgaagccccagcggcatcttaagctctcatctccctcggctccctgctacccagtttcgtcggcttcgatcactctctgccgccgcctcgccgccggcgagtcgcctccgcccacgagcctccgtgtccacgtcgcccgccccgtctaaggactacgagttcactgacgggaacggagaggtggagctgagactggacatccaaaagctcggcatagcgagttcaaaagatgttttcgttgatgtcgatgacacatccctactcatcagagccaagtctgacgggacactgaggactttgatgaacgtccaaacactgtttgataggattaagtcttccgagaccatatggttcatcgatgaggaccagttggtggtgaatctgaagaaagtagagcaagagttgaaatggcctgatgtagatgaatcctgggaatccctcacttctgggatcacccagctactgacagggatcagtgtgcacatcgttggtgattccacgcacattaatgaggcagttgctaaagagatagccgagggcatcgggtaccttccggtttgcactagtgagctgctagagagcgccactgagaagtcgattgatacatgggtggcttctgaaggagtggactcggtagctgaagcagaatctgttgtcctggaaagccttagcagccatgtccgcactgtagttgcaactctggggggcaagcaaggagcagctagcagattcgacaagtggcagtaccttcactctgggttcacggtttggctatcggtgtccgacgcaagtgacgaggctagtgcgagagaggaagcccgaaggagcgtgagcagtggaagcgtttcttacgcgaaggcggacgtggtggtgaagctcggcggatgggacccggagtacacgcgggctgttgcgcagggctgcctcgtcgcactcaagcagctcaccttagcagacaagaagctagcagggaagaagagcctctacatcaggcttggttgcagaggcgattggcccaacatcgagcctccaggctgggaccctgaatccgacgccccaccgaccaatatctgaaacaatcctccgcccagttgtattctaggagaattctctgcatcaccattccggactagttttttcagtgtaataaataagagaggaacttgtcatctgtctgttgatgcataaaatgaactcgactaacgtttagtggggtaccacgggtgcagaataaacacacgactggcagcgagagccaaactcaaaaacattgtatacatcatatattattctatatgacccacattaatttccccactaatataaatgcattatattagaaatttatttatctctg

SEQ ID NO: 54676 - DNA, 343 bp, Zea mays
  Clone ID: MRT4577_149864C.1
gggagggtgacatacacttagcaatatgttatcataaatatcattcggcgacaacaaaatagcaaaatcttgggggtacaagaccaacattggtactggtacacgtttagcataaccaccatcggtggttctctttgcagacattacaagaacaacattttgaagacaatgcattcgtacataggggcttgcatgtttattgcggggagccaattgctccttaacatggatccgtttgttcacttgtaggagggtgtattcgtaaccaactgttcggccccgggaaaacaaatggaatggcattgtgggaacaaaggaccatgaccagtttaacgggctcaaa

SEQ ID NO: 54677 - DNA, 289 bp, Zea mays
  Clone ID: MRT4577_149865C.1
acggcttcctcttactgacgtggatcgatctgattgatcacggcaacaaaagcgaggcgcacgacactctattcttgaggtgtacaccactgcccccacaaggaacatgcacacagacctactaaggaccaggagcaatctgatcggacgtacaataggactccctacacatatctgaagacagaacccaccacaggggatgtgctgatctccaatggtgggactgagggccagactcctgctgatagaattggacctgcacttgaccatcgcgaactcccatttgcat

SEQ ID NO: 54678 - DNA, 312 bp, Zea mays
  Clone ID: MRT4577_149866C.1
tatcctgaagccaaaggaaatgagatcggaattgctctgggaatttcaaaccctgatttttaccaaataccggggcgaatatgtccatatatgaagcgggattatttgtcatcttataaggtctatgcatatcacaaaggaaaagggatcggattcctcgggaatgtcaactccacatcttcaagaaatacggacgctgaaacgtacatatatgaaatggaattatgtgcaaccttattaggcctatcctgtagccactggaaatgagatctgaatacatcagtggtacagagctcgaattccgtatagcga

SEQ ID NO: 54679 - DNA, 487 bp, Zea mays
  Clone ID: MRT4577_149867C.1
ggaactttgggctgatttatgtgcttgaaacctcgctgtcttaacctggatgaggagcacgttgcggactttctcgactaggccttttgggtggaactctaaagttttactcttacttgtgttagtggtgctgtaatttgtagattagtatgtgatttctacgccttggccaggaggcttagtcctatcttccttcaagtgtaaattttcgatcgaagaagagaccgaggtcaccacgtcggggggtcttacccgacactattctacacgaaccggaaacctcaggaatactaacaagaccgcacatttgaatccaccgttcccgattctcgaaagagcgccaccgaagttacgctgacacggaagcgcgcgccccccccaacctagctcggaagccggtcgccgagatacttacccttagcatcttgtatacgcaatcgagtaaattgcgaatatacccagccttccgtagaagcgccgagtacga

SEQ ID NO: 54680 - DNA, 701 bp, Zea mays
  Clone ID: MRT4577_149868C.1
gctcgggtgcaagtgattcgtggtaccccgtgctctctcgcagccgtcttgcatttcctgactgactggttttggtaggagacacagaggtaaggtcaggaggaggacttggaggagctttaccattccaagtttccctctgtaaataggaagctcacatcgccttccgtatccctgcctcgtctcgtccggagatctggtagtaggtagtctttgtctgtaacgctgtgtcggcacctcgaggacgaagatccaggggagcggggtgtttgtgtttcttctccgtccagccatatggtatggatcctagtgggcggcggtgcttcttcttctcttctgtcgtagccaaaactaatcatctgaggctagtgaggaagaagggtttcctcgcaggcaattgagttctgtcgtcgtgtacgtggagtctgattagcagcagtccagtatgcttggttggcgagtcaaactaactttttttaggggggagggcgcaaattatgtagtgacctgcctgtgggtggtcctggccgcggggtggtccgtccggtcaggctgtgtaccctttttccttcacatctctctttatttattagtacgatgagatggtgtggttatgttctacacaagttttatgtaagccaaaacttgtatgcaatatcatggtttgagtttgctttttttcctctccaaaaaaaaaaaaa

SEQ ID NO: 54681 - DNA, 136 bp, Zea mays
  Clone ID: MRT4577_149869C.1
ggcaccagccaccaggcggcgactactatgtaacacgtgagcactgtagcagctaccgcaacgcaccggacgtgtagttttcgcgacgcgtgcagctatcggccacggcaacgaaaataggagatgttttattcgg

SEQ ID NO: 54682 - DNA, 1200 bp, Zea mays
  Clone ID: MRT4577_14986C.1
atgtggtgcaccttttttgacgcggtcatcatggcggaggtgaaacgtcgcccgcttcgcctgccaaagggttgcctcgagtcgcggcaccggttccgcagtcgagaaggcgcggtattggcgcaagtggcggtgcaatttttcacacgtagtaaccgacacgccggttacatggcgtgtgggcctaggcccccatgctggatgcgtcgaagtcgaaggggtgcgtccccgtggtgcagttgcacgccgcctgcatggcggtccgccctttcgcccgctggtttcggcgaagatggagggtgcagcattctatcttctgtctggttgcaccggagggtctcacaacacgtcgtacgccgcgagggcggtactcgtgttctgggacggtcccgttctagttttcgtggcgaggacgggagtgaggacctgccggtgcgctttggggcggccggcgctcgctggtgcggtgttggtgggcaggtggacgccatcgtcgatgctgaggtggtggcagccggagaaggtttctccgttgacgagatcgtcggcgtcacctgcgctccaggcctctggctctttggctttaatggctggttctcgtcccccgcgaggggacacaaacgagagccttccagtggtagcgttcgccctgggccatcgctgctgctgcagaggtcaccggcgagccacccggagtttgtcgtcccgcaggccctccgatgtgggggttgttcgtacccgcaggagtggaaccggagttccgtttgtaatggcaccttgagtgccggtgtgacgagtgaggtatccgtatcccgaaggcgtaggagtccctcggctcggtcggccttgccactcaaggcttctcttgctcagttaaggaaccctcgactgctctgcgatgagccagagccagaggcagcggtgtcagcatggatagaggcggagtcggctcgaaaaggggcttcgtcggcccaggagcaggtgacttcccaggccgaggaggcgcaacagcagcggctggagcctggccgggtcatccgtgagcgggaccaacttcggagtcccgcttccgagaccgtgagccaggctgatgtcctcgggggacatctggctgaggctacggagcggccagccgagccgtctgctcgggccgggtttctggaggagaccctggcggcgatggcccaggcgcggtgctga

SEQ ID NO: 54683 - DNA, 427 bp, Zea mays
  Clone ID: MRT4577_149870C.1
gaatcttccctatctatgcataccataagttttaaaacatggggaactgaaatgtccaaccacctgcatactcatgctcgacctgaacatcaaatggcttcaactgtcttaagtgaaaagagccttccgtttatgtacagctataaacccacctcaccaagggctcttacggacatgcaccttaacttatctcttgggcggtttggcgccataaaattaccaacgaaataattggtcttgataacacatgcgccagagggagctgttttgaaacatagtttatattaatatgctcactagatgctgcgggtgggcttataagtggatccacccttgaaaacggcggggagcacgtcgtccgcgatacgcttggcaccagacttgactgctatatctgggccagtctattcttgagcctgccttggtg

SEQ ID NO: 54684 - DNA, 547 bp, Zea mays
  Clone ID: MRT4577_149871C.1
cacccgtgccagaaaaaaaaaaaaaaaaaaaaaaaaaaaaaaaaaaaaaaaaaatttaatttaaaaaaaaaaaaaaaaaaaacaaaagaaagagttaaaaaaaggtcggcccctttaaataatccaaccttcctttcccttgcttgcacacacttaactttttttttgggtcccctaacatcatttacctggccgcacccttacaacttcctaactggaaaaaccctgccgttcccccccttattccccttgcataaaatccccctttccccacctcgctttttattcaaaaggccccccccgatcgcctttccaaacatttgccccccctaaatggcaattagtccccccccttttgcggggcattaaccccggcgctttttttgtttccccccccctagaccccttcactttccaaagccttaatgccccttcttttagatttcttccctttcttttttgccccgttagccggtttttccctttaagctttaaatttggggctccctttgggttccccctaaatgcttttcgggacctcgccccc

SEQ ID NO: 54685 - DNA, 836 bp, Zea mays
  unsure (1)..(836): unsure at all n locations
  Clone ID: MRT4577_149872C.1
ctcgaagccggccggggtccgttcccctacctaccaattctttctgtgtagtgcctttggtctagatctatggctttctcggcaagaacgatttcaagggagatggaggtgcaaatggggaaggccccaccatgtttgaatcccttcctaatggtaaaccctcttttgccccctcagcatgtctctccctggtcatccaagtttgtaccagttttccaatttggcatgaccaatggtcatggagctttagatctatgtgaagaaagcaaaagggccaggaaggttgttcacttggagtacttgttcagcaaggttttaactccaagcgatgttggtaaactaaatcgtctactgataccaaggcaatgtgcagaggggttctttcctatgatttcagaggtaaagagtggtggagatgacattttcctcaattttgaggacacctccacagggttagtctggcgcttccgcttttgcctctggaataatagcaagacctatgtcctgaccaagggttggtctgtctttatcaaggagaagaatctcaagaaaggtgatattttatccttttatcgtgatgccagtaagtcgataaggacaaaccacatatttattcatatcaagccccataccggtaccatgcctctgccacatcatgtgccaagtccggtcttctctccatctggcatggtaattgatgatcaggtccacaatagccttgacatcggtaaaagccatggaattgctccattctggaagcctttgtcctttggatctngggagttaagccctcaactaatccgacgccacaacaaacaaatttcctgaatcgacgt

SEQ ID NO: 54686 - DNA, 296 bp, Zea mays
  Clone ID: MRT4577_149873C.1
gggggggaacctttaggaaaacaattgaaaaataaaccggtttttgcagggccaggggtcaagggaaactttctaaaaccaaaaaaaaggggcctggggaattgtacatttaaaaacgtcctccgattccaaaacaccaaaaagggggggatactagcggcccggccaacctttttttatgcctgacacaaaaaaaaatcgggggggtggcctggaaaaacaaactggaataaaaaacgggaaaccagtttttttcctttttttttccggaattcaaaccatgggggggggggggg

SEQ ID NO: 54687 - DNA, 1295 bp, Zea mays
  Clone ID: MRT4577_149874C.1
aattcggcacgaggcacgggcggcacgccactgtgtgcggcacgcagcctcggccctgagcacaaagtaccatatgcacacaggatcacctccagttctctgcccaatgaaggtgctatatctgttcaggaatcaggacgtcgctagcaacaagttgtcaactacccaaatctgcacgaggtcaataggagtagctcaaatcggctaacaagtaataatcctctcgatacccgaatcggtgaaggaaaacaagacgagtccgtcggtcgtgatcggtaccaatggaaggcgcagcggggatcaggacgaggccggcggtgtgcgtgaccggcgcgggcggcttcgtggcctcgtggctcgtcgagcgcctcctcgccggcggccgatacatggtccatggcaccgtccgtgatccgggcgacgccaagaacgcgcacctggcggcgatggacggcgccgcggaccggctgcgcctgttcagggccgaattgctcgactacggcagcgtggcggcggccatcgccggctgcgacggcgtcttccacgtcgcgtccccagtccccatgacctatccaatcggtgaccccgaggtagagctgctcgctccggccgtgacgggcaccaagaacgtcctgaaggcgtgctcggaggccaaggtgaagagggtcgtcgtggtgtcgtcggtggccgccgtgatggtgaaccctgcctggccccagaacgaggccatggacgaggcttgttggtccgaagtcgaattctgcagaaccactcagctcaggtactgtctcgacgtccgcgtcgccgccgaggaatcggctgctggtgtacgaggcgtgggaggggtctggacggtacatgtgcgacgcaaatgcaaggcagatgtctgaggtcgtagcgctgctcaaggactggtaccctgcctacagtcatgctgccaccaagttcgtgcaggtgagcgatgagcctttgttcagctccaagaagctgcaggcgctgggctggaaattccggactctggaggagagcctcagggacagcgttgaatccttcaaggcggcaggtgtcctggtggattgaacagaacaggcagcgccctattcctggatgaccttcgcattttgtaaaccgaagttgctgtcttgtgcaagagcatcccgacgtcctcggataatgtaataaaaaaagcaaaagcgacaaagtttgccgtgtattatagcggcattgttacttaacgctgttttattttgtggaaatacttaacggtgttttagtttaaaaaaaaaattggagct

SEQ ID NO: 54688 - DNA, 391 bp, Zea mays
  Clone ID: MRT4577_149875C.1
gagagaaacatctagagtgaataagaaagatggggttcgtccgtgccctgttcctgctggcgatggtgtgcgtggcggcgcacgcgaaggactaccccaaggaggagggcgcgaaggcggaggggccggccgccgcctcggggggcggcggcggtagcacccacgacgtggtgaagctgggcggcaagggcgacggcgagacggacagcaccaaggcggtcaacgaggcgtggacggcggcgtgcgctgtcgccggcgagcagacgatcgtggtccccaagggcgacttcttgacgggtgcgctcggcttcgccgggccgtgggggggcgacgtcggggtccagctgcgcgggtacctggtggggtgcgcccgcctcgccttattcttggt

SEQ ID NO: 54689 - DNA, 1341 bp, Zea mays
  Clone ID: MRT4577_149876C.1
gaccggcgcgggcggcttcgtggcctcgtggctcgtcgaacgcctcctcgccggcggccgatacaggtccaggcaccgtccgtgatccgggcgacgccaagaacgcgcacctggcggcgatggacggcgccgcggaccggctgcgcctgttcagggccgaattgctcgactacggcagcgtggcggcggccatcgccggctgcgacggcgtcttccacgtcgcgtccccagtccccatgacctatccaatcggtgaccccgaggcaccacacctcagctcccgctgctgccctcttaatttcttccttcggcttcgccatgcgtccgttcagacgttcagtctttattggccgacaccaacatcttgctgcaggtagagctgctcgctccggccgtgacgggcaccaaaaaacgtcctgaagcgtgctcggaggccaaggtgaagaggtcgtcgtggtgtcgtcggtggccgccgtgatggtgaaccctgcctggccccagaacgaggccatggacgaggcttgttggtccgacgtcgaattctgcagaaccactcaggtcaggtgacagaaaaaaaaagcttggcacggcaccctgttgagcctgttcctctcatccccgccctcacctttctgtctcctcccgtcgctcctctgccagaactggtactgtctctccaagacactcgcggagctggaagcgcttgattacgcaaagaggagtggactagacgtggtgtccgtctgcccgtcgctggtgatcgggcccttgctgcagtcgacggtgaacgcaagcagctccgtcatagtcgattgcttgaaaggagatcgtgaggtgaagctgaagctgaggaacttcgtggacgtccgcgacgtcgccgacgctctgctcctggtgtacgagactccgggggcgtctggacggtacatctgcgacgcaaatgcaaggcagatgtctgaggtcgtagcgctgctcaaggactggtaccctgcctacagtcatgctgccaccaagttcgtgcaggtgagcgatgagcctttgttcagctccaagaagctgcaggcgctgggctggaaattccggactctggaggagagcctcagggacagcgttgaatccttcaaggcggcaggtgtcctggtggattgaacagaacaggcagcgccctattcctggatgaccttcgcattttgtaaaccgaagttgctgtcttgtgcaagagcatcccgacgtcctcggataatgtaataaaaaaagcaaaagcgacaaagtttgccgtgtattatagcggcattgttaaaaaaaaaaaaaaaaaaaaaaaaaactagttctagatcgcga

SEQ ID NO: 54690 - DNA, 432 bp, Zea mays
  Clone ID: MRT4577_149877C.1
acgggcctccccatatttcattggtaaagaccaaaatactggaaattcgacaattacaaaaaacgatcgccacagggaaagccacgttcctttccaatctccacagaccattgaccctccaattcgggaagggtcaacaactcagttgaaaactacattcctctccagggaacattggtttcacccctcagttcaaaaggggaacacaaaccctgtatcaaaactaaaaccccagcctgtaggaaaaagcttgcagggatacacacaccccccaatccactccaaaactattggaacttaaaactacaacagggcattatatttgccccccagtagggacgagtttggcaccacatcaaaaggttcttgcccactggcaagcacgttgtactgatattacaaaagctttgatcttgtgacatctttttgctt

SEQ ID NO: 54691 - DNA, 261 bp, Zea mays
  unsure (1)..(261): unsure at all n locations
  Clone ID: MRT4577_149878C.1
ccgggcggtcctttttagtttataccccggnccccaacgttggcgtgatgctgctggcatgtagcccaacgctcccccctcggcttcaccggcggcggcggcaacgaccgtgaaaactacatcgggtgctagcttcgacggtggtgcgtgccctgttgacaatagggcgcgcggggcgcgggcagctcgtatgcgttccatcgggcatgtaggggaactatacatctttgggaggtctccatcatccttcgtgggagagaa

SEQ ID NO: 54692 - DNA, 247 bp, Zea mays
  Clone ID: MRT4577_149879C.1
cgaaatgtaattccaaacaacgtataaccaaattacctacaaccactatacccaaagcaactcctaaaaggacctttcctttaaaaaacacacacccttttcatacacttatctttattttaaaaaatttaaaatttaaaacactccttatccttccccaaaaatagttcccttctttcttaacttttcaaattcttacctccctcttatctacactaaactctttttttaccacccaataattcat

SEQ ID NO: 54693 - DNA, 183 bp, Zea mays
  Clone ID: MRT4577_14987C.1
aagtatctactatccgaatgccaaaaaaatttctactacctgtggtccctaagtatctactatccgaatgccaaaaaaatttctactacctgtggtccctcttacctcttgaaatggtctcgtaccttctcccattaagtatacgaaaccatttggcatgcgttttctgccgaaatatggtct

SEQ ID NO: 54694 - DNA, 218 bp, Zea mays
  Clone ID: MRT4577_149880C.1
acaagctccaattagggtgccttcaaaggccagtcacgctgacccaggttccacaaaactttcagtcacctgactttttcatttagcagggtccacccccaactgtacagcggctatatgatccggcatcaagaccatccccgcacttttggattgtgtccctaatgtcctgtaacgcctgggcactttctgaaagccatgccttccaggatacaaca

SEQ ID NO: 54695 - DNA, 680 bp, Zea mays
  unsure (1)..(680): unsure at all n locations
  Clone ID: MRT4577_149881C.1
cggccgggnaaacatcacttattagaggaccaacctagccaacataataaagcagagtagtgcaccaacaacggcagacaaacaatggcgactacttatgctccttggcctatgcttgcaagggctgctacggagaccatgttaccgcaatgctcgcaagctactatagatagccttctataccccgtacctcttaccagagacgtttcatgaatgtgaaaacccaattcttacaaccctacatgatccaacatacaatcacaaacaggatattaccttaatcaccatacgctctatccaacattgatgagccatcataacatcagccacatttggggcacagatagggacacaacataagggcacacaaactacaacaactcgtgctataaaacctagctgcctactctcagcaacagaactttcttccatctaaccaactaacctgcattcgaacctatgcaaccatattggcaacaacaacaactaccattcatccagatacctgctgactaccatcagcacagttttccattgaaccaactgacaaaaatcaactctcctgcttatacacagcagccacaactactaccattgattaagctagctggcgagagcactgctacctacttgatacaaccacagtagaccgcgctctaccattacgctgcgcctaacgc

SEQ ID NO: 54696 - DNA, 392 bp, Zea mays
  Clone ID: MRT4577_149882C.1
aacaaaaaacaaaatttgattgacctccaaatcacaacacaatcatgtccatccattcagcacggcaggtgatgatgtacatgcatggttcacaaacagatgaactgcttgccaaaggtgttgtattgaagctgggtggaagaaactcctgaccaagtgcacacgctcagagaattagcagcaagggcggatccacaggcattattattattactactactctaagtgcatcgtttatcatcatctcgcgcgtcatataaataaatatttggtattagtatagtagtaggaatagaaacaggcgaatcagcaaagcagtggagatgagtcatggacgggacatgtagatatactatacaagcacgaggacgcgctccgtgccaccgaggaca

SEQ ID NO: 54697 - DNA, 262 bp, Zea mays
  Clone ID: MRT4577_149883C.1
cactcggaaaaaaaaaactcatatagagctgattcccaaccagcacataaaccacccgctgtgcgaattacaccacctcagtgcgaaatttagtacagtccaaatcccagtaaatggacaaaatgttctcattgcaccgaagccgtgacgcagggtcttctagttctactcaagtatgcaaccaattggatgaccgttccaaaatgctctagaagaaaacaagccatgttataaggccaagacttgggatttggggtcgatt

SEQ ID NO: 54698 - DNA, 596 bp, Zea mays
  Clone ID: MRT4577_149884C.1
ccgcccgcgcgatgggcttatattcctatatgactactagctagaaattaagagcgctaatactatattaattgtgtaccatattcatcatttgctcgttcgaggagaaatttaaagtcttactagtgtcactactgatattttatttattctaaaatattaagaataatagtaaaagtgtgtcttgtagaacacattataatatctatttttagatgcgtgttattagagtggtctaccgtgtgttgttattgccgttaaatcctgaccatattgaatcctaaagctaaaaaggtcgaacatcagcgatggagtggaagagcaacgacatcccctccggcgttgttagccccgtgacgtcggaaggtgcaagggagtcttcgacgtcgagcaagaagatgagcagcgaggagcaacaacaagagagcgaaggccgtcatcgcacggaaggcatgccaacgttcgtttgaatgggctcaagtgggccgtgtaatacttaagtgggccgctgggtcccgatgctgatataggtcagtctgtgagaacattaaggccatcgaataacaaaatagcaaatccatttttgccgctaaaaa

SEQ ID NO: 54699 - DNA, 339 bp, Zea mays
  Clone ID: MRT4577_149885C.1
gcgctgcaggctgagcgtaatgtgctcggagcgctgaacgcccagctggcggaggagcggaacgccgtggctatcccaaccaaccagcccattgaaatgatcaacccggtgccgtaagagatggcaaacacacacatggatgtgctgtacaacgaccgctacctgggacaacccgtggggcgccgccagcatgtgattcacctgttcgactagctggtgagaatgtgaacacgggaaattcaccggctgcaaactgcgctaccgcaccgatccgggcctgtgcaaccctaccacctcctcgcgtaccggactgccccacgctatccctgcagtcggtag

SEQ ID NO: 54700 - DNA, 560 bp, Zea mays
  Clone ID: MRT4577_149886C.1
aaaaaaaaaaaaaaaaaaaaaaaaaaaaaaaaaaaaaaaaaaaaaaaaaaaaaaaaaaaaaaaaaaaaaaaaataaaaaaaaaaaaaaaaaaaaaaaaaaggtttttccttgggccggaacccccctagggggaatttttggagttttccatccccctggggggggggtggagcttgcttttagggggcccatttcgcccttttgggggtggttttaaaattgacgggccgccgtttaacaacgttgtgactggaaaaaccttggggttccccaatttaatggctttggggaacatccccttttccccacttggggtaatagggaaaaggcccgaacggaccccctttccaaacatttgaaaagcctgaagggggaagggcccccccctgtagcggccctttaaggggggggggggggggggttccccccaggggaaccgttacatttgctagtgccctagcccccgtttttttcgtttttttcctttcttttttggccacgttggggggttttccccgtaaggttttaaaacgggggccccctttagggtcccaattta

SEQ ID NO: 54701 - DNA, 2565 bp, Zea mays
  Clone ID: MRT4577_149887C.1
aattcggcacgaggctcctcccaaccctagccggctagcctcaccttccccttccccttcacacctctgattcctcgcgccttcgtcccccgctcaatttccagaagcttctagaaccgggtttctagccctaatcccgcaaaaagatgctttcttgcgcctagtagcctgggacggaggcatggacagcggcggcggggagggaggctcgactggcgggaggttccctattctgcaggcgaatagggaccccgagtcaaattgggaggtggacgttgccaaaagcctcgagcagtacctgctcaagatctgttcaggggaggtctccggcgaggacgagtcccattctgtcaactttgccgaagcggcgttactactccaaggatcggttcaagtatacagtaggaaggtggagtacttgtactccttggtgcttcacgcgttagagttcctctcgcaaaagaaacaggaacaactggaaaatgtctcagctcaagctaatcaaaacaaccctagcattattcccagtgaagaagatgatatatttattgggctagatgatgtcccagtggaaacaagaatatctctggataacaatgtcgatcgagatgatttacaaagaaaaattgtgaggccaccagcaaacctactggtgtttgaaggggactgtctggatagtgaagcaagcgagctagattcatatttgttagcaacatgtgatttttatggagatttccttctgctggatccttgtgatgcaccagctgtttttgactttctgcaaggaaaacattctggtaaagaaaatagtgtggctcatcaaggcagtgcagcaccttctaaaagccaagccaatattttcacttccccgaatgcaagatcagtgggcacaggtcgtaaatcagcccctggaaaagtcctaggaggtctagatccaactcaggagaaccaatcttcaactcaagaaaccagtccagataacaaacattggtctgatcctgttgaacctagctttgctgatgatgttgaaatgcatcccccagatgatatagaggaccctgttggagattattctgatgacgaggatccatggaaacctttgaatccacatgaacctggcaatttaaagattcggccttacaggagagtgaaaggttctccacggggtgttattggcatttcgaaaaagaaaactctcaaatctctgtttcctattgcaaagatggttggtgtcgtcatacctgaacatgctaaatcttttgaagcacagcagtctcaggaggaacattatggttcccaatcaccccctcgttttgaaaagtttttgagatcatttgaattaggagaagaaaatcccaatgtgtttggagatttgaaagatgacaatgcatccaatactggcattaattttgattatgatgacccagacatgccaaacgacatagatattgatcttgatgttccaacatgtcctgatgagattattgctataactcccaaaggtacacaggatgacatagatacacatgaaaacctcgacgacttgtgtcggtcacatctgaatgctctccttgccagcattgctgaggttgaaaagcagagtgagatggacgctcgtgtttcaacatggaaagaaagaattgagattgccttggaagagcaggatagaaacccaccttttgatatcggttcatatggggagcaaatacttgacacactttcatcaagaactaacaatacaggaactgcatcttttagtgagattgttagcggcagaccaaagtttgagattgccagaacgttctctgcccttctccagctggtgaacggcagaagtgttgatctggataaaggaaaagccacgaatgagttggtgtgttacacagcagagaatccatttcatgtaaggcttattggtcccaaccggaggccagaaatggaggcacgctttgctcggaagagagtcaagtccccactgcaaaatgcaggcaaagacggtgagtcctccctggcacaacatgagtgccccaacaagccgttgcgtaaaaatggcaagattccagtcaagacagcgaccaggctgaccccagatgggaaacgaaggcgaaggtcatctgctcacctaatgcagccgatcaatctggaatccagcggatgaacgccagtgcacactgattcttctaattattgtaacttcagtggcggcttcataggcaggatgagcctgtaagttatgacataggcgtagctagcgggtgtatatgtacagttcaactgtaatgctgacagggcaagatttgttcaacggaattgcccttttatagcatttgccattgtttcatttttaatccaataagctaacacgatgccaagtctgttgttgtaaactggtgcctagctgtatcgatgttgccttccgcgatttgagattgttttgtacgtatttgtatcagctctcaagcctaatgctaacagggcaagatttgtctaccgacttgccgttttatacctaatgatattggtagattctttcctggttcaaaaaaaaaaaaaaaaaaaactcga

SEQ ID NO: 54702 - DNA, 349 bp, Zea mays
  Clone ID: MRT4577_149888C.1
ccggccgggacccatctccaacagacctgacgacgattgcgactacgacgtccaccatgaagcgccggcatggtccccatctcgctcatgctcgaggaccgcatcttggagaacaccatggactgcaaggtgagccgtctctagaccacatgacccctctagatgttcatggagaactgcgtgtagaaccgctcctgcgtacctcttctgaagtgaactggcgtcacctcccagaagacaaacatcctcatcctgagcagtaactatggttcctccatctcatgcctagacatgcttgaattgcgctgccaatgctggatgggtgagtacgctcacgacgggcggcgtc

SEQ ID NO: 54703 - DNA, 794 bp, Zea mays
  Clone ID: MRT4577_149889C.1
ccggccggggatggcatagccagcgaacggcagacggaatcgcgcctcccatcctctgctttccccaaaggccagctccaccgcggcggcgccgctcctataaaccgtcagttccctctaggcgcgctttccccgcggcagcctgagcagccagccatgccggggcggcgggcgatcgaggtccggcagctgctgccggccggcggtgacgccgcgacgccgaggtggcgcatgtcgctgctggagaacacgttcagcgggttcgtgcagggcgccggcgccgaagccgtgttcgcggatgggtccctgttcagcccgttcctgttcggcaagttctttgacccagccgacccgttcccgctgtgggagttcgagccggacgtgctgctcgccgcgctgcgccgcggcaacgccaggaccgccgtcgactgggccgagaccgactccgagtactacctcacagcctacgtgccaggtggaaggagatgcgacgtggaggtgagcggggacgcgatgaaggtggtcgacatcagcggcctctggcgggcgccgccggcggacggccgggactggcgcgcgggccggtggtgggagcacggcttcgtccggcgggtggagctgcctgaggacgcggacaggaagaaatggaaaacgacggcataatcttgctgattaaaaaaaattgcaagatacggagacacagagatggagcgaactagatagagatcgtcgcagcatgttgcatgcgtgcgtgtcactgaaaaacgatgtatgtgatatgttcttcagtgcca

SEQ ID NO: 54704 - DNA, 588 bp, Zea mays
  Clone ID: MRT4577_14988C.1
gcatcatggaccagaggctggcgggccactactccgtcaagggcgcgcgcgccgtggcgcagctggccgtgcagtgcaccgcgcagcagccgcgggacaggccgcgcatggtggctgtcgtcgacgcgctcgacaagctgcaggggctcaaggacatggccgtcaccgtcggcctctggcccgccaccgcgcccgtcgccgggcggaacgccatctccgccaagatccgcgcggaggtcaagggcgccgccggcgcagggtcgcgccggaggagcgcgtcctccaagctgccttagtaatcttgacggctggaccacctgcgtgccacgtcgtacatgtctcctagctagctcgtgtgtaccccgggtgtaggaatcgtcttgtgtgttttgtgccacgtcgtcggtgtgtgtatatagtacatactactgtaccgtctagtttaggcgcgttgagattggtgaggcagagagatgttcctccatgcactcactagtacgtacgatccatacctattgctcctggattcatgagatcgttaatagaggtgatgtaaacctttacaaaaaaaaaaaaaaaaaagcggcc

SEQ ID NO: 54705 - DNA, 514 bp, Zea mays
  Clone ID: MRT4577_149890C.1
tcactcggaacatagtgcaatttaaattagccattccacaatatctaaaaaagggcatctttctattgattgtctctaagtccatcgctgatagcagcacaggaaccagcaacaacagatgcaattgctatttctctgaaaacatcccctggcctcccacccccatccccatccccaacaccaacgggcccatcacctgcaagcgcgcatgaacttgagcatacatggatcgaaagcaacgagcacaagtttattttgcacatcatggtgcgaagctgcttaccccctactatatacacaacagttatactatatatactacacatatatatacacaataaagtagagacgactaaacacatgcgtatgtcgtctgcctggttgtggagattgatctaattcactgcctactgcactatatattgtggcaaccagagttggccttgctaactcgttatatttgtatgatgtatttgtcctcaaaatgagaaatatactccatatgtttttctcc

SEQ ID NO: 54706 - DNA, 252 bp, Zea mays
  unsure (1)..(252): unsure at all n locations
  Clone ID: MRT4577_149891C.1
agcagtggtaacaacgcagagtactttttttttttttttttttttttttttttttttttttttttttgtcccaatgttttgcgagatcgttaaaggcgagtttttttacgttgaggacaattattattgttccggaaaagaagaagaagaagagctgggaaatcccgaagcgggggggggttttcttcctcacgcaagtcccagcgttgttggtcgncagtcacaccggccaacctggtggtttttgactcc

SEQ ID NO: 54707 - DNA, 736 bp, Zea mays
  Clone ID: MRT4577_149892C.1
gcagatcaccgttccggggaagatcgacgagcgcacggcagcctgccgtaaggcagcggatctggttccgtctggctcggcccgtcaagccggctgccggtaggagcggaggagacggcgtctcgccgctcgcttcgtttccgccttccccctcccgcaagtcgccgccggctcgcattcgtggttccgcgtggggggtccggggaaacgcgacgagagaggcggaagcgatggcgaagtcgtgcaaggggttggccatggagctcgtcaagtgtctcagcgagacccactgcgtcaaggtgcagaaaaggccgtacaaggagtgcgctggggagaaggtgcccaacattaccagcgagtgcgttggcctgcgggagacctacttcaactgcaagaggggccaggttgacatgcgggcccgaatacgcgggaacaagggatactagtgatgtgcctgcaatatccacaatcagttttggtttctagccatgcttctgtgacattgaggtgtaatgataacatggtttagtttgcccgtgttctgtttttgataggtgaggggaactcacaacacacgtggcttcaattgatgaggggagtgcattcctgtctacattctatacatttgatattccctctgttttaaatgtttgacgttttgttactatgatctgtgcgtgtagcaaaagttaatctatggcccgtttggtttagccgtagattcctgaaaacggcc

SEQ ID NO: 54708 - DNA, 302 bp, Zea mays
  unsure (1)..(302): unsure at all n locations
  Clone ID: MRT4577_149893C.1
ggaccggaaacccctggacgacccacgccgcttaatggaccgccgccaaggccgaggcgagggcggggaagaatgagnccccggccgcgcccgcaccggaccaggccaaccgagacgccaggcgggccaacggcaccagggaccccaccaagcccgacaagggcggaggcgacaacagggacgccgccaacgacgccgaggacaggagaaggaaaaggcacgaagacaacccggaggcgacgagcacagacgacgccggcgacaacgacaccaacaagaacccgaggagggcaaggaagaag

SEQ ID NO: 54709 - DNA, 796 bp, Zea mays
  Clone ID: MRT4577_149894C.1
actctcggagtcgaccaggtcctccaccgcaagtgacagagaaccagagaaaccatagcccatagcaagctaaagcacaggagcgcaagagcccagcaggcgccaagaaaagcaccgcccggctggtccgcgccagcgcagtatggtgacggcgatcgcggtggcgtcggcggggctcgggatgctggcgggcgtcgcgatggccaacaggtcttcgccgccgtccgcgggcgccgcgctgtggaggcccggcgggggccccgcgctgcgctggggcggaggcggaggcgccccgcgctgcgaggcgtgcggggggtcgggcaaggaggactgccgcctctgcgcgcgctggtccgacgccggcgcccgcgggaagaagattagccgctccgggtgcggcgcgtgcgccggcacgcgccggacgccgtgccggtgctgcggcgggtccggtaccggccgacgcgcgcccgtgcggatcgccacgtccgcgcgcgccgcaccgacgactgccaggtgaggtgatgaccgcccgtcgcgccgacgccgacaccgatgccgatgccgagtctctcttcgcctctcctggacccgccggttctcccggatcatggatgaaggcggctctgtgcggcgcgcgggcgacctgctggcacaagggaatgacggcgcggagctcttgctctctttttttggacgaaaaaagatcagagattgagattgtagtagtatttgttagctagcgcgctggattgattagcaaaaattattgaaacgcgctatatttattttgcatagc

SEQ ID NO: 54710 - DNA, 179 bp, Zea mays
  unsure (1)..(179): unsure at all n locations
  Clone ID: MRT4577_149895C.1
cgttttaccaacctgtcgctgacctgggggaaaaccacnttggcgttaccctcaacttaatgcgcctttgcanngcacatcctcccgtttcgcccagctgnngcgtaatagccgaagaggctccgcacctgatcggcccttcccaacaagttgcgcagacctgaatgtgcgaatgggac

SEQ ID NO: 54711 - DNA, 524 bp, Zea mays
  Clone ID: MRT4577_149896C.1
gagctctcctttccctatcctccgaccgttgccttcggcccctccatctccgagctgcacagccggtgagcccgagaacgggaatcgggatccgccgacgaggtgataggcaagagatggggctcacggtcaccaagctgttcagccggctgttcgcccagaagagagatgcggatcctgatggtgggactcgacgccgacggaaagaccaccatcctctacaaggtgaagatcgtggagatcgtccccaccatccccaccatcgggttcgatgttaaaactgtggagtacaagaacatcaggttcactgtctggcacgtcggtggccagcacaacgatcaggccactgaggaggcattacttccagaacacgcagggcctcgtctctgttgtgtccagcaacgataggcaccgtgttgttgagaagagggatgagctccaccgaatgctgagtgcaggtgagctaccgagatgctgtgttgcttgtttttgctaccaaggaagagcttccaaatgatatgaat

SEQ ID NO: 54712 - DNA, 221 bp, Zea mays
  Clone ID: MRT4577_149897C.1
ataatatattcatcatcataatcaattctcctcttaatgcctcccttttcaatccagcctcctgtgcaccacaagaacaccttcttccaagctcctgtacgtccacccaaccttcctttgccctgagaccaagacctccctccaaagctaacttcccaccttttttttcctctttgtcaatgcaatcactaaaatgcccaccgatgcatgccttaataaac

SEQ ID NO: 54713 - DNA, 266 bp, Zea mays
  Clone ID: MRT4577_149898C.1
gggccggccgcgccttttttttttttttttttcctatataacaaccaaactttttttttctaacaaacttcaacaaaacatagggagatcttatacataatctgggggcgtactcaacaaaacacacctctttaataatcaaaaccctatcataacccaacttattcttctcacataaaaatctctctaccccatcataaataaaaacaaatataccattacaaaattctctatccaacatattcttcaatctaaaatactacttc

SEQ ID NO: 54714 - DNA, 789 bp, Zea mays
  Clone ID: MRT4577_149899C.1
gagtccccaaactctcgagaaaaaacagacgccaagagcggaaagaaacgacctccttccttccttccccagccatctcctcccgtcctgcctgcgcgtgcgcattttcacactaaacccccaatccaacctgccgcggctcgtcgcagatcggcagagcagtccaccgccgccgcggaggtggtgatcattctttttatcaggaggtgtacatctgcttggcctctggcagtagctgcagttaccaacagtcgagagttctcatggccaggtctcatgagacgacgagtaggaaacctcctggcctccggttattcaaaggtgccaaggctctaagaaattaccagacgctcgtcttggtccttacattcttggcatacacttgcttccatatgactcggaagataacaagcattgtcaagagtgagcttgatccccagacaaaagtggggtctgcctggggacgattgcacacacgcaacagtctcaacattggttggtctccatttaacaccgctgatggttccactttgcttggtgagatagatgtcgcattccttgcggtgtattctcttgggatgttcttcgccgggcatcttggtgaccgcatggacttgaggattgttctaacaattggcatgattggcactgccatattcactgcgctctttggtgctggatattggctaaatattcacaacttctactactttctggtctttcagatgattgctggcttatttcaatcatctggatggccttcagtcgttgcagttgttggtaactggt

SEQ ID NO: 54715 - DNA, 2210 bp, Zea mays
  Clone ID: MRT4577_14989C.1
gggtacctcgaggccggcctggagtccggccggggcgggcaaaaaccacaccacaccacgcgggagcggggcgggcaccagaagcagacggcgagcgagcgacacacctctcatctgcccgcccctctcctccgtccagcctctccccctctcctctcctctcctcccaaaacaagagcagcgagacgcgcgcgcgcgcgccacgagctggtggaacctcgccgcctcccgcggcagatctcgcgccgagccctggtttcgacgcgagatccgcgcccgccgtccgccgctcgccgcctccgtcccggagcattaccaggattatacttccaccttgaagatggcgatcggattactagcgtttgagagccaccaggggctctggaacagcggatactattcacagttgtttggaattggaggagttctcatcactcttaccattcttatgttatccacgggctactttgggggaattggtgccccatttgctccatatttctggccgtatctaggacaagttccaaagaagagggaacgcaaaaggcctgtgagagtgtacatggatggatgctttgatctcatgcactacggccatgcaaatgcattgcggcaggccaaattgctgggcgatcagcttgtagttggagtggttagtgatgaggagattgtggcaaacaaaggtccacctgtcctttctatggaagagaggttgactcttgttagtggtctcaagtgggtcgatgaggtcgttcccaatgcaccctatgagataacagaagaattcatgaatactctcttcaacaagtacagcattgattacattattcatggagatgatccttgtcttctacctgatggcactgatgcatatgcgctagcgaagaaggtcgggcgttacaagcaaatcaagcgaacagaaggtgtctcgagcactgacatagttgggaggatattgctaacattcaggcagaaagatgctgacactgatttaagtgttgtcgttgctgagaagtctggagagaaatcaaatgatgaagtgaaaagtcagctatctcatttccttccaacttctcgccggatcatgcagttttcaaatgggcaggctccttcgccaggtgctcgtgttgtctatgtagatggcacatttgatcttttccacgctggccatgttgagttcctcaggagtgccagacaacttggtgactttcttcttgtgggtatctatgacgacgagtcgatcagggatagaagaggctgtcgtcctataatgcatctccatgagcgtactcttggtgttcttgcctgccgttatgttgatgaagtcattattggtgcaccatgggaagtttctaaggacatgatcactacgtttaacatttcattggttgtccatgggactgtagctgagggcaattcagctggtgaaattgatccttatgctgttccaaagagcatggggattttccagacaatcaggagcccaaaatctataacaacattgtcagtggcgacaagaatagttgacaatcatgaagcttacaagaagaggaacctgaaaaagaaggctagcgaagaccggtactacacacaaaagaaattcgtttctggagactagtgctgcacaaggagtgtatatttctgccagcagtccgaggaaatgcatgtgccaccctgtattgatgttattctacagcagagactggaacagataatcagcaatagaaaggtcacaatgatagtttgagcaatggtgtggatggaccaagctagggaagagagagagagagagagggagaaaactgtcacattcttctgctgtcgcccttttaggaacgctcacatgacatgaggagttcacataaacgattctttttctttctgactttgttatccccgtatggggatttatatatatctgtagctgaaggccttcagcaaaccgttgttgtatacttgtgtgttgttacttaacagcgtgtgtagtgattagcactgcacactccctgattgtaccatggtatattgaatgtttatactgctggaagaaaaaaaagggggaccttgtgatggtcagatgtttaatttaaaaaaacgaaaaaaaaaaacccgctgcctccggagcttgcagccaacgttcgcgacaggctcaagcagtttagggccatgaaccagttcaagaaagcagcattgatgatcatagctgggtg

SEQ ID NO: 54716 - DNA, 181 bp, Zea mays
  Clone ID: MRT4577_1498C.1
ccacgcccccgaagggggagggcacaggctcgggattcgagggggactccaccggccacattggcacgaattaccacgggggtgcgaagagagccggagaccgaaccgcatcttatcgctgtaaggtgtttttggagggttctggtggcgaaagttactcaaaggaagcgaggcttatagg

SEQ ID NO: 54717 - DNA, 1284 bp, Zea mays
  Clone ID: MRT4577_149900C.1
cacagtcgcaactcagatcgcaaaattaaacccgcagcaaaccaagcggcaagacaatccgcgtgctagctagctccctttttctgattcttacgtacgtgcccgtactcgtagcaagcaagcaggtcgtcgcgcagtcatggcgcccaggatgatgctggttctgtggggcgttctggctgcagcgtcgtccaccgtcgtggcgggctggtcggcaggcacggcgacgttctacggcgggtcggacggatccgggaccatgggcggcgcgtgcgggtacggcaacctgtacagcgccgggtacggcgtgaacaacgcggcgctgagccagaccctgttcaacgacggcgcgtcgtgcgggcagtgctacctcatcacctgcgacgcgtcgcgcgcgggcgggcagtactgcaagcccggcggcgccagcgtgaccgtgacggccaccaacctgtgcccgcccaactacgcgctccccagcggcggctggtgcggcccggggcgcccgcacttcgacatgtcgcagccggcgtgggagaacatcggcgtcgtccggggcggcatcgtcccggtgctgtaccagcaggtcaggtgctcgcgcagcggcggcgtgcgcttcaacgtcgccggctccagctactttttgctcgtcagcatccagaacatgggcggcagcggctcggtcgccgccgcgtgggtcaagggcaccagcacggcgtggatccagatgtccaggaactggggcgctaactggcaggctctctcggggctcactaatcaggcgctcagcttcgccgtcaccagcaccggcgggcagtacatacagttcctcaacgtggcgccggcgtggtggcagttcgggcagacctactccaccaaccagcagttttactactgatgatcctccttccataagctttctgatggactctggttctgtctgttcatcgtcttcctatcctagtacgtatattaattgccgacgtgctgtctcgtggttttgggcggagttacagtgcccgatcgacgaaccgtggccgtggcatgcatgcttcctgttcatagtgccatttttacccagctgccataatggcatcatacatgtgtgcaaaattgtctgcaccacttcaatcaatatgcaaattacattaattaaaagttggacttgagaaaaatgaaaaattgtaatttattgtttttttgggccctttgatattattgtactcgggggggccggccttgggtggaaattgaagttcccaataaggccgccccccggctttt

SEQ ID NO: 54718 - DNA, 531 bp, Zea mays
  unsure (1)..(531): unsure at all n locations
  Clone ID: MRT4577_149901C.1
gggtttctccnacttctttcttttcctgaaactgcttagttccctagaacaatagcagatacacacccttctccggtcttctgcttgcttgtgcccaggagctccagagccgacgctcgtgtcccagccatggtggccgtcgaccaagcctctaatcccaactccaagcgccggctcttctccccgtgccaagctcgccctcgactctgaccagggggtcacagtcgccgggtccatgcgcccaggntctcctttcatcatgccactcatcccccatggtcgtagcttgcccctgtgctcgacgccccctactcaggttctggagatttcaccctacaccaagcacttaactaccggaatcgcgttctttggcgagtgtntaaaactaccaagcacttaactaccggaatcgcgttctttgccgagtggctaagactggcggggaccataattaggggtatcgctgaagacgcataattgtcaggtggggaccccatcaacataaagctgggaaggcctgatgggtgcgaa

SEQ ID NO: 54719 - DNA, 182 bp, Zea mays
  Clone ID: MRT4577_149902C.1
cctccagttcccgccccgaatttcccggttcgacccacccctccgcctaaatcgcaagcggccccccttttttttgtttcttttttaccactgcgggcgccccccaccactctacttctttctctttctttcctcaacctctgcggcatctccacctgccccgccggagcgccattagctct

SEQ ID NO: 54720 - DNA, 735 bp, Zea mays
  unsure (1)..(735): unsure at all n locations
  Clone ID: MRT4577_149903C.1
gagtacccaaactctcgagaaaaaacagacgtctagagcggaaagaaacgacctccttccttccttccccagccatctcctcctctcctgcctgcgcgtgcgcattttcacactaaacccccaatccaacctgccgcggctcgtcgcagatcggcagagcagtccaccgcctccgcggaggtgtgttctcgccccgaatcccggtttcttcatctccctcctccttcttccttactgattctgcacgcccaatccgtggtgatcattcttttatcaggaggtgtacatctgcttggcctctggcagtagctgcagttaccaacagtcgagagttctcatggccaggtctcatgagacgacgagtaggaaacctcctggcctccggttattcaaaggtgccaaggctctaagaaattaccagacgttcgtcttggtccttacattcttggcatacacttgcttccatatgactcggaagataacaagcattgtcaagagtgagcttgatccccagaccaaagtggggtctgcctggggacgattgcacacacgcaacagtctcaacattggttggtctccatttaacaccgctgatggttccactttgcttggtgagatagatgtcgcattccttgcggtgtattctcttgggatgttcttcgncgngcatcttggtgaccgcatggacttgagggattgtctacaatttgcatgattagcactgccatattcact

SEQ ID NO: 54721 - DNA, 796 bp, Zea mays
  unsure (1)..(796): unsure at all n locations
  Clone ID: MRT4577_149904C.1
ggtaccctncgcgggcctggccgggnaactacctaccagnccagcagaacacaagagcacgggggcagagacagagagcaaagcaaccccctcaccaagatccgatccatcccatctacgcagcggaggtctcgcatctcagagcgggcaaattgccgaggaagacaagatcaggaggccagtagaacacctgacccgagtagtaggacaggtagagcagatcaagaaaagcggggaggagcagcttccagatgcacctgagcggcgggggccggatgttgccgccgaaacagctgctgaccatcgtcatcatcatcttctccacgctctccttcatcaagctccttctcctcaccagctcgtcgtcctcgtcagcgggcttcacctcccgcagcagcccggcgtgggacgcagacggcggcggtaacgggacggctaggagcgcgctcgcctccaaggagctcgctctgctccgctccgtcatcgccgcgcgggcgccgtgcaggctgctggtgttcggcctgtccccgcagctcctcgccctcgccaagctcaacttcggagctggcgcgggagccgccaccgccttcgtcacagacagcgccgacgacgcggacgccgcgcgccgcgcgctcctctccgaccgcggggctgggtccaccgccgcggcggccgttcaccagaccaggtaccgcgacgcggcggcggaggcgtggccgctgctgcggcgcgcgcgggggagcccggcgtgccggcggcccacggggacggtgcgcaagtccgggtgcccgttggc

SEQ ID NO: 54722 - DNA, 176 bp, Zea mays
  unsure (1)..(176): unsure at all n locations
  Clone ID: MRT4577_149905C.1
gnttgcnatgctgaaagtggtgaattgaaggnngtttttacaganncaacatantcncccnaaaaacacanngggtagcatcatgcagcagcaggncnnccgagncngcaactgcgaagggtggtgcagntgctgaaccaatacgggcttactgatgctacganagntcgtttgga

SEQ ID NO: 54723 - DNA, 1244 bp, Zea mays
  Clone ID: MRT4577_149906C.1
tacgacgtggcggcccgcgcgctccgcggcgccgacgccgtgctcaacttccccggcgcgatcgcctcgcgcgcggccccagcgtccgcgtcccccgaggacatacgcgccgcggcggccgccgcgcagctcgagtactcgcatcagggtcgtaccgccaatcctccccctcctcctgcttctcctccttctcctgctgctgcagcggcacaggactggcatcaacagcacgacgcggcgagctacacgccgcatcaggaggccggcactgacgagttcatggacgaagaggccatcttcgagatgccgcagctcctgcggaacatggcggcggggatgatgatgagcccgccgaggctcagccccgacacctccgacgagtcgcccgacccgtccgaggccggggagagcctctggagctaccgtgacccgtagattgttgcacacctagctagctaggccatggcagcaccagcagtgtggtaataacacaaaccatcatagtgaactactagtacaccaccggcaggtagcaaaccagagaagttgattattatggcgacaacaggagtacatggatatggatggacgggtacatgcatggaccccggccggtgcaccgcagcgtacgtcctctctgtatatctgctgatacacgagtgtatgctgcctataagctagcatgcatagtgtgacatgctcgctagtaatagtatagttaccaccagagtcttcttcttattccgctccagctgcattccgtatttattttacatttttttactttgatgtgattattcggcatgattgagcgagtccaattgttgtcgcagctagctagttttctttaatagcaagcgcacatgttttttgatgtgccaagtggatcgtagtagggagccatattgtgtctgtagacaagaaaattatatctgtgattgtatgggcccatggatcggataagaaaaatatataggcgtgcacatatgcatgctccactttcctctctttttaaaaaaaaaaaaatcctgtgttaagtgttggtgttagtcccccccccacatatatatattggggaagttggcagttgaggttataaaaggggcaaggagttaggtgggggcgactcttggtcctttggttaccatataaatttcaccgcttactatatatagtgggtactttattttaacccccacccccgcgcgttttaccggacgctgggcgaacgctgggtcgacccg

SEQ ID NO: 54724 - DNA, 415 bp, Zea mays
  Clone ID: MRT4577_149907C.1
actgtgacacagttatgacgctacatgcacgcgtgcgcacgctcgtatcctcgtagtagcggtacgagccgccgtccttttttttttttttttgactggaaccaacggaatgtgcaaccatgcttcatggtttggctgggtaatctactgacatcaagccaaacgagaaacatgcacacaaaacatggctaaagaaaaaaatgaggaaagggactaacctaccggtttctatttcaatataccatgtgcacaccagaccatcaccaatttcatacttacttactgaacgcaagaacaacactccaacttatgacatcccaccaaccataactaccggccgagtccaaacaaagcgtcagggaccctgtttccctactgcatttccacgctagacgatttacccgaaccaacctct

SEQ ID NO: 54725 - DNA, 813 bp, Zea mays
  unsure (1)..(813): unsure at all n locations
  Clone ID: MRT4577_149908C.1
aagttcacgccgtgcactcgccgccgcttccagccgtccccctcaccctccgcaaagcccatagacaagttgatctcatgtattcaggaagaacagtggcatccagagtttcctgttcatcgggaaacaacggaagcttcccgccctgcctttgcccgggattcctgggatttcctgttgtctccgtgaacttccacttgttcaaggccattgttcgcagccctgcatcttccgttgtcttgggtatttgtggaaggagcctcccttagacagagctgcctcataaggtgttcattctatatttctgtgaattggtagcgggaagccgtgcagctaccgctagctttcatcaagactctcaaagtgttgaatcctggttcctgaagatggtttcctctgagataccttcagttacaacaacccatacacagcgccccaagctctttacagggatgatacttctgccaaaagggcctccagatgttgtccttcctgaaaatgttgagtttgattttaacgatgtttttggtgctacggcggtccagacccccacagaagtaagcattctcactccaggcagccctgcacctttggccgagtcgaatgaggaggtttacaatgaccctgtagtcattaccaagcgatctccttctcttgttggcccaacttcacttgttagccaatccttgccacttagtaagcttactctacatgagtctgagagctcattagatctgctagagtgtctttctaaagaaaagaaaagtggccaggggagtcttagtgatgaagagctncatgatancaacaagg

SEQ ID NO: 54726 - DNA, 355 bp, Zea mays
  Clone ID: MRT4577_149909C.1
tgcactcacagagcctattgatatatatagtgagtggattgacgagtgtgagcgtgtcaacactgttgaaggtgacgatgatgcgtgagcttgtcccatgcggatgaaacggttacctatacaactgtaatgtgacggcattctcgaatgtcatagcccacagtcagccatggcttgtaataacgtagtggctgactgatatgccagtaggcagctttatctagtacttaagagctccaaaaagtttgtagtatacatgtatggataaccttaaaagtggttatgtgtgtgcctatggaattaacgcttatcccagatggtgtaacagcgtttttctgtgagattgttttcgagc

SEQ ID NO: 54727 - DNA, 269 bp, Zea mays
  Clone ID: MRT4577_14990C.1
aatatttagtttaagacatcaaaacaacatgcatagattagtcttaaaatatacttaatttacatatatacatatttattaagtatattttaagactaatctatgcatgttgttttgatgtcttaaactaaaaattgaccaagttattgagtcagttttaaaagcttgacttcagccttgtactaaaccataaggattatataactcgagggagcatacaacaagagaacatagaacaacctaaaatttcttgaacatggacaataata

SEQ ID NO: 54728 - DNA, 601 bp, Zea mays
  Clone ID: MRT4577_149910C.1
tttttcttcttcgatgaaggcaagtgaatgtagcggtggttgctaccgttttgacctgttacttctatcgcctacactctaataatattggattctttcataattgaactatatgataatgttttacttgattgtattatattgatgttctatcatatattaatgatgattatggttcgagtatgacccatgagattaattcacacccctgaaggcagatgaagcattatttgaggttggtattgtatctgaaggcagatgaagtattatttgaggtttgtattgtatctgaaggtagatgaagtattaattgaggtttgtattgtatctgaaggaagtgtagttaattgataaatgcatcatgccatatacattgcataactcatttgcatctgaagttttgtcgtgacctatggtccgaccgtacctgcccgggcggccgcccgagcaggtcagccgtgcaagcctacaggctacaactagcgcttgcggcgagcgccttacaacaaccaattgcccaattgcaacaacaatccttggcacatctaaccctacaaaccattgcaacgcaacaacaacaacaacagtttctgccatcact

SEQ ID NO: 54729 - DNA, 223 bp, Zea mays
  Clone ID: MRT4577_149911C.1
attcataggaaatgagatttcaatcctctgtaactacatttcccttccgaacgaagggggcctaagcctctcgttgtcctgctgtaacaagcaaatcaattgtatcttgactgcgctataataacaaccaaatgcagacaagaaacaggggggccaagccgctcgttgtcctgatgtaacaagcaagagtactgtatcttgactggatataataagacctcct

SEQ ID NO: 54730 - DNA, 651 bp, Zea mays
  Clone ID: MRT4577_149912C.1
ttcaatcacaagagaccttcgcgagcatttccatttcctcctaggtgaggagaccgcgcaagacagagcaccgcgagcgactatgtgcagggctgtcggcacgcgttggataaaggatgtgcgacaaggtggatcactaccaacgccgtagggagtgccatgacatcattcaggcaatacaccccactgcgcgatacgtacgctgcatgatcggcgaggcgggtgatgaagttcatggcacaactaccatcacacacgtgctgaacccgatatcttccacgataacggcactccgacaccgcggaccaacaacgagaacctctcccgactactagaaccaccatagtgcgtccatcacgcgctgctgagctccggcactgaaccgaccaccctctccgagaatatgatggacgactcttctccttacaggatccgagggctggatgttgacagggacactccgatcaactactaggatgtcaccaggggcatgatggccaagagaagactcgaccccgtgatccatgagtagtacaaacttatcaggcacacaattgtgaacgattgccgtgtcaacatttgagcacgcaatctcatcctgcaggtgggaacgtcatatcatggtacgattttatttgcagacagcatgga

SEQ ID NO: 54731 - DNA, 348 bp, Zea mays
  Clone ID: MRT4577_149913C.1
cagtatcagaacctaagtcttgtcaggagcccttatgcctttttactgcaacaacgactttttttattccatctgcaagctgaggcttacattgttgcttacttgagacaacaacatttattgccattttacccacaagttgtgggaaacattaaagccttcttgctaacagcaacaattgctaccattttacccacagaaagtaggaaacatagttgcctttttacaacaacaacatttgttgccatttagccaacatgctatgacgaatccatccaccttattgcatccgtccaccattggtaatgcctttattttagattttttatgaataatactgtattatta

SEQ ID NO: 54732 - DNA, 984 bp, Zea mays
  Clone ID: MRT4577_149914C.1
gccggccgggtctggatttagaagcatcaagctttagtatcgggcctgccacacccaccgtactccgatccatggcggcaccttggaatgaaggcgtcagcaataacacggacagtacacagatcgggaggtagaactcacgagggagctggcggcaaactcccctccatggctgtatccatcggctgttgaaggtcaaaacactttgccgagaaggtagaaggatggggaggaagaactcaccggacctctctgcagtgagcaggacagggagtcggcgtccatatgagcgttgcagccacgccaacaactgggcagcggcgacatctgcatctcccacctcgtctccctcccgtatctgcaagccttgatcccgccgccagccatccatccaagggagccatgtctccatccggcgagctgctggcttccatctcctccgtcttcactgtcgccttcgtcctcctcgcctgcgtcgagctcggcgacgccgccgccgccgccgtcggcgtctaccgcctcatccagtacgaccttgccggcgctccgctcggctcccgcgccgcggtcctcaaccaccacgctgccgcgctcccgctccccgccggcgcagacctctcccgctccgccctcgtcgcgccgctcctcgacctcccgctctctttcctcagagagtacctggtggagaaaaaacatctggggggattactcattctgctcccgacaaataatgacagtgtggatgacaaggggcaattcaaaggtgtactgactgagctggagaagttgcttctgcatgaacaagttccatatccagtgtactttgctttgcatgacgacaatcttgataacctgctggcagatatccataaaattgcctcctcaggtcaaccagcctctgcaacaacaggaggttacaaacttgtcgtatcctcagcagagcctagaaaagtgtcatctcccaccatttctaatatccaggga

SEQ ID NO: 54733 - DNA, 2300 bp, Zea mays
  Clone ID: MRT4577_149915C.1
attgggtacctcgagccggcgggcgggtgccatctgcattttttggtaaagagtaagtttgcggcgggagtttaattaaaatcaatcgtatcgggcaggggctgcaacccaggctgtgcgggcgcggcagggcagcggcggcgacatctgcatctgcatctcccacctcgtctccctcccgcatctgccctgcctcgatcccgccgccagccatctaagggagccgggagccatgtctccctccggcgagctgctggcgtccatctcctccgctctcgccgtggccttcgtcttcctcgcctgcgtcgagctcggcgacgccgccgccgccgtcagcgtctaccgcctcatccagtacgacctcgccggcgccccgctcggctcccgcgccgcggtcctcaaccaccacgccgcggtgctcccgctccctgccggcgcagacctctcccgctccgccctcgtcgcgccgctcctcgaccttccgctctccttcctcagagagtacctggtggagaaaaaacagctggggggattgctcattttgctcccgacaaaccagggtgataaggatagtgcggatgacaagggtcaagtcaaaggtgtactgactgagctggagaagttgcttgtgcacgaacaagttccatatccagtgtactttgctttgcatgacgacaattttggtaacctgctggcagatatccataaaattgcctcttcaggtcaaccagcctctgcaacaacaggaggttacaaacttgtcgtatcctcagcagagcctagaaaagtgtcatctccgaccatttctaatatccagggatggttacctggatttaaaggagagggtgatagcgaacagcttccgactattgccatagttgcaaactatgacaccttcggtgctgtacctgcactttctgtgggaagcgacagcaatggaagtggagttgtggctcttctagagattgcgagactattttcacgtctgtattcaaatcctaagacaaggggcaagtacaatattctctttgggttaacatctggtggaccctacaattacaatggaactagcaagtggcttaggagttttgatcagcgtgtacgtgagagcattgactatgcaatttgcttgaacagtgttggttcctggggcaatgacctctggatgcatgtatcaaagcctccagaaaatccctatatcaagcaaatctttaaagaattttcggatgtctctaaagaaatgggtgtttcagttggaatcaagcacaagaagattaatgtctcaaatcctagagtagcatgggaacacgaacagttctcaaggtttagagtgaccgcacttactctttcagaaatgtctacccctcctgaatttttggaaagcactggtggtcttcatgacactagagaatctacagatgttgagtcagtaatccgaactgtcagattagtttctgagagtcttgcgagacacatctatggattgagaggaaggaatatcgatgtttttgcagagaatagcagcttagccatcaatcctcactatgtccggtcctggttggatcttttgtcacggacaccacgggtcgcaccttttctgcagaaaaatgatcccttcatagcagcactggaaaaggaactgtctgcacacactactgatgtgcatgttcaaagtgatgcgcttgatggcatgttcactttctatgatgcgacgaaagcaactctaaatgtctaccaggttgcaggtgttacttttgatctgctgttccttctggtgctcggctcctacctgattgttctcttctgtttcctagtgattactacacggggtgttgatgatctcattaacatattccggcggcctccatcacgcaaactcaagggtgcataggctaggctgtgttttgtgtattagcgccagccaagagaccgcatgcctagtagtcattagaagaagagatagagatgaggatgacagcggcaggcaggctagcttgcttcccacagcacatagacaaacattttttttcctttttgtgtcaggaatttcgactgtaatttagctgtattttggttacagttctggcttattcggggtggactggtggcggtgtctgttgagagacagaaggcacacagcactacgccgcctctgaactttggatgctgagaaattcttgtctgaaacacaaacactgaaggcctgccgtgcctgtgtttacttgttgtctgaaatataaaaaataatagagaagaggaatataaagccaaaaaaaaaaaaaaaaaaggcccctagggcc

SEQ ID NO: 54734 - DNA, 956 bp, Zea mays
  Clone ID: MRT4577_149916C.1
ctcaagaagtcgtaccgccggctggccatgaggtggcaccccgacaagaaccctggcgacgtcaagaaggaagccgaggccaaattcaagaagatctccgaggcctacgaggttctgagtgatccccagaagagggcggcgtacgatcagtacggcgaggaaggcctgaaggcctccgcagacggtggtggtggtggtggttccacgtccacgaacggggccgccaaccaacgtttcaaccctcgcaacgccgaagacgtgttcgccgagttctttggcagcaacaagccgttcgagaacatggggcgagccaagtcaatgaggttccagacagaaggcgctggcaccttcggtgggttcggtgggaacgagagcaagttcagaccatacaacaacgattcggccggcaccggctccagtcaggctcggaagccgccgcccgtggagaccaaactgccctgcacgctcgaagagctgtacgcaggctcagcacgcaagatgaagatctccaggaacgttgtgaagccgaatgggcaactagggaccgaatcggagattctaacgatcgatataaagcccggctggaagaaggggaccaagatcacgttcccggacaagggcaacgagcagccgaaccaactccccgccgacctcgtcttcgtcatcgacgagaaaccccatgacctgtacacgagagagggcaacgacctcctggtccaccggaagatcgatctggtggacgcgttggcaggaacgacggtcagcctgaagacgctcgacgggcgtgacctggtgattaggctcacggacgtggtgacacctgggtacgagcttgtggtcgccaaggaggggatgcctatcgtcaaggagaacgggaggagaggcaacctgaggatcaagttcgacgtcggtttccctaagaggttgtcgtcggagcagcggcacaccattcggaa

SEQ ID NO: 54735 - DNA, 407 bp, Zea mays
  Clone ID: MRT4577_149917C.1
aattgggtaccgggccccccctctacgcaaccgctaaattcttctctagaattttgcatattggtcttcaaaacactgaacaaagggggacattacagtgtttttcatgcaccctcaaacataacctctcccccattttcttttgtcaacaactacaaagactcaatattttgctagatcaattaatctagaagcgggacatatttgaaccaaaacaacaccccctatatttactcagactataaaaaataggagcataaatcactcatggcccacaaaagttatccccacttcacaaaaagctccactttctcaccatgttccaaaaaaaaaaaaaaaaaaaccccccccccaacaactaatgaaaaaaaaaaaacagaaatttatttcggacccccccccccccc

SEQ ID NO: 54736 - DNA, 807 bp, Zea mays
  unsure (1)..(807): unsure at all n locations
  Clone ID: MRT4577_149918C.1
acgccaccgcctcctctcgccttacctcgtgctcacccactggttggcgctgtcctcgttgtttatcagccggtcgctagcgcggggagcgagccaggcttgatcgattgatcctcggcgctgctatctatctatctgcaagaaattccttctagtttgttgtcaacatggattgctgctttatgttcggacggagatctcaacatgctgttgaaggcgatgatggtgaacatagtgtgaaggtcttttcttacaatgagttgagaaaggcaactcaagatttcagtggggcaaacaagattggagagggtggttttggttccgtattcaggggaatgctcaaagacggcacactaatcgcagtgaaggttctgtcagccacttcaaggcaaggtgtccgagagttcttaactgaacttacagcaatttcagacatcaagcatgaaaacctggtcacgcttgtcggatgctgtgctgaagggtcccataggatcctcgtttacaattatcttgagaaaaacagcctttcacagacattgctagggtctggctacagcagcatccagttcaactggagggctcgtgtcaaaattgccgtgggcgttgcccgtggacttgcatttcttcatgaggaaatccgtcctcacattatccaccgcgacataaaagcgagcaacattcttctcgacaaggacctcaccccgaaaatttctgattntggattggcgaggcttcttcctgccaatgcaactcatgttagcacccggggtggcaggcacattaggatacttgggctcctgaatatgc

SEQ ID NO: 54737 - DNA, 2133 bp, Zea mays
  Clone ID: MRT4577_149919C.1
ccggtcggggcgcagcccgatgcgtggtatcgctctcgcgtctgagtgcctgctcgtgctggcaggcaggcggctgccctccgtccgcgcgtcctctccgggcccggagctcccaagcgcagccgcggccctctccccatccactgttcgctcgctgcaccgtgtgccgtccatctcgggtaccggacctgccatcgtgacggacacggcgacggacgtggtggacgcgattgccaggctgtcctacttctacaaacgacgaggatgctgtgggcagtgcacgccctgccggagaagggcacgccctggctctggatgatcatggagaggctcaaggttggtgacgcgaagctagaggaaatcgacatgcttcaggaggtcacgaagcaaatcgaagggcatactatctgtgccctcggggacgctgcggcgtggcctgtgcagggacttatcaggcacttcaggccggagttggagaggaggatccgcgagcgagctgaaagggagctgttggcggcttctgcatgatgtgccagccgcatgtactagttttctgatttctttctaccgaaataatacaaactgatggagctgcctttctgtgtaagcgtaaatgctagcattcctgatttcctttgaaccgtttatgtggatgtttatttgatgcactcaagcatctgacggattttgatggactaggtacaccttttacttagtaggaacgaaaaacagagttgtatcgtgtgtagaaccttgtggacagatacgatataggcggcagttggcgtgaaagcgtcatcaggtgaacatgtgcgtgagcggctggatccacggaaagggcctccttaggcttatatggctgggcgtctaggttagtgtgcgtggccacctggttatcaatgctggcggaagctggttgtggccgccgtgggcgataacaatagggagagagcggccctaaaggacgtgcgttctgactcggaggacatcgttcagcagcaccagcgccaacggcgccagcagcggcaagagcagcgacgtgcagaggtgatccccgtggacaccgcagctgtccctccaataagttaccgccgcccagggaacaagcgccggaagggcgtcccgcaccggtcgcccttcggtagcctcatcgtcgagttctaggactgcttcgtcagcgcctaggcaatgcgctctctactatacaggacatgacaaagcccggaagggaagggaataacaggacgcgcttatgggcgtggaggccggccggcggcgcaggggccagcgacgggcgagagcggttaagaggggcacacaccagcgggtttgcccgtgctgctgagaggtatttggtgcaatttcgatcgtgtactgcagcttatatggtgatgaatttatctaccatgttcgttgaagcgattgataagctgtcttgcatctcacaagcatgatagttgtgggcagtgcacgccgttgccgagaggggagacgctggctctggatgatcatggagaggctcaaggttggtgacgcgaagctggaggaaattgacatgcttcatgaggtcacgaagcaaatcgaagggcatactatctgtgcgcttggggatgctgcggcatggcctgtgcaggggcttatcaggcacttcaggccagagttggagcggaggatccgcgagcgagctgaaagggagctgttggcggcttctgcataatgtgccagccatgttgcccctgtactagtttcctgatctcttcctaccgaaataatacaaactgatggagctcctttctgtgtaaggaaatgtagccttcctgatttctttaaaccatcatttatttgatgcactcaagcagctggtgaattttgatggactagataaactttccaaagtagaaacaaactcgagggttgtaccgtgtatgctacataatattattgtggatgtgtatgtctaaaagaaacaaacttgaaggttgtaccgtgtatgctaaataatattattgtggatgtgtatgtctaaaaaaaaataaaaaaaatcctgaaaaatttgaaccgtttatgtggatgtttatttgattcactcaagcatctgactgattttggtggactaaaaaaaaaaaaaaaaaa

SEQ ID NO: 54738 - DNA, 206 bp, Zea mays
  unsure (1)..(206): unsure at all n locations
  Clone ID: MRT4577_14991C.1
gaccggnccggaccgggaggaccgacgcgcgcgcccgcttgggcaccatggtcaccacagaaactgagaagagtgggcgcacggagaagggcgcgcatgttgccgagcagagcaagaggccattagagcatggaccccagagcggaagctacaaggaggcagcaaactgatgatatcgcaagaaggaagcgctcgacgcagcctat

SEQ ID NO: 54739 - DNA, 461 bp, Zea mays
  Clone ID: MRT4577_149920C.1
ctacctgcatattaaaaagaacttggggaagcccccgttggggcccctccagaaaaaaattatttattaacaaaaaacccaaatccaattctttagcccaaaaagaaatcccaaaaaaaaacccacttttactttcggcaaaaacaagattttaaggaagggataaaaatttaaaatataaaaagactaactgaaggggaatcacaactaagcaaaaacccttcaaaaacaaaattgagctttaacaagcaatccaatcttgggacaattttttctcaaacaaacccttttgagttcaattcacccaggacaactataggttgggaaaaaaaaaaaggccaaaaataggccccaacaggggtaactaatttccccccacccccaacacttgatctccttaagaccctgaaaaaaaagaggaatggcggattaggggccccatccttgtaataggggaatac

SEQ ID NO: 54740 - DNA, 2180 bp, Zea mays
  Clone ID: MRT4577_149921C.1
cattgggtacctcgaggccggccgggaaataaaatgaacgccggtctgccccgccgggaggcccaataacgcggcgtggtatcgctttcgcgtctgcgtgcgtgcgtgtgcaggcaggcaggcggctggcctccgtccgcgcatcctcttctggcgaggagctcccccacgcagccgctgctctctccacgtcctctgttccttcccctccccgatctcccccaatccgaccaaaccggcagagccggggggcggcgatggcgctgcgacgggcgctcctcagatcggcagagatctctttcgaacgcaaggctgcaattgagtacattcattctttatcaagggcacagcctgctcgttctctcaatggtgctggcctttgtcctgctagtagatcacttagcacccaggccgccactacgtcaagcacaccacagcctccgcctcccccaccccctccagagaagactcactttggtggcctcaaagatgaggatcgcattttcaccaacctctatggtctgcatgaccctttcctgaaaggcgcgatgaagagaggtgactggtataggaccaaggatttggtgatcaagggggcagactggatagttaatgaaatgaagaaatcaggtcttcggggtcgtggaggtgcaggttttccttctggtctcaaatggtcctttatgcccaaggtttcagatggacgcccttcttatcttgtcgttaatgctgatgagagtgagcctggaacttgcaaagatagagaaatcatgcgccatgacccccacaagcttctggaaggatgccttattgctggagttggaatgagggcatcagctgcttacatctacattagaggtgaatacgtgaatgagcgtctcaaccttgagaaagctcggcaggaagcgtatgcagctggacttctgggtaagaatgcttgtggctctggttatgattttgatgtgcatattcattttggtgctggtgcgtacatctgtggtgaagagaccgccctactagagagccttgaagggaagcagggcaaacctaggctgaagccacctttcccagccaatgctgggctctacggctgccccacaactgtgactaatgtagaaactgtggctgtatccccaacaattcttaggcgtggtccagaatggtttgcaagctttgggcgcaagaacaactccggaaccaaactctattgcatctcagggcatgtgaataaaccttgcaccgtggaagaggaaatgagcatacctctgaaggagttgctcgagaggcactgtggaggtgtgagagggggatgggacaacctgcttgcggtaattcctggcggttcatctgttccccttttgccaaagcacatatgtgatgatgtgttgatggactatgatgcactgaaggctgtgcaatctggattgggtaccgcagctgttatcgtgatggacaaatctacggatgtcgttgacgcgattgctaggctgtcctacttctacaagcatgagagttgtgggcagtgcacgccttgccgagaggggacaccctggctctggatgatcatggagaggctcaaggttggtgacgcgaagctggaggaaattgacatgcttcatgaggtcacgaagcaaatcgaagggcatactatctgtgcgcttggggatgctgcggcatggcctgtgcaggggcttatcaggcacttcaggccagagttggagcggaggatccgcgagcgagctgaaagggagctgttggcggcttctgcataatgtgccagccatgttgcccctgtactagtttcctgatttcttcctaccgaaataatacaaactgatggagctcctttctgtgtaaggaaatgtagccttcctggtttctttaaaccatcatttatttgatgcactcaagcagctggtgaattttgatggactagataaactttccaaagtagaaacaaactcgagggttgtaccgtgtatgctacataatattattgtggatgtgtatgtcttttctgtgtaagcaaatgctagccttcctgatttctttgaaccgtttagggcttcggttagctctcaatccatgtggattgagtgagattgagtgggtttcaatcccaaataagtcaaaatttttctatttttttttcaatcacatccaatccatgtataatggga

SEQ ID NO: 54741 - DNA, 642 bp, Zea mays
  unsure (1)..(642): unsure at all n locations
  Clone ID: MRT4577_149922C.1
aaataaaaaaacaaaaaaaaaaaaaaaaaaaaaaaaattttttgggnnccgngngnacgtggggtggtgtggtatgtgggtccccagcactaaaccccgaagccagcgccgtctcgcttaggggtttcnnngccgccgccggccattgccttcgcgcgcagcatcaggaagaggtcttgccccacggcccaagctccccgtggcttgctccagtggaggaaaacccgccacaagcacagcanncgccaggctgggtgggtggcagnnctccnntgttcgagaagtggtggggntggcttccatttgtttgggaggaaagtgtgggtccaaaccattgcttcaaaaggtatggnncgtttggcaacggggtaagtgccaattggaaacacaaagggcttgctgatgcctgtatataaggtcacccggaccaattcagcnatgagaaactgtttgcctcagaaagnnctgctgcctgcttgcccctgcccccttacagnngatgaaaatgctgatgtcttcgctatcatccattttttaaggcttttcccaagattggactaaaacaaactaaatggcaagcgaggatcaagaaaggtgccaagttcttaccctagnacatgcctgaaacgaagtgcccgacgg

SEQ ID NO: 54742 - DNA, 417 bp, Zea mays
  unsure (1)..(417): unsure at all n locations
  Clone ID: MRT4577_149923C.1
cgggccgaccgacgcgtccgccacgcgctttgagagggggatttaaccttttagggcaggcagganaagcggcgcaccaaggtgacttctccttgggcggccggctacttaaataaatcccctcgcctcgcctgcggctgcctcttccctttttccttccgcgcaaatcactcaagtgccagttgcgcggcggatatcgcctctaataccacaccgcaggcaagtggtccgcggaactcgtaagtgcatgtaacatcccattgctgcggctgtcttcgccggtggctgtgcgtaagcaggactcgcatatcgacggatggactcgctgatcgtccagctgttgaatgctctgctctttgcccattaccttggttccgtccattgtagagaacgactactacctcccgcaggctcaca

SEQ ID NO: 54743 - DNA, 303 bp, Zea mays
  Clone ID: MRT4577_149924C.1
gctcgagctcgaccgtgatgaagcaatggcagccaaagatttgcagacagcacaacatggcagtagtcacagattgcaccgttggaatacatacttcaaaccacgctggacattcagacatgctgctacccattacacagactacttctgttcaagagcctgccttgagtttgtccaaggatctgaactcatcatgtattcgaggaacagaggttaataaagtagatttaacagcaacatacaattctgaacgccatggcatcctctgcctcaagtcttttgaccaataactcctgagagtat

SEQ ID NO: 54744 - DNA, 245 bp, Zea mays
  Clone ID: MRT4577_149925C.1
ccggccggggcctgcctgccagcaaaccctcccgatcggccgcactgaaatgatcagagtgagtcccctcctcctcgtccgcccgctccgtgttcattgccccactccctcacgcctctcgcgcccgccgctccaccacccccatccacgctcaggggaagggggtctgggttgcgtacaggcgaaaaggcacgcgccgacgctgccgcgcgaggctcttccgtccccattgccgcgcatatgga

SEQ ID NO: 54745 - DNA, 566 bp, Zea mays
  Clone ID: MRT4577_149926C.1
aaaccctagccgatccgctggctctgccatcgcaagccaatgccccacaccgaaccctagcaacaccatagtccttccacaaccggtgcgaacagtactgcccgaatatggcggccgaacccgccgctacggccgctgcttcggcggcggccgctatctccgctgtcatggactggcgctcctcccccgacgcccgcgccgctgccttcgcgtacctcgaatcagttaagagtggggacgtccgagccttggcaagcacatcatttttcttggttcggaaggaccagacgtcagagatccgcttgcacgggttcaagatgttgcagcacctggtaaggttgaggtgggaggagctcagtgctgcagaacggaatgaatttgctaatatgacaattaatttgatatcggatgttgttggccctcatgaggtgtgggccttgaagagtcaaacagctgctttagtagcagaggtggttcgaagggagggagttgatttggggattactttactcccatctattgtttctctctctaacaatggccctactgaggctgagttagttgcc

SEQ ID NO: 54746 - DNA, 372 bp, Zea mays
  Clone ID: MRT4577_149927C.1
tcgtgcagattggaacctactatagctggccgcccatcatcactttaacattaagggattttttgttttaaagaacaaatgggacacagttgccaatttccatgactcacgattcaacaattcaatacgactcaacaagcgaaccatgccaaatgcaaagacacttagaggaaattacaagactaggacacattattatcccgccgtacctttaatagatggccaaaaaaaaaaggcagcccatgcgttgcccggaaacaagatggatctcacaatactccataacctaaaggaacaagtgaaatattgattagtttttgaaacacgggacggtttcggcaataaaagttgaaccaacactctgtgggaaaa

SEQ ID NO: 54747 - DNA, 1154 bp, Zea mays
  Clone ID: MRT4577_149928C.1
ttttttttttttttttttctttttttcctacatactatgatcagttaaatagtaaacaggtacagaagtccaaatttatgactcacttaaactagagctactgtccaataccaacgacatgcaccagcatcagggcatttgttgggacttcttagccggcttacaaaacaagtagacaaaagaatagcttctaaagccaaaaacggtgaagtagcagccgttttgggtggatttttctggcttctctgtttttttagaagcccaagttccaccaaagagggcctatgatagctaattcgacatatccaatatctggatcggaatgaagttcaaatccatgctcatttgaagcagcatatagtttgtcaagtaaaatcaatcaaacatccaaatgatcatccccttactttcaacatttgatcctcactgcatctccaaggatacataacacaatgcatgcatacctcatccaaggatcggtactggtcaacaatcttggagtacttcctctccagccttggccgcttacccccggctgtcaccagcctagatggcaccgcccgcgtctcgattgccctcagtggtggtgctgacacagagtgtgtatgagccacccccactgttggacgcgagtaagcgctcgatggcaccacaaagtcttcatccgctcggggcagcggcgcactggcacgccgccgtaagctggaggacgaagagctctcatccgcagcgggagcaaaagcaaggtgcggaagaggcggtgggtcccacagctgcgccagagacgcagacgccggctcgtaaagttcgggatgtggggaggctggcggcgacctgcgccgtgccgccgccgattcctgatggtggtcatcctgctgctcagctgagctggcaaggaggctgccgacgatcctggtggcggtctgcaagaccaggaacagcacccacagcagaaaggtgccgaccttgccgaccaccgccaagaagccgctcataccgatgaggagaaagaggatcgccgtgagctcagatgggatagcagaccgacgggttaggggaatttggtacaaggcaggtggggtgtgcagggtttgaaggagtcaggcaatagattttttttttgcatattttgcatctagagaattggatcatga

SEQ ID NO: 54748 - DNA, 223 bp, Zea mays
  Clone ID: MRT4577_149929C.1
gtctattgaacgtatggctaggcacctggttgttatgttgcaaattttatgcgccaaaaaaaaagcttccattgtttttaacttgtgtatttatgcggacgatggtgagtgtatatattctacatgtttagtgatgctttccgagacctgatacaatacctttcttttttaacctgtcacaatgaaatttctcgatgtttttgccaattttaaataaatatat

SEQ ID NO: 54749 - DNA, 141 bp, Zea mays
  unsure (1)..(141): unsure at all n locations
  Clone ID: MRT4577_14992C.1
aattgtngtgancattattatgttcccatcanttctnnttcccatcatcagaacgccnaatcagcaggccgacnacactcattncaacnctgactaatcangcttatcatcaancanatnatgttaatccncacnccagaa

SEQ ID NO: 54750 - DNA, 341 bp, Zea mays
  Clone ID: MRT4577_149930C.1
ggggattgcaggatcaattcgatccatgggcatgaacgttgaatggtactagtacatgtgttatgttgaatctggttctgaggcgaaacaagaaacagagatctcatctatacaccgatcgaatgcttgttttctctaatcgatcatcgacccgtcaccgatgaacgcgaaaacgtggcggaatgcaacgcatggcgctgcgggggggtgtcagaagaggttgaggacctcgcggatggtggcgttgcaaagcgggcagcgcccgcggccggtgcggagctcgcgcgcgcaagcgcggcaaaaggtgtggccgcaagggatgaaggccccgccctttgccc

SEQ ID NO: 54751 - DNA, 499 bp, Zea mays
  Clone ID: MRT4577_149931C.1
ttttgaactttttagtacttcagagttaaactttcatattcctatcttaatcaacacagaaatcttaatttgttcacccctgcttttcaaatgaaagcctattacattcacacaggtacactccatccttcaataccatgccagaaaagaagtcgatagccccaaaaaaaattaaataaatattacacaatttacactctcaactagctattataattaaggggggaaaaatgggttacagatattgaaggatgccatttcaaagcagcatcacctctgggcgtatcaacagcagttgaggacacaaatcgattcagtacccgttgcttacactttcttcccagaaaaaaattgtcattctatgaaaatttaaccttttctgatgccatggtagctgcaagcctcttccaatagcaaaatcacaatatgcatcatgccaacctaatactgcacctattggaatacagctgagcatccttgaatcacaaggactcacatg

SEQ ID NO: 54752 - DNA, 1090 bp, Zea mays
  Clone ID: MRT4577_149932C.1
cctcgaggccggccgggccgaaaaaaaaaaaaaaaaacccctagctaagctgctaagctagggtttccacgcatggcgaccacgccgccgcctacggcgatcctaggcaccctcggcgacttcacatcgcgggagaactgggacaagttcttcgcgctccgcggcacgggggacagtttcgagtggtatgcggagtggcctaacctccgggccccgctcctcgccctcctcggggaccgcggcgccgcagcgggggcggcccaggagatcctggtgccagcgtgcgggagttcggtgctgtcagagaagctctacgacgcggggttctgccgcgtcaccaatgttgatttctcccgcgtcgtcgtcgccgacatgctccgccgtcacgcgcgcgcgaggccagagatgcgctggcgtgtcatggacatgaccgacatgcagtttgcagatgggtcatttgatgtcattcttgataaaggaggactggatgctcttatggagccagaggctgggacaaaactggggataaaatatctgaatgaggtcaagagagttatgaaatcaggagggaagtttgtgtgccttacccttgcagaatcccatgttttagcgcttcttttgtctgagttcagatttggatgggatatgagtattcaagctatagctagtgaatcctctgaaaaatctgcgttccaaacattcatggtggtcatggtaaaagggaagatgggtgtagctcaaacaataaaatcatcattggatcaatctgctgaatactgtaacatgagacaggcaaatgctgtgattcgtgctcttgggaacgagaacatcatccgggagtcatactcgtctagtgttgatgtactgctctcattgcgagatcttcagctaggagctataggagatctgaaagtgattgtcccaggacgaaggaggcaattcattcttggtgaacaggaaacttcgctatattgctacaaggctattttattggatgccaagaagcaaacagaaacctttgtatatcactgtggagtttttattgtccctaaggctcgagctcaggaatggctattttgttcctcagaag

SEQ ID NO: 54753 - DNA, 220 bp, Zea mays
  Clone ID: MRT4577_149933C.1
tcggaaaaattccaataagaaacttatagtaatagatcggactgcagtgtgtggtggcagtggctacaatgaaagaacacggtctttcaattgaaaataccatggcaaaagcttgaataatgtaaacccttaaaatgttaacgtaacattcaagtagctgagcttaaaatcatgagctagtccataaaccaccaaaagttgaaacaccgaaaggggttta

SEQ ID NO: 54754 - DNA, 1301 bp, Zea mays
  Clone ID: MRT4577_149934C.1
actttcatttaagaaaggaaaacaagacctcctcgattggtacatttagagaaatctattacgcggcataaggctcatataaaaaaattggagtcaattctgagactcttggataatgatgagttgagtcctgagcaagtcaatgatgtgaaagatttcctagaagactatgttgaacgtaatcaggaagattttgatgaatttagtgatgttgaggatctctatagcacattgcctatggagaaggttgaagcactcgaagacatggtttcacttgctccttccattcttatcaagggtgttgctgctgtttccactactgcagttttgagtacgaagagtccgacagcaacttcacctactcaggctactgtatcaacaatctcacaagggacatcacaagatcaagcagaggaaacaactacgctagaaagcaatcctgaatcggtgccacaaacaccacctccgaagggtggaaatctgggaccatcagtgccagttgtgcccactgccattagtaccagtgctgcagctgtttccgtttcggcagatactattacttccccaggcccagtacgaccagttattcctgccacagcacccacaatatttgctcctgctgctgttcgaaatgctccagagagcatgcctgctgttgcttcaactcctgcaaacttatctactgccgtgaaggatgatgaaagcatgagtgttcctccacgtagaccatctcctgctactgaaattggaattggcaggggcataactcgaggaacaactagtcaggcattaggtacagctcccataactattggtccagtttcaggaaatggatcgttggttatgcctcttggtagtaaagttcaaccccagcgggggcccaggactaatgatgcaatcggctctgattctgctaacacaaatgaaaaccctattcttggtggaagagtattttctcctccagttgtttctggggttcaatggagacctcaagctgctgctgcatttcaaaatcaaattgaaactaatcagtaccgtggaaggcctgagatttctgctgatcacagggagaagtacatacagagactgcagcaagtacagcagcaaggtggcagccttctgaatgtttcccatataactggcataaatcagaagcaatttccaacaccacagccaaatccccttctacaacagtttaattcacagagttcctctatatcttcccaagtgaatcttgggcttggagttcaaggatcagacgcggggcatataaaaagtgaagatcaacaaattttggctga

SEQ ID NO: 54755 - DNA, 354 bp, Zea mays
  Clone ID: MRT4577_149935C.1
tcccgcgtcgacccacacgtccggtttcactgtttagatactgtacgttttaacctgcacaataatgtcccaagcttgtctactataaatattttgcttccttatcctcctaactctttctccacatgtttctactgcaaccattttaccacaatgctcacaagctcctataacttcccttcttcccccatacctctcaccatcattgtcttcaatttctaaaatcccaattcttcaaccctacatgatccaacaatcaattccaacattcatctttaccattatcacccttaatccttcaacaaccttcatccctattacttcaattacttttttttcattttttttctcatt

SEQ ID NO: 54756 - DNA, 204 bp, Zea mays
  Clone ID: MRT4577_149936C.1
cctccctctcctgatcccccacctgctctttcttcgtccaacgcatctctccccttatcagccatcttggcaaaatcgccatttctgccactttagatgctctttaagctgcaacatcatttccataacatgaccaatcacacctaccttaaaactctctaccatattatcaccttcttttccatccctcttgcacttacttcc

SEQ ID NO: 54757 - DNA, 3073 bp, Zea mays
  Clone ID: MRT4577_149937C.1
ggtccaaatcatcgtctgtttcccctccccagtctccaccactccccctgccgccccaatcgtaaaccctagccgcgcctgagcgtgagacatccacgtcgcagccatgggcgccagccggaagctgcagggcgagatcgaccgcgtccttaagaaggtccaggagggcgtcgacgtcttcgacagcatctggaacaaggtctacgacaccgagaatgcgaaccagaaggagaagttcgaggcagacctcaagaaggagatcaagaagctacagcgctacagggaccagatcaagacgtggatccagtctagcgagatcaaggacaagaaggctctgatggatgcccgaaagcagattgaacgagagatggaacgatttaaagtatgtgagaaggaaacaaaaactaaggccttctcaaaagaagggttaggtcagcaaccaaaaacagatcccaaagaaaaggccaaagctgaaacaagagactggcttaataatgtggttagtgatttggaaagccagattgataacttcgaagcagagattgaaggactttcaattaaaaagggaaaacaaagaccgcctcgattggtacatttagagaagtctattacgagacataaagctcatataaagaaattggagtcaatcttgagacttttggataatgatgagttgagtcctgagcaagtcaatgatgttaaagattttcttgatgactatgttgaacgtaatcaggaagactttgatgaattcagtgatgttgaggacctctatagcacattgcctatggagaaggttgaagcacttgaagacatggtttcacttgctccttctagtcttgtgaagggtgttgcttctgttccgactactgcagtttcgagcacaaagagttcggttgcaacttcacttactcagcctacagtatcaacagctccttcacaaagtacatcacaagatcaaacagaggacacagcttcccaagaaagcaatagtgaatctgtgccacaaacaccacctccaaaaggtggaaattctggaccttcaataccagctgtgccaattgctgtcagtactggtagtgcagctatttctgtacttgcagaaacaattagttcccctgtgcgaccaattgttcccaccacagtggctacaatactttcttctgctattccacgaagtgctcctgagaatacatctacggttacctcaattcctgcaaacttatctatcaccttgaaggatgatgaaagcatgagttttcctccacgacgaccatctcctgctattactgaaattggaattggcaggggcatagctcgaggaacaactagtcaggcattaggtacagctcccataactattggtccagtcccaggaaatggatcggttagtgcacttcctggaataaatgacttgtccaaaagaaatatattgaacactgacgagaagattaacagtggtggtctttctcagcagttggttatgcctcttggtagtaaagttcaaccccagcaggttcccaggactaatgatgcaattagctctgaatctgctaacacaaatgaaagccctattctcggtggaagagtattttctcctccagttgtttctggggttcaatggagacctctaggtgctgctgcatttcaaaatcaaagtgaaattagtcattttcgtggaaggcctgagatttctgctgatcacagggagaagtacatacaaagactgcagcaagtacagcagcaaggtggcagccttctgaacgtttctcatataactggcataaatcagaagcaatttccaacacagcagccaaatccccttctacaacagtttaattcacagagttcctctatatcttcccaagtgaatcttggagttcaaggaacagatgctgggcatataaaaagtgaagaagaagaacaacttttggctgaagatggtgtggaatcttctgcaacaacaggagcaaataaacaaacaagtgaagatgacacaaagattccatattcgaatccttcagcacctgcagcagaaagcaatcagctgcctagggatactgatccatcacctgggcagcctttgcaacctggaatgtcatcatctggtgttggtgttatcggccgaagaagtgtatctgatcttggtgcaatcggagataaccttactggaacttctgctagttctggtcatgatcagctttataacctgcaaatgctagaagctgcattccacaagcttccacaaccaaaggactctgagcgtgctaaaacttacatcccgcggcaccctgcagttacccctgctagctatccccaagttcagccatcaattgtatctcatccctccttctgggaaagaattggtagcgacacattagctaccgacatgctattctttgcgttctattaccagcagaacacatatcaacaatacatggctgctagagaattgaagaagcaatcgtggagatttcaccggaggtacaatacctggttccagcggcatgtggagccacaggttacgactgatgagtatgagcggggatcatatgtatactttgatttccatgtcaccgaggatggctcaggatggtgccaaagaatcaagaatgacttcacattcgagtacaacttcttggaggatgagctatcagtacaaacaaactaaagtgggctgtaggtctaatcaaaccattctgtccattgtgaattttgtagttctcatgaggtgactgacttataatctggactcttgtaaaattctccagctgtaaactaatggtgaagttggagagcattccttgtaggttctgatgcaccgaacatgctgaaattagaatcgggttgtgccagtcaaatatatttgactccgctgtatattgtcgttctcatctgctttagcagcaacaattaagtcagcttagttctaaagctacagtggagttaaaacccccaacaaaagcacaaaataagtttcagggcataactgtttttcgtttgttcatgtttaaggctaaggcacatgaataactgttttttattccttatttaaggctaaatttttagatat

SEQ ID NO: 54758 - DNA, 322 bp, Zea mays
  Clone ID: MRT4577_149938C.1
gcaggcttggagggttaatttacccacagaatctgatagtaataggggagggaggctgctgtgggtttaactcctgggttggctgttaggtagacaggctgggaaaaggcccgtgagtcactgtaaacacaggtccaacttggccctgactcctgcggctttatggggaagcgtgacagaaacgatgggtgctgtggtcctctgcaggacctcaccccttaacttcctcatacagactggcactggagcaggcctctcatgtggcagccacatgtggcgttgtgaggccccccatgtggggtctgtggtgagagtctgtagg

SEQ ID NO: 54759 - DNA, 3415 bp, Zea mays
  Clone ID: MRT4577_149939C.1
aattcggcacgaggattcggctcgagctctcctccgctctgctcctttgctccccacggcaaaccgtaaaccctagcctgaggggcacccctgtcgcagccatgggcgcaagccggaagctgcagggcgagatcgaccgcgtcctgaagaaggtccaggagggcgtcgatgtctttgacagcatctggaataaggtctacgacactgagaatgccaaccagaaggagaagttcgaggcggacctcaagaaggagatcaagaagctgcagcggtacagggaccagatcaagacgtggattcagtccagcgagatcaaggacaagaaggctctgatggatgctcgaaagcagattgaacgagagatggaacgatttaaagtatgtgagaaggaaacaaaaactaaggccttctcaaaagaagggttaggtcagcaaccaaaaacagatcccaaagaaaaggccaaagctgaaacaagagactggcttaataatgtggttagcgatttggaaaaccagattgataacttcgaagcagagattgaagggctttcaattaaaaagggaaagcaaagaccgcctcgattggtacatttagagacgtctattacgagacataaagctcatataaagaaattggagtcaatcttgcggcttttggataatgatgagttgagtcctgagcaagtcaatgatgttaaagattttcttgatgactatgttgaacgtaatcaggaagacttcgatgaattcagtgatgttgaggacctctatagcacattgcccatggagaaggttgaagcacttgaagacatggtttcacttgctccttctagtcttgtgaagggtgttgctcctgtttcgactactgcagttttgagcacaaagagttctgttgcaacttcacctactcagcctacagtatcaacagcttcttcacaaagtacatcacaggatcaaacagaggagacagcttcccaagaaagcaatcctgaatctacgccacaaacaccacctccaaaaggtggaaaccctggaccttcagtaccagctgtgcccattgttgtcagtactggtagtgcggctgtttctgtacctgcagaaacaattagttcccctgtgcgactaactgtacccgccacagcagccgcagtgctttcttctgctattccacgaagtgctcctgagaatacacttgctgttacctcaattcctgcaaacttatctaccactttgaaggatgatgaaagcatgagtgttcctccacggcgaccatctcctgctattactgaaattggaattggcaggggcataactcgaggaacaactagtcaggcattaggtacagctcccataactattggtccagtctcaggaaatgtatcggttagtgcacttcctgcaataaatgacttgtccaaaataaatatattgaacactgacgagaagattaacagtggtggtctttctcagcagttggttatgcctcttggtagtaaagttcaaccccagcaggttcccaggactaatgatgcaatcggctctgattctgctaacacaaatgaaaaccctattcttggtggaagagtattttctcctccagttgtttctggggttcaatggagacctcaagctgctgctgcatttcaaaatcaaagtgaaactgtatgtatctcttcagttaatttattttattatatagttcaactgcctggcgtattggtgagatgccttcccggtgagcccaaggtcctgtgtttgacccagcctctctaaaaaaatgcgggggtaaggtttacctcggttatttcttccccagattccactcatgggagctgccagtactgggtctgtcctttttatatagtccaattggccttcttcatttaatctgatttattaatagcaaatgctccatccagccaattttaagtgatgttctggaatatttctccctcggttaaaattatagggtgtattagtaggaacgggaacaatagttaatggtatgaaatcaagtgaatgagggaacaagaattaccaagctaccccaattccagtacactggagacatatgatagaatagtcagtgcatgcaggtttttgtgataaatggaagcaatataaaaagaaaggaggtatcaatttagttttcaagtcaactttgttcaaaatatcgtttttttactggagttgatcaaacatgtgtaaggttattctgaattcgttcttggttttgtgtgaattgttaatgttcctgtgttcaatgcttctgtttgtgggcatccgaataatccaaataactgatgcttttctactgaaagaacatttattttgaattttgatttgataattcctcattgggctcacaaatacttgtttgcctatatgacattttttctcgctgtatttccagaatcagtatcgtggaaggcctgagatttctgctgatcacagggagaagtacatacagagactgcagcaagtacagcagcaaggtggcagccttctgaatgtttcccatataactggcataaatcagaagcaatttccaacaccgcagccaaatccccttctacaacagtttaattcacagagttcctctatatcttcccaagtgaatcttgggcttggagttcaaggatcagacgcggggcatataaaaagtgaagatcaacaaattttggctgaagatgttggtgtggaatcttccgcaacaacaggagcaaataaacaaacaagtgaagatgacacaaagattccatattcggtatatcaagcttttgcactgttcgagagaaaaaaaaacttttgtacatgtcctcaaacttttatttgcacgcatctgctcatgaaacggttttggctgtgtgctcagtttgtttcttccaaccgcgtcagatgtttgagtttagctaattagaaaaacaaactaacatgcaaagctgaagttaccaaacagttataaaatcagttcgattgttactttgtttggaattctacgcaaattccttttgaaatttgggagcaggggtaattacagttataattttgctacagcttgacttatccttaaaataggcaaaagcttctcagtactgtcaataatgcttataatgtgtatattattgaaagggaagtatgcgaggaactataaatacataaacatcaaggaacatgttccatgtttttttctttaaagcaatatacaaaatatttgtaatttttaggattttgtttgccactgagatttggaaaacacgatatatatacacagatgctatggtccttgcaaaaccataagtgggaactttttctcgaaacacgtaggagaactgcacccattatatattaagcaaatagagaaaaggtctatagaagacccaataacaaaagaaaaagaaaaaaagaaagaaacc

SEQ ID NO: 54760 - DNA, 735 bp, Zea mays
  Clone ID: MRT4577_14993C.1
cggctcgagatacaacaacacatccatcacttttttatttgttttttcttttcattttaaaaaacttcaaaacaaacaactcaaaatgtcagctggaaagtgtgctgcttgtggcaagactgcctacccattggaaagtgtcaccgctttggaacaaaccttccacaagatttgcttcaagtgtgatgtgtgcaagggaacactcaacttgaagaactacaagggtgttaacggaaaggtttactgctttacccacacccctgtggacagaagctcaactggttccgactccgtcaccacaaagactgctatgcaggcaccaaagaagcaagctgagggtctcggaaccgctcaaaagggaactggtgagaagccaaacgttggcctcgacaccgtcactgttcaaaccgccatcaaggcaccaaaggctgttgctgagggtcttggtaccgctcaaaagggaactggtgagaagccaaccgttggcactgaatccgttcacttgaagagtgctttgagcgcaccaaaggtcagagccgagaacatcggaactgtccacaagggtgactctatcactgctccacaacaagcctccttcgacgtcgaacacccagcaccagcttccgaagaagcccaccaccacgaagaggcagaaccagtctcttacgatgaacaaccagctgacgagtaaggagtgacctcgttgtatatttagcgaccatacgacataaacag

SEQ ID NO: 54761 - DNA, 1097 bp, Zea mays
  unsure (1)..(1097): unsure at all n locations
  Clone ID: MRT4577_149940C.1
agcaaataaacaaacaagtgaagatgacacaaagattccatattcgaatccttcagcacctgcagcagaaaacactcagctgcctagggatactgatctatcacctggacagcgctttgcaacctggaatgccatcatctggtgttggtgttatcggccgaagaagtgtatctgatcttggtacaatcggagataaccttactggaacttctggtagttctggtcatgatcagaattattatctgcaaatgcttgaagctgcattccacaagcttccacaacccaaggactctgagcgtgctaaaacttacattccggggcaccctgcagttacccctgctagctannnnnaagttcaggcatcaattgtatcgaatcccaccttttgggaaagaattggtagcgacacattagctaccgacatgctgttctttgcgttctactaccaacagaacacatatcaacaatacttggctgctagagaactgaagaagcaatcatggagatttcaccggaggtacaatacctggttccagcggcatgtggagccacaggtcacgactgatgagtatgagcggggatcatatgtatactttgatttccatgtcactgaggatggctcaggatggtgccaaagaatcaagaatgacttcacatttgagtacaactacctggaggatgagctatcagtacaaacaaactaaagtgccatggcagtaggtctggtcaaacctttatgtccaatttgaattttgtagttctcataagagcttgttcggttgcttctggatcaaagaaggttggaggggattaaattccttctagtcaaaattgaatagaaattgatttaacccccctcaatctcctttatccagacgcaaccgaacaatgcctaaggtgactgactgactgttataatctggacccttgacaaaatctccagctgtaaactaatgtgtgaagttggatgcaccgaacatgctgaaattataatcgtgttatgccagccgaaaaaaaaaaaaaaaaaaaaaaaaaaaaaaaaaaaaaaaaaaaaaaaaaaaaaaaaaaaaaaaaataaaaaaaaaaaaccccccccc

SEQ ID NO: 54762 - DNA, 2220 bp, Zea mays
  Clone ID: MRT4577_149941C.1
ctcgaggccggccgggccgggacacacactctctctctgatcagtcatcgccaccggaccaccgtcacgcggagctctctcctactctcctcttcccctctaaaaccccacgaaatcgccgaaaggagtagcggacgcagcccccaccaccacttgttcaatctctctcctctcccgtctcgcctcccggagcgcaagaaaagctcggattcctggtggtttctaccatcctccgtcctcgatctgagcgttgcctgcttccctgccccccccgctcagatgtccgccttccgtgtcctgtaaaatctttcgccgcgcagcaatcttcccccacttgtcggctgtcctgctgctgctgctgccaatggcgaccaagggagggaacgcaaggggcgttccggtgggggcgctgctggtggccgcgctcctccttagctccttggttcccacctccgcgtcctcgtaccccgcaagggtcgtgagcgggttcctctccaatgcggcgtcggcggtggtgaagcggctgtggtcgctcaaatccaccaccaagacagcagcgagcgggggaaagtctatggtgaagtacgagggcgggtacactgtggagacggtcttcgacggcagcaagctggggatcgagccctactccgtggaggtcacccagagcggcgaactactcgtcatggactccatgaacagcaacatctacaggatggcgctgccgctgtcccgatatagcaggccaaagcttgttgccggttctcccgaaggatttcctggtcatgttgatgggaagctgcgagaggcgaggatgaaccatccgaagggatttacagtggatgacaagggtaacatctatgtggctgatgccatgaacatggctattagaaagatcagtgatacaggggttacaactattgctgggggaaaatcaggcagaggagggcatgttgacgggccaagtgacgaggcaaaattttctactgattttgaagttcgttacattggcagtagctgctcgcttctggtgattgacagaggaaaccaagcaatccgggagattcagctccactttgatgactgtgtataccagtatgaagctggttttcctctaggagtggcactacttcttgctgccgcattctttggctacatgcttgcactgctccaacgccgagttttagggatgtattcaaatggagatgagcaggaagacgagagtccagtgaaagctaaactatctagcatcccacctccgtaccagaagccactgaagtcttctcttcgccccccgctgattccaaatgatgacgaacccgtgaaacaagaggaggaagggctcttcacgtcgattggcaaactcgtgggtgtagcaagatcatcagtcgcagagatcgtcggcgccacattctccagaaagaagcgagtgaacgttcaccaccaccagctggggcaggccgacctcgtggccagtgcaagagagctacgccatcccgcggggacgagaccccgccgccactggacacgagggcgccgaccccacgcaagagctacgccttcatgtcaaaggagccggagaagatccaccacatccggcacggtcggcctcagtcacacggctggaccggagaagctgctgctgctgctcctcagcagcaggcggcgtcgctgccgccgcagcagcagcagcagcagcagcaggtgcatcaccagcagtaccacaacaggcagtactcggccgggccgcagaccttctacgagccgagctgcgatgcggcgaaggagatcgtcttcggagccgtgcaggagggggacaccggccgccgccgtcccgtggagatcaagcccgtgaaccacggcgacgtggcgccgttcgagctgaacgggctgcggttccgcagcagttacggcatgggctaaaaccagtggcaataagcagtcgaggaagagatctattgttgcctccgtccgtccttagtagtgttttggcgtcctccgttgtactggtagctgactgtaaagtgtaaggaaaagagagggagcgatacagagatatcagtgcactcgaggggagcatttgacaagtgcaacggagaagttgggagttttggtaggaagagcttgctcatcatcatggttattggactctttactggcggtgatatatataatatatgtatgtatatgcgttttgatctcataattaaaaacgcaaaaaag

SEQ ID NO: 54763 - DNA, 592 bp, Zea mays
  Clone ID: MRT4577_149942C.1
gccggcagggtcggggaatttttatatagggtgtgccgcaaagttcgaggcggacctcaagaaggagatcaagaagctgcagcggtacagggaccagatcaagacgtggattcagtccagcgagatcaaggacaagaaggttagtgcctcttatgagcaggctctgatggatgctcgaaagcagattgaacgagagatggaacgatttaaagtatgtgagaaggaaacaaaaactaaggccttctcaaaagaagggttaggtcagcaaccaaaaacagatcccaaagaaaaggccaaagctgaaacaagagactggcttaataatgtggtgtgttggaatcctgaattgctactcttatgctcttatgttttcatatctgttttttggtatactaactgaaccacactgttaaatcgcaacatatgtatactattttgtttgagaataccttggatctttaattcatttccgaggacatggtttgtgtccctttggcctcgtatcaattcgaatactatatattatttgtagatcaatgtagaatagaatcttcttgtgatgatacaaaaaaaaaaaaaaaaaaggccccta

SEQ ID NO: 54764 - DNA, 151 bp, Zea mays
  unsure (1)..(151): unsure at all n locations
  Clone ID: MRT4577_149943C.1
gncgcccgcacgcgtacgtnagctcggaanttcggctcgngnntcangtnncanannnagtggnctccagtggcaacaatagacgnggcantcngccgccaatanatnctgccggtccntatncncctcattgnnnctncatgtgaagnct

SEQ ID NO: 54765 - DNA, 1131 bp, Zea mays
  Clone ID: MRT4577_149944C.1
agcgggtccaagtcctaccagctcgggcacaggctgtcccttaaatggagcacgggggctggtccgaggattgggtgtgtcaaggactacccaatggagctcaggatgcaggctctggagatggtggatctttcgccaagggcgtcaactccgtcggcgtcgaggcgactgcctccgtgcttgtctcccactgaaatcgccttgccaacatcactgctcgccctgatctaggcctccctgcctgttgtcctttcttcttgtcctttcttcagcactgcaaagatcacatacctggtctgttgtcctttcttcttgtcccctgtcctgtggttccacagagagtagcacaatgcaatgctctccagctgaaataggctatgggcaagctgattctgtcacatttcagacatggtagctttgaagcagatggtgatggtatgtttttgttaccgtggtttaaggaacctgcttttcattctgttgagcaccattttgagcctggcggacgggtccggccctgaggccggacggtccgcggtccggacagtccgcgcctgtgggccggacggtccgcgcatgcgcagaccagtttagggttccgagttttgtgctatgtttgttggctagatttgcggaattagcttggaccccagtagtgtaaagggtccagcccttggattccttaaaaaaaattgtcaccagtaaaagtccaataacaggttaatgaattaagttgtggctccagccaggtaaaaaaagcatggaactgatatctaatgaaactctagcgttcttacatcagcaagattaactgggatgacagtgtaatagtaattttatttattttctgataaatgtagttaaactgatgttgctgagctttgatatttgccatgatgatatattcttcagggctagtttagaaacttaaaccccctccaggattcctagggattgagtggaaaattagcttatttccccctcaatttttgggaataattggagtagatttaagtttccaaactagcccttaggggatttaagcttccaaactaagtgtaatggtgcttttatttgttttctgataatgtagttgtccgatattgctgtggcaaaaaaatttgacaacag

SEQ ID NO: 54766 - DNA, 412 bp, Zea mays
  Clone ID: MRT4577_149945C.1
gggcagttccaaccacctcgctgtgtcccttgaccctccacccataaaccggaatcggagccagacacagagaacagagaagtcgccgttggtgccgaagagaagatggagccatcttggtcgactcatgcgtacatcgctgctccaccttcggaggtttgccatggacgatctctagggttcgcgtaacgtatccgtggtggttgcgggagtgatgggctgttggggtggctgggattcatcaccggagactcagagccgcgccacagcataggcggcaccactagcgtcctcgcttcaggtcaagaacaggtactgccaagatgaggagcatgaaggatgacgtgatgagttcgtgagagctagactgtcatctcccaatcaactatggtcgtggaggatcgttggcatc

SEQ ID NO: 54767 - DNA, 308 bp, Zea mays
  unsure (1)..(308): unsure at all n locations
  Clone ID: MRT4577_149946C.1
accaaaaagttttaagttccaattgcgttgnatgcactcgcttattnaccacattacaccaacgttccagacccagcccggacccaggcaaaaactgtgtttatattagcattaagcgcaacttatcctccaccacgacgggggaaaagaatggaacatgggtaaaagttataccttggttacacaggctttcttgttttgttgagtgatcagatgatgggaagatagacagaataaaagtaagccttttaaagagtcaaagtgcttcagttttttgtatcatgggttttgaatatgaaataggtatg

SEQ ID NO: 54768 - DNA, 1342 bp, Zea mays
  Clone ID: MRT4577_149947C.1
tgggcttcggcacaagataatgttttgtttccgtgcttgagccgttaatgcaataacttttttttggcagctcgcacttccccaagcccaagttcagacgcactagcagtaaagttcgtagactacacaatagaaacttgtgcgttgagaaagcttgaacaatccacagacaaaattacatggtcacaccatgacacactcgatcaaaacagccactacgacagatgcaacgattcaaggcggggttacattagcaatctatagcacaaaggcgtcgcagcacacagatttcagagcctctgcttctcgatgtgaaccaatttcactgaatggtccttgggactcgcatcccgaacccacgcttcatcttctccaccgttggtgcgagtttaccaaggcaataaagctcttcaccggatacttcgtcggatactttaccagaaatctcaactctgtatgatctatcaggagaatcaggaagccctcgacccacaagtaaatccaagtccttctggtgaagttctcggctgttgatgaacacaccagtatttccgccagcacagttcttaggcataggatagttaaattctgcaatgtacgggggtatcatgccaaggcagggctgtcctatgacaccccagaatccagcacggtagtcataccagtattcacccggatagattggtccagcaatcttctccgccttcctcacagcacgatcagaaatgggatagccattgatgaacacctttgctctgccattgcccatcccaccgttaattttaaagctcttttttatcaggctggagaaaaaggagtcgcccgattttgtggcccttgggtgatcgacgcattgtgctccgtcacctggatcttgactgtactcaggatcatcaaactcatcatctgatgggtctagcacgcttgctacaggtacatctttcactttgtttggcttaaaactttcagttaacacacccttctcatgttcagaccgggtgcttctgcttcctttgccagacccatcaaccaccatctctgatggagaatatccaaaatgatcacgaagaggcaaacttggaacacggataaccacttcagcatcaggaggaaggtctctagatccagagttcttctgtgagttagaactagctcggctattttcatcctcagaaatgctggcagaagatgatatgcattgcattttgtctgcttcactggaattcgatggtaaatctttttcttgagagaagtgactgcctgcagaaaagctataagatggaagaagtctctcgtcagcattttgtccattgcttccttggccattgttggagtaattttt

SEQ ID NO: 54769 - DNA, 171 bp, Zea mays
  Clone ID: MRT4577_149948C.1
ttcctatcagtccaggaaccccgtacccgcgcgccgcgatccttaccaccgtgatcgcatgactccatccccgtccgggaaccccgccctctcctcgcgacgcagtgcgaccactcacccaccttctcttgtgaaccgttaccgatccatgtagagggcaccttttttttt

SEQ ID NO: 54770 - DNA, 1030 bp, Zea mays
  Clone ID: MRT4577_149949C.1
agcagtggtaacaacgcagagtacgcggcctggtttccataatcccgtctattcatggcatccttagatggtgtttatgtccactcaagtaaaacaccacacagaaatagtgtttctatgatattgagggcattgtattcgtacgagagggtattagagtacaactagtggatgaagacattagtgggctagctaatgaccttttgtgataatatgttaactataatcccgtctattcatggcatccttagattgtgtttatgtccactcaagtaaaacaccgcacatcaatataccacatcgtttctcaaaataaaataaagactatggaaaatttagccaaattgcgtaagagatctgtccaaacataggttaaggttgtaagacaccttttttccaccatacagttgctaaaaagttggaatataaagaattcaaaacaatagatcatctttgaaacaaaaaatagtgtttctatgatattaaaggcattgtgttcgcacgagagggtattagagtacaactagtggatgaagacattagtgggctagctaatgaccttttgtgataatatgttaactataatcccgtctattcatggcatccttagattgtgtttatgtccactcaagtaaaacaccatacatcaatataccacatcgtttctcaaaataaaataaagaaaaaggtgataaaaagttggaatataaagaattcaatacaatagatcaacttttaaaccacaaatgatgtttccctgatgtcaagggcattatattcggatgagagggtattagagtacaactagtggatgaagatgtcattgggctagataatgaccatttgtgataccaggtttccgatgaattcttttataatcccctctattcatggcatccttagattgtgtttatgtccactcaagtaaaacaccatacatcaatatgacacatcgtttctcaaaataaaataaagactatggaaaatttagccaaattgcgtgagtgaactggccaaacatagattaagg

SEQ ID NO: 54771 - DNA, 407 bp, Zea mays
  Clone ID: MRT4577_14994C.1
cggacgcgtgggcggacgcgtgggttcaccggcaaggccaccttcgactaatcacacttcacgtacgccgcacgccctccctgccggggattgaaaattaaactaagttactatgtattatttataagagaatataataattttgctggtactacggtggtatgattatataagatgatcatgatgattgtttaattatattaaaaaaaaaaaaaaaaaaaagggcggctgttgtagatgaaacattattaactactgcttgatacgacataattcttctataatgtgatcaaaaaaaaataaattagtggtcgttttataacaacgtgactagaaaaaaaatcgtgttgctaaacaaattaatcttgtagcacaacatcctttttttagcagttggaataatatat

SEQ ID NO: 54772 - DNA, 263 bp, Zea mays
  unsure (1)..(263): unsure at all n locations
  Clone ID: MRT4577_149950C.1
aaaaaaaangaaaaaaaaaaaaaaaaaaatttaactttttaaaaaagaaaaaaaaaaaaggaaaacggggaaaaaaaaaggggggaggggaaaatcgggccccccttaaaaaaaaccaaaagctacgaacgcgggcaggcaacgaaaaacctctataaaagggccaccaaaataaaatcaacgggccgcggtataaaaacgcgggaacgggaaaaacccaggcgggaccaaacaaaaacgcctggcaggaaaaccccctttcg

SEQ ID NO: 54773 - DNA, 1140 bp, Zea mays
  Clone ID: MRT4577_149951C.1
tattaactgcatggtattcacatgagtgagtattagagtacaactagtggatgaagacatcattgggctagctaatgaccttttgtgatactaggtttcctataatcccctctatccaaggcatacatagatggtgtttatttccactcaagtaaaacactacactttattatgccacattgtttctcaaaataaaataaagaccatgggacatttagccaaattacataagagatctgtccaaacataggttaaggttgtaaggcacctttttccatcatacagttgctgaaaagttggaatataaagaattaaaacgaatagaccaactttgaaactaaaaatagtacttctatggtaatgagggcattgtattcgaatgagagggtattagagtacaacacactgaatgaagacattagtgggctagctaatgaccttttgtgataatatgtttcctataatcccctctattcaaggcatacttaaacggtgtttatgtccactcaagtaaaacaccacacttcaatttgcaatgtcatttctcaaagtaaaataaagaccatgaaaattttagccaaattgcgtgagagacctttccaaacataggttaacgttgtaaggcacattttttaaaccatgcaaaaagtcggaatataaagaattcaatacaatagatcaccttttaaacctcaaatgacgtttctatgatattgtgggcattgtattcacactagagggtattagagtacaactagtggatgaagacattattgggctagctaatgaccttttgtgatacctggtttccaataatcccgtctattcatggcatccttagatggtgtttatgtctactcaagtaaaataccacacaaaaatagtgtttctatgatattgagggcattgtattcgcacgagagggtattagtgtacaactagtggatgaagacattagtgggctagctaatgaccttttgtgataatatgttaactataatcccgtctattcatggcatccttagattgtgtttatgtccactcaagtaaaacaccacacatcaatataccacatcgtttctcaaaaaaaaaaaaaaaaaaaaaaaaaaaaaaaactctgcgttgttaccaacgcttgct

SEQ ID NO: 54774 - DNA, 376 bp, Zea mays
  unsure (1)..(376): unsure at all n locations
  Clone ID: MRT4577_149952C.1
tcgcccgggtctctgttcccagccactcaccccatggccgcgcgcacccaaaacccgcaggggaagaaactgaaaacatggtacgagcagcacggctcttacctcaacttgcgccgccttttcgaaggagacagggaccgctttaaccgctttatcttgaaccttaacaccaaccatgggcatattctggtggactactccaagaacctgttgacggagactgtgatgcatattctggtggacgtggctaattccatgggtgtggaggccgcccgggagcgcatgtntactgttgagaagatcaacttcactgaagatcgtgctgtgctgcacgtggctccttctgaaccgatcaaacacacccattttggtggat

SEQ ID NO: 54775 - DNA, 4305 bp, Zea mays
  Clone ID: MRT4577_149953C.1
ggccgggagtcggttcctcttttctgttattgtgccgaagcctttctgcacatagcttcgtgatcgtcttatcattcgtcatgatcgtttttcattgcagtcaagcttcgtcttaaccatgctcttgtatattcgcgacctgactccgaaggtgcctgtttcgaaggtgcctgttcacatattacactttgaaaatattgtcaaactatgtttttgaggaccttcgggagccgaaggcccccaacatggtcgcaatagatcaccttttaaacctcaaatgacgtttctatgatattgtgggcattgtgttcacactagagggtattagagtacaactagtggatgaagacgttattgggctagctaatgaccttttgtgatacctggtttccaataatcccctctattcaaggcatacctaaatggtgtttatgtccactcaagtaaaacatcgcacatcattataccacatcgtttctcaaaataaaataaagaccatgggaaatttagccaaattgcacgagagaactgtccaaacataggttaaggttgtaagacacctttttccaccatacagttgctaaaaagttggaatataaagaattcaaaacaatagatcaccttttaaacctcaaatgacgtttctatgatattgtgggcattattcacacgataccctcggggtctgccgggagtggatgaagacgttattgggctagctaatgaccttttgtgatacctggtttcctataatcccctctattcaagccatacctagatggtgtttatgtccactcaagtaaaacactacactttattatgccacattgtttctcaaaataaaataaagaccatgggaaatttagccaaattacataagagatctgtccaaacataggttaaggttgtaaggcacctttttcgatcatacagttgctaaaaagttggaatataaagaattataaagaatagaccaactttgaaactagaaatagtgtttctatggtaatgagggcattgtattcgcatgagagggtattagagtacaatacaactagtggatgaagacgttattgggctagctaatgaccttttgtgataatatgttaactataatcctgtctattcatggaatccttagattgtgtttatgtccactcaagtaaaacgccacacatcaatataccacatcgtttctcaaaataaaataaagactatggaaaatttagccaaattgcgtgagtgaactatccaaacattggttaaggttgtaagacaacttttttccaccaaacagttgctaaaaagttggaatataaagaattcaaaacaatagatcaccttttaaacctcaaatgacgtttctatgatattgtgggcattgtattcacactagagggtattagagtacaactagtggatgaagacgtcattctagctaatgaccttttgtgattctaggtttcatcccctctaggtttcctataatcccctctattcaatatgccacatctctcttagtgggctagctaatgaccttttgtgataatatgttaactataatcccgtctattcatggcatccttagattgtgtttatgtccactcaagtaaaacaccacaggtttccaccatacagtttctaaaaagttggaatataaagaattcaaaacaatagatcaccttttaaacctcaaatgacgtttctatgatattgtgggcattgtattcacactagagggtattagagtataactagtggatgaagacgttcttgggctagctaatgaccttttgtgataccaggtttccaataatcccctctattcaaggcatacctaaatggtgtttatgtccactcaagtaaaacatcgcacatcattataccacatcgtttctcaaaataaaataaagaccatgggaaatttagccaaattgcacgagagaactgtccaaacataggttaaggttgtaagacacctttttccaccatacagttgctaaaaagttggaatataaagaattcaaaacaatagatcaccttttaaacctcaaatgacttttctatgatattgtgggcattgtattcacactagagggtattagagtacaactagtggatgaagacgttattgggctagctaatgaccttttgtgatacgtggtttccaataatcccgtctattcatggcatccttagatggtgtttatgtccactcaagtaaaacaccacacaaaaatagtgtttctatgatattgagggcattgtattcgcacgagagggtattagagtacagctagtggatgaagacattattgggctagctaatgaccttttgtgataatatgttaactataatcccgtctattcatggcatccttagattgtgtttatgtccactcaagtaaaacaccacacaccaatataccacatcgtttctcaaaataaaataaagactatggaaaatttagccaaattgcgtgagtgaactgtccaaacataggttaaggttgtaagacaacttttttccaccatacagttgctaaaaagttggaatataaagaattcaaaacaatagatcaccttttaaacctcaaatgacgtttctatgatattgtgggcattgtattcacactagagggtattagagtacaactagtggatgaagacgttattgggctagctaatgaccttttgtgatacctggtttccaataatcccatctattcatggcatccttagatggtgtttatgtccactcaagtaaaacaccacacaaaaatagtgtttctatgatattgagggcattgtattcgcacgagagggtattagagtacaactagtggatgaagacgttattgggctagctaatgaccttttgtgatacctggtttccaataatcccgtctattcatggcatccttagatggtgtttatgtccactcaagtaaaacaccacacaaaaatagtgtttctatgatattgagggcattgtattcgcacgagagggtattagagtacaactagtggatgaagacattagtgggctagctaatgaccttttgtgataatatgttaactataatcccgtctattcatggcatccttagattgtgtttatgtccactcaagtaaaacaccacacatcaatataccacatcgtttctcaaaataaaataaagactatggaaaatttagccaaattgcgtgagtgaactgtccaaacataggttaaggttgtaagacaacttttttccaccatacagttgctaaaaagttggaatataaagaattcaaaacaatagatcaccttttaaacctcaaatgacgtttctatgatattgtgggcattgtattcacactagagggtattagagtacaactagtggatgaagacgttattgggatagctaatgaccttttgtgatacatggtttccaataatcccgtctattcatggcatccttagatggtgtttatgtccactcaagtaaaacaccacacaaaaatagtgtttctatgatattgagggcattgtattcgcacgagagggtattagagtacaactagtggatgaagacgttattgggctagctaatgaccttttgtgataacaggtttccaccatacagttgctaaaaagttggaatataaagaattcaaaacaatagatcaccttttaaacctcaaatgacgtttctatgatattgtgggcattgtattcacactagagggtattagagtataactagtggatgaagacgttattgggctagctaatgaccttttgtgataccaggtttccaataatcccgtctattcatggcatacctagattgtgtttatgtccactcaagtaaaacaccacacatcaatataccacatcgtttctcaaaataaaataaaaaaaaaaaaaaatttagccaaattgcttgagagaactgtccaaacataggttaaggttgtaagacacctttttttcccccatacagttgctaaaaagttggaatataaagaattccaaacaatagatccccttttaaacctcaaatgacgtttctatgatattgtgggcattgtattcgcacgagagggtattagagtacaactagtggatgaagacgttattgggctagctaatgaccttttgtgataatatgttaactataataccgtctattcatggcatccttagattgtgtttatgtctattcaagtaaaaccccacacatcaatataccacatcgtttcgcaaaaaaaaaaaaaaaaaaaaaaaaaaaagtactctgcgttgttaccactgct

SEQ ID NO: 54776 - DNA, 363 bp, Zea mays
  unsure (1)..(363): unsure at all n locations
  Clone ID: MRT4577_149954C.1
gactgttttgacgcacgactgaaccaccgacagacaacatggccgcatccgcctccaccnncnccgggctaacaagttccatattgaccagatgaccggcgctctccaccagctttacgcggggcacgcgcgcatgcgctaggaaccccctgacgagcagcaacctccagaggaacggcacgatcaccagcatgacagctccccaggactggccnccgagtgacctgagcgtcatctgcttctgactaatcagcaacaacctcacagaactcttcttctccaacatcggacaggatctgaaccaattacacacgcccgcggccggcactctaaggtctggctgaggctagtgacgaggcacct

SEQ ID NO: 54777 - DNA, 753 bp, Zea mays
  Clone ID: MRT4577_149955C.1
aacaactacattaaatgcccttggtctttgttgatttgaatcacagaaattcaacaaattcagaccagactgaaactcctcgtagagagtacgtaacaacacccatttatgtaacaacaccttgtagagactgaaactcgagttttagagtttgtaacgactacatcaaataccctcggtctttgttgatttcaatcacagaaattcaacaaattcagaccagactgaaactcctcgtagagagtacgtaacaacacccatctatgtaacaacacctcgtcgtagagactgaaactcctcgtagagagcatcaggctgtcagcaagcagcataccagtaaaagcctaggcacagaaatcagaaatgcaacatgccagtaaaaaacctggacgctcacacaaagacggacagacacagacacatatacacaacgactacccttggcgatctgatgagctatcatcttacgcttacagctccgtagttgtagagacatcgatcatcataccgttgctgatcatcatacccttgatttctgtacccacacgatccatcaagcctttctttgtgccagcacccctactgtgctgagaacgtctgcctggagtcagcgacgtcttctctttcttcgacgggcttgccaattgcgccggcgagaagctcggcgtggtatatgccatcatgaatggcgtgccagaggctggcactgggaaggatggaacagcagtctggctgactgcaatcttgcagtca

SEQ ID NO: 54778 - DNA, 1704 bp, Zea mays
  Clone ID: MRT4577_149956C.1
cactacaagtactatggtaaagatgatcatgtagaggctttttgctacaaaaagaagaaggcatataaggctcagacttgtcgttcttcacaacttgctaatggtgccagtactggaggttctcaggaaagttgtactgatttagtcactcaagagatgttgatgctccttcgttgccttgttgccttttcactaggtgttgctagttatgtgactctgtctttgactctgctaggttgtgctgttgcttctcagttttctactgagggaccaccttccacatccactataggttcccatgccaatcttgcacatggacatgcctccatgtcactacattgactatcctgagggccctgtgcatccagttagtccaggctatcactctgtatctactgaaaatctccaacatgaacgatggattggcactagctatttgaggggtaggcatcctatgggaaatctacgacatgctgatacatttgaatacagatgggaagcacctacacctttcaggagatatcgatctgttacaccaccaaatcatgctataagtgcatatgggccagaagcatcttcacctacggaagcatatctatcagctccaatgaaatcacgttcacaccacagccttataaatggttggcatgcatctccagttagttcaacagattctgatgaaagaatatgctcccttatatctgtgtatggacaacaagcacagctacagaaacagacatgtcaatcagctaaattgggtaaaaatccacagttcggaatatctttacatggaagtgaaagtgaagcccatccaacaagggtatctccatcagattctaccgaacaacctccatctccatgcttcagaattcatccaccaactactgtggaaaatcttctacactgtcgcgtatctgcatgtggaccagaagcatcactaccactacatctggctgtaacatcatcaactagtcgatcaacagtagttgcttctcaggttaagaaaaagatgcaagtaccaatattctatgctgaagctgtcattggcccaactggtgaaagaattgaatacattcgtcgtaccagcaggtcgagcattttgataagcaattctgagggcacaatgtatattgagatcactggaagtgctgcaacagatgttctaactgcagagcagctgattaagaactttatggccgaagcagctgccgcctcccctggtcacagttacgacttcattccatcatatttgccagcacccagatctgcccaagctgatatttttgcttcccctgagacaagtgaagtgtccagtttgccagaacggcgcctgcaaatgatttactgaatatccccaacagttttgtttctgcacataccaccaaagatagccaagcaccaataccggcaacacaggaatataccagagagtaaattgagaagatgttttgatatccaccctgagactatgcaagctttacaatttcaaccctttcatctggattacttctagactctttgttttgttgtagccttgattcattccatggattgaaccttagaaactagagcctgagcatatgcttctgtatatggattatggaagcaaagttttggttgattcagcgaaggggtagcacgatatgtgtgccgggatgattgaacggttgcatttcaccgaaacaaattcgtaaactttgctcc

SEQ ID NO: 54779 - DNA, 360 bp, Zea mays
  unsure (1)..(360): unsure at all n locations
  Clone ID: MRT4577_149957C.1
ggaggcttcaggaaattaattttataagtttacggtccctcaaatcaaatcatcatcatcaccaatattataattgttaccaacagctcgcctgcccagcaaatcctgccaggacgacccaacccaagatccaagaggatgccgncgccgccgccgcttgtgctgatggggcaaccgttatttccgaacttcgcggaggcgctggagggccggtaccgattcgtcctggccggggacgccgacgcggacaccggggttagaggcccgggtcctgctcgagccggggctcgtgggacgagcccgtcaagcttgccgaccggtttccggcgctggaccttgtggcccacacctacgttgggc

SEQ ID NO: 54780 - DNA, 239 bp, Zea mays
  unsure (1)..(239): unsure at all n locations
  Clone ID: MRT4577_149958C.1
ggcttccttctaccataccggaccccnncttgtatcatttccatctgtctggaggttaggtggananccccnccaangtgccctacaacttcctcatctccctcgtcataaacatccgccgggactgggacatccactaccatctccaggtcaagctcaccatccacctccccatcgtctgcaacttcaccatcccactctccacctctaacgagttcaaactccccaccctcaaagac

SEQ ID NO: 54781 - DNA, 343 bp, Zea mays
  Clone ID: MRT4577_149959C.1
tatttactagtactcatttatttatatgtgtattatatatatcattcaccactctttcacatatatgtacattccctcagctctgacagacccaacaaaacaaatatatacatcagcaggaaccggaccgcgaagcctgaaaacaaatgacaggcaatctggcatgcctcacagtcacacagcagcagcaacttctccggtctccagtccttgacactgaccgactggtctagtccctgctggtgttgggcgtcgtggccctgctctcccacggagcatgaaccgtggtgggagagaggggtccgtccttgtttttgtctccgtccttccccgtctggtattc

SEQ ID NO: 54782 - DNA, 358 bp, Zea mays
  Clone ID: MRT4577_14995C.1
gtttctcaataaggaagatggttctcagcttgcaatgtttgtgcaagagaaatttctgtttgatttgaaggttcatccaagttctttttcaattgatggtatgctggggaatatgagattttgtgacatgtcccttggtccagaacatcgttggggttggctttgcgatatacggaagcctggtgtcgagtcactcataaagttcacattccagtcgtacagtatcgatgatgaagattttgaaggtcataattacagcttgactggtcagctttctgctgttcgtattgtctttctctaccgttttatccaagagtttacttgttactttatggagcttggcacccctcatactgaa

SEQ ID NO: 54783 - DNA, 673 bp, Zea mays
  Clone ID: MRT4577_149960C.1
tcgaggccggccgggccgggatcccaaagcacaagagaacgcactgcagcaccacttcctgcgctgctgctcatcacacaccgtagtactaacacgtactccatcgccacaatggctcccaaggttgcgctcttccttgccctcagcctcctcttcgctgccgccgcgcatggctgcggaccctattgctccggcccagtcgtaccaaccccaccagtcgtgccgtcgcacagccacgggcgctgcccaatcgacgcgctgaaactcaaggtgtgtgccaacgtgctgggcctcgtcaaggtcggcctgccccaacacgagcaatgctgcccgctgctggagggcctggtggacctcgacgccgcattgtgcctctgcaccgccatcaaggccaacatcctcggcatccacctcaacgtgccccttagcctcaacctcatcctcaacaattgcggcaagatttgcccaaaggactttacttgccccaactaattgagctgaatatggagataaagccagcatccaaggaatgtaacccttagtgttccatctcgcgattccgattgttacttgatcatcatcgctgtttatctatttttatatttaattatcaataagaaacattcacattttttgttttgagaaaaaaaaaaaaaaaaaggcccctagggcc

SEQ ID NO: 54784 - DNA, 221 bp, Zea mays
  Clone ID: MRT4577_149961C.1
cctgaattcccttctctagccacgcttcccatcactcttcttctcatccacatcgactggttcatattcaacagctcatcaccattgcaagttctcctaaactggtccactctctcaaaacatttacttccgatcttaacaaatccttcctttccactatctaccactcactcaccactcttcactcctactaccctaccctaaattccaatatcctacta

SEQ ID NO: 54785 - DNA, 737 bp, Zea mays
  Clone ID: MRT4577_149962C.1
aattcggcacgaggacgcactgcagcaccacttcctgcgctgctgctcatcacacaccgtagtactaacactccatcgccacaatggctcccaaggttgcgctcttccttgccctcagcctcctcttcgctgccgccgcgcatggctgcggaccctattgctccggcccagtcgtaccaaccccaccagtcgtgccgtcgcacagccacgggcgctgcccgatcgacgcgctgaaactcaaggtgtgcgccaacgtgctgggcctcgtcaaggtcggcctgccccaacacgagcaatgctgcccgctgctggagggcctggtggacctcgacgccgcattgtgcctctgcaccgccatcaaggccaacgtcctcggcatccacctcaacgtgccccttagcctcaacctcatcctcaacaattgcggcaagatttgcccaaaggactttacttgccccaactaattgagctgaatatggagataaagccagcatccaaggaatgtaacccttagtgttccatctcgcgattccgattgttacttgatcatcatcactgtttatctatttttatatttaattatcaataagaaacattcacattttttgttttgagaaagatgacaaaatatgtgcaccattactattttagaacaatcatgttctttgtctccctgacgagttttccgagaggtatatataagatagaacgagtgtgatcaaaaaaaaaaaaaaaaa

SEQ ID NO: 54786 - DNA, 1460 bp, Zea mays
  Clone ID: MRT4577_149963C.1
gtctactgttcgatccttttctccaaaaacagatagattcgaggtcatcaaagaagatttggagaggagcttacaagaacactaacatgaagcctatgagccattctacctacttaaggctacaagtcttgcgtgaaatattctgggacgttgataaaaaactagaactacttatgaaactgacatttactgatctagtagcatttgtaccgaaaatcctttcccagctgcacattgagggactttgtcatggcaacttgtcagaagacgagacgattaatatatcaaaaatatttctcaatactctctctgctcagacactgccagaggaagcaaggcatgaggaaagagttatttgcattcctaatggtgcaaatttggttagaagtgtccgcgtgaaaaatgatcttgaagaaaattctgtggttgaggtttatttcccaattgaacaagacgttggaaaggaggcaacaaggctcagagctattacagatctttttagcaacattattgaagaaccatgctttgatcagctaagaaccaaggagcaacttggttatactgtggactctagcccaaggatgacttaccggatgctggcctattgttttcgagttatgtcctccaaatacagtcctatttatctgcaaagtcggattgataacttcattgatggtctatctgctctgctggacgagctcagtgaagagacttttgagcaccatagaagtggtttaatagctgataaactggaaaaggaaccttcacttagctaccaaactagtgattattggtctcagatcgctgataaaaggtacatgtttgatatgtcaaaactggaagctgaagagcttaagacagttcagaaggctgatgttatagcttggtacaacacatacataagatcatcgtccccaaagcgaagacgtctagcaattcatgtgtatggttgcaactcagatattgctgaggctgctaaactccaggagcaatcttggactataattgatgacgttgaatcattgaaggcttcgtctcaattttattcaagcctttgttgagggaagttgggcatgatctgtcagtgtgtgcaaagcgcgtaacttggacattgccgaggcccgctaaggtgcaagaatttcgtggatcataatagatgatttaggccccttctgcagatcaaccgccatgttatctatggccggcttgaaattgaacagcatcgttgcacctgaccaacatcatcaacgagtatagtgctagttgggtaagaaaaataggattttgtcagtgcattatgtgattttcataacaaacacacatggctttattgttactttgcgccaagaaatgttgatcttccaatatggcgtagtaattgatggatgagtttttgaggaaacataattttgtacttggagatgtaaaatgtttctggaatctttactgaacaattttgg

SEQ ID NO: 54787 - DNA, 189 bp, Zea mays
  Clone ID: MRT4577_149964C.1
ttcttcttcatcgtcggagctccgcctcacccgacatagcactttctggaaaaaagctaacagcgagtgccggggcggacctaactggcagagctccacagcacagcaggttcaaggcgatggctgccaatgatgtggacgagacaaagcagaccgacgaggacaggtggaaggccctggcccttccac

SEQ ID NO: 54788 - DNA, 802 bp, Zea mays
  Clone ID: MRT4577_149965C.1
ctgtgcggcgctcaggcggcgggttcgacatcccaagagacgcagcgcagcactgaagcaccacttcctgcactcactgctagctgctcacaccgtgctagtaacagtccatcaccagtcaccaccaatggctcccaaggttgcgctcttccttgccctcggccttctcttcgctgccgccgcgaatggctgcgaaccctactgtcccggcccagtcgtcccaacgccgccagtcgtgccgacgccgtcgtcgcacagccacggccgctgcccgatcgacgcgctcaaactcaaggtgtgcgccaacgtgctaggcctcgtcaaggtcggcctgccccagcacgagcaatgctgcccactgctggaggggctggtggacctcgatgtcgcactgtgcctctgcaccgccatcaaggccaacgtcctcggcatccacctcaatatgccccttagcctcaacctcatcctcaacaactgcggcaagatttgcccggaggacttcacttgccccaactaattgagctgaatatggagataaaaccagcatccaaggaatgtaccccttaatattcgatctcgcgattctgattgtgacttgatcatcatcactgtttatctatttttatattttatacttaattatcaataagaaacattcacattttttgttttgagaaagagggcaaaatatgtgcaccattactgttttagaacaatcgtgttctctgtctccctgaggagttttccgggaggtatctataagacagaacgagcgttgatcaataaaaaaagaaaaaaaaaa

SEQ ID NO: 54789 - DNA, 777 bp, Zea mays
  Clone ID: MRT4577_149966C.1
tgggaccctcgaggccggccgggccgggatcccaaagcacaagagcacgcactgcagcaccacttcctgcgctgctgctcatcacacaccgtagtactaacactccatcgccacaatggctcccaaggttgcgctcttccttgccctcagcctcctcttcgctgccgccgcgcatggctgcgaaccctactgtcccggcccagtcgtcccaacgccgccagtcgtgccgtcgcacagccacgggcgctgcccgatcgacgcactaaagctcaaggtgtgcgccaacgtgctgggcctcgtcaaggtcggcctgccccagcatgagcaatgctgcccgctgctggaggggctggtggacctcgacgccgcactgtgcctctgcaccgccatcaaggccaacgtcctcggcatccacctcaacgtgccccttagcctcaacctcatcctcaacaattgcggcaagatttgcccaaaggactttacttgcccaaactaattgagctgaatatggagataaagccagcatccaaggaatgtaccccttagtgttccatcttgcgattccgattgttacttgatcatggtcgctgtttatctatttttatacttaattatcaataaaaaacattcacattttttgttttgagaaagagggcaaaatatgtgcaccattactattttagaacagtcatgttctctgtctccctgacgagttttccgggaggtatcaataagatagaacgagcgttgatcaattaatctcgttgccctcctagc

SEQ ID NO: 54790 - DNA, 596 bp, Zea mays
  Clone ID: MRT4577_149967C.1
caagagcacgcactgaatcaccactactttctgcgctgctgctcatcacacaccgtagtagcaacagtccatcgccacaatggctcccaaggttgcgctcttccttgccctcagcctcctcttcgctgccgccgcgcatggctgcgaaccctactgtcccgacacagtcgtcccaacgtcgcacagccacgggcgctgcccgatcgatacactcaaactcaaggtttgcgccaacgtgctgggcctcgtcaaggtcggcctgccccagcacgagcaatgctgcccgctgctagaggggctggtggacctcgacgccgcactatgcctctgcaccgccatcaaggccaacgtcctcggcatcgacctcaatgtgccccttagcctcaacctcatcctcaacaattgcggcaagatttgcccaaaggactttacttgccccaactaattgagctgaatatggagataaagccaacatccaaggaatgtaacctttagtgttccacctcgcgatttcaattgttacttgatcatcatcactgtttatctatttttatatttaattatcaataagaaacattcacattttttgttttgag

SEQ ID NO: 54791 - DNA, 271 bp, Zea mays
  Clone ID: MRT4577_149968C.1
tttttggtttttttttatattaaggttcttttttttgttagagagacttagagagccaggttcaggacccagcgaaagcaactttcaccgcgcaaggtgggaaacagaaacggttttttgaacacgaaccaccccacgggttgaagggggcccaccccccctcttaaaaaaaaaaaaaaagatctgcagggaaaaatcctcacgcagcgcgattggcaggtggaaaaaatccaagcaaaaaggccagccaccaaacctgctggtggcaggg

SEQ ID NO: 54792 - DNA, 247 bp, Zea mays
  Clone ID: MRT4577_149969C.1
cccccaaaatgagatcatcaagcaataagttcaaacaggtctacaaatatttttacagtagcagcaaaattgaggagcatattcacgtctgaacagataacaacatgaaatcagcttggggcggctaatccccagatcagcaatcctggataagttttggaatcattggcaggttattaaatttttttaaaaaaaaaaacttttattcaatggaaggtacccatttgggtaggttcactggttttgg

SEQ ID NO: 54793 - DNA, 716 bp, Zea mays
  Clone ID: MRT4577_14996C.1
aggtgaaagaaaactgaaatagttctcacaatcatatgtagtcaaggtctatggcttgcaagccaatattcaaatggaaaggactagagttaccactccaacatgacaataactaataggataatattagactaataatattataattaaaagtagatggtcgaggcatcaaaatcagtcatcattgactatttcttgctcctgcagctcataaccagttgtgatcacttcatcctggtcagattcgaattctatttcttcctcatttatgggttcttcttcttcattttcagatgggagttgctcttcttcgatgtctcttggttgagccaatctagcactcttccacagttttgtgacctcctcaggcccacatgcatctacgatttgttgccatgttagtccagtcacattgttgacatcagagctttcttcatctccaccttcaacaatccacccttgagcagaagcagcatcagttgccagcaggggatctactttgttgttattgttggccttagcttttttctttgtatgaagtgaattgaatcgcacaaagacaagattttcaactctttcacaagttaacctatttctcttcttggtatgaatcccttcaaagcaactccaattcctttcacaactcgaggcacttgcagtgagtgaaagaatcattatagccatcttatggaacacaagtactagctctccaaaag

SEQ ID NO: 54794 - DNA, 722 bp, Zea mays
  Clone ID: MRT4577_149970C.1
ggatcccaaagcacaagagcacgcactgcagcaccacttcctgcactgctgctcatcacacgccgtagtagtaacagtccatcgccacaatggctcccaaggttgcgctcttccttgccctcagcctcctcttcgctgccgccgcgcatggctgtggaccctattgctccggcccagtcgtcccaacccctccagtcgtgccgtcgcacagcaacgggcgctgcccgatcgacgcgctcaagcttaaggtgtgcgccaacgtgctaggcctcgtcaaggtcggcctgccccagcacgagcaatgctgcccgctactggaggggctggtggacctcgacgccgcactgtgcctctgcaccgccatcaaggccaacgtcctcggcatccacctcaatgtgccccttagcctcaacctcatcctcaacaattgcggcaagatttgcccaaaggactttacttgccccaactaattgagctgaatatggagataaagccagcatccaaggaatgtaccccttagtgtcccatctcgtgattccgattgttacttgatcatcatcattgtttatctatttttatatttaattatcaataagaaacattcacattgaaacattcacattttttgttttgagaaagagggcaaaatatgtgcaccattactattttagaacaaacctgttctctgtccaaaaaaaaaaaaaaaaaaaggccctagggcc

SEQ ID NO: 54795 - DNA, 1744 bp, Zea mays
  unsure (1)..(1744): unsure at all n locations
  Clone ID: MRT4577_149971C.1
ggaccctcgaggccggccgggccggggatcccaaagcacaagagcacgcactgcagcaccacttcctgcgctgctgctcatcacacaccgtagtactaacactccatcgccacaatggctcccaaggttgcgctcttccttgccctcagcctcctcttcgctgccgccgcgcatggctgcggaccctattgctccggcccagtcgtaccaaccccaccagtcgtgccgtcgcacagccacggacgctgcccgatcgacgcgctgaaactcaaggtgtgcgccaacgtgctgggcctcgtcaaggtcggcctgccccaacacgagcaatgctgcccgctgctggagggcctggtggacctcgacgccgcactgtgcctctgcaccgccatcaaggctaacgtcctcggcatccacctcaacgtgccccttagcctcaacctcatcctcaacaattgcggcaagatttgcccaaaggactttacttgccccaactaattgagctgaatatggagataaagccagcatccaaggaatgtaccccttagtgttccatctcgcgattccgattgttacttgatcatcatcgctgtttatctatttttatatttaattatcaataaaaaacattcacattttttgtttaannnnnnnnnnnnnnnnnnnnnnnnnnnnnnnngtcagagctctccgcctccgccggcggggctcgatactgatgggtgtcttcgggacctcgcgtcctgcctccgtcaccctctgcgccttcctcacattcctcaacctcttcgccttccttctcgccgtcggcgccgagcgccgccgcagcaccgggaaggtggtgccggacgagtacgacgagcggtcctactgcctctacgacaccgacgcctccacagtctacggcgtttccgctttcttcgtgctgctgctccagcaggccattgtcaccgccgccacgcgttgcatttgcttcggccccgtgctctcctcccgcggctgcgccgtcaccgcattcgtcctctcctgggcaacatttctcatcgcagaagcctgcctcataggaggatcggtgaggaacgcaaagcacaccaagtatctaggctactacacgaagcacgacctggtgtcgtgcgccaccctccgcaagggagtctttgcggccgcggctgcgatgatgctcgtcaacctcttggcgtcccttgtgtgctgctggagctactcgaaagccgcgacgggcgggttcatgaagcaccagaatgaggtcggcgtgggcatgacggattacggccttgacaggggcgtttctgggccctgagtgagttggctggaaccttgttggcgtctgtgctgcagtaggcgtctcacctgtggtgtaatattatggtcgaaatgtatgtgagtgaagttccgttctttctctacggtcggtgcgaatggtatgcctgaactgtgctctggaatgtgctagtcagtgatgatgttgtatggttcgtgattttatatctgtgaaaaaatgtggtagcattagctgtatttgctgctgtgctgtgcccgacaccgacaccggcacggcttcctgttcctgctcacggtggttgttgtaaagcagcagaaatatcagaaagcgggacttcaatgttcttcgctgtcattaaatcaaaaaaaaaaaaaaaaaactcgagtcgtggcccagctgctgctgctccatccattgaagatcaagctcagttcccaagccttggtg

SEQ ID NO: 54796 - DNA, 511 bp, Zea mays
  Clone ID: MRT4577_149972C.1
ctggattcttttaaagccacccaacccttccggaaaattggccgttgcattgaatgtgaagggaaggatttccttagtcccagctgtcatttgccggttgccgcagataggtggattgcaaagctctcagggccttgtctggcacaagcattgcagatgtacccagacttcaaaataaaggttgttggacattcactgggaggtggtacaactgctctgttgacatacgttctgagggaacataaggagtttgcctctactacttgtctggcatttgctccagctgcatgtatgacatggaaactggcagagtcaagagtgcattttatcactacagtcatcaacggagctgatctggttccaacattttctgctgcgtcagtagatgatcttcgttcaaaggttacagcatcggcttggctaaatgatctccgtcaccaaattgaacaaaccagaatcctaagcactttttatcgttctgcatcaggcttgggatcccggctttcatcta

SEQ ID NO: 54797 - DNA, 578 bp, Zea mays
  Clone ID: MRT4577_149973C.1
ggccgcttttttttttttttttttctttttttttttttttttttttttttttttttttttttttttttttttttttttttttttttggaaaactaaacccactttccaattccatgggccactttcattacaaaaggacccccacaccccaaggaacaaaatcaagatttacatcactcacccccccctccaattttttttaagggaaggggggaataaatataaaaaaacaaaaatagccctttttattttgttcaccaacagggaggggccccgacttggacaaaaaaaaaaaaaatggggggcccaataggttataaaaaaaacatagcatttgggcccacaccttaggccgccagccccagggcgacgggggtcgtaattgggggggtcacccatcgagcggacaggtccaacggcgcgggggaagttttgtccggggaataatcggacaagtcgtcgtcggaagacgggccatttgaaaattaatcgtccgagggcccggaggcccccgaggggccggggggcttttttttgtttttttttttggccccttggggagccggcgcaggcgcaaa

SEQ ID NO: 54798 - DNA, 792 bp, Zea mays
  Clone ID: MRT4577_149974C.1
ccggggcgctggcagtatatgacaaggacacaccagtaccgctggcacaacgttgcgcgggcagtcggctgcggcaagacagccgaggacgtgaagaggcactacaagtacctgaagacggacgtgaagcacatcgaaaccgaagaaggcggtcgaggatcccagtccagcagccctgctggtgctggtgctggtggcagtggaagcagcagcagcagttcttggggcagggacaacggtgacaagaggtagtagagtgtaatgcattgctctctctagcatctatctctgctcgatctataagccattgcattgcatcgtacatcctcttactgcgctgtctagcacgctagcctttggtacgtgcagtataactgttgcttctgttttcttgatgtattcgttactcacttactcttcgttccattgtccacctggactatctttctagatccctctaatcttcagcatgccttttttctagcttgttccttctgttccccccttcactcgccttttaaactgtgtgcatgcatgggcttgactattgactatcattgtcatatgctttcacatataaaacccccaccatataaaaccctattaattaccttaagaccttattcggttgtactagatcaaaagggattaaggacgagtaaatatatttttattcaattttaactagcaagagatttaatccccttcaatctattcctaataaccgaacaaagctctagaggcgttgtgcttatgacatgttataggtgggggggctctttaatttaacta

SEQ ID NO: 54799 - DNA, 378 bp, Zea mays
  Clone ID: MRT4577_149975C.1
gggaggaaaaaaccgacccttaaatggggatcacttcgatttcttaaaaaaggatcacgcctaccctgatctggtgtttccctgataacaaacttatttagcctaggaacttaagtccaaggttccagaggctttttggcaatgcccttttctacaaacaacgcattttttgtttaagggaaaaacccgtcacttttatttgggggctaacatatgggccttttggtgctaaagggctaattacagatccagggagttggaaaacattttaccccgacgcaaactttaacttggattcttgaactttttctaaaggttaacctcccctacggttttgggaggagctttcaactgattcaaaaattcatccagcctttt

SEQ ID NO: 54800 - DNA, 352 bp, Zea mays
  Clone ID: MRT4577_149976C.1
caccgtcactgggtctccgtcagccaatctggatgggttaatggatcagcgtctcgcaccaccaacttaaaaaacaacgcccaaaactgtcaccatgtctctcaaattttctatttacacttgtctcccaattccaaccaaggccccctctccagacgcctcatccaaggactcgggcctttggcaacctcagtcagtcactctgctctacactcctacgactgcgctcgtagtggattgccccgccaccgtttatcctacacgtgaactggcagaatggatcaaatctcagctgccactgggcagcactctcaagtactttggctgtactcatgctcatggtgatcatttc

SEQ ID NO: 54801 - DNA, 365 bp, Zea mays
  Clone ID: MRT4577_149977C.1
aggttgttagtttttgtatttttttgagttttttaattattctaatatagctttttgttttgatgaattggattattttttttgttttttttttgagtttttttttttgttttttttatgtttgtagttgttaatgtttttaatgtggtagttatttgtatgttttggttttttatgtgttttgtcgtagtgggggctcagcttcgcctttgctcaatcatttaactggtaaccccacgtccccaccatctcctagcaccagatcaacttgtcctgatgttataagtggagctgccctggttatcacacacggaatggcatgaccatccaaggacagaaccactatcattagaacataactgaaa

SEQ ID NO: 54802 - DNA, 1512 bp, Zea mays
  Clone ID: MRT4577_149978C.1
atcctaccttggattcctcgccccgccctccagttcattcccatttcccaacccaaaccagcggctggcacggacgccggcgagccgcgcggcccggaggaccactgcctcctgcatatagccggcttccgcggccatgtcatccgtacacttctttcctgcctcctcccagaccccggtccccgcctgccttctcaaaacctctccaaagtcacccctcccgtgcccccgcacccttgccaccaccgctctccagagtgttggcggcaattgcaatgcgtggcaccgcccgcacctacggctgcagcggagggtccgcacccctgcagcaccgtccgacgcgccgcctgtgggccccgatggcgggagcgggggcggcggcgcggggggagggagtggaggggaggatgaggaggaggagggggagaagaagaagggactgttgcccgagtggatgaacttgacaacagaggacgccaagacggtgctggccgcggtagctatctcgctcgctttccgaaccttcgtcgccgagccgcgcttcatcccctcgctctccatgttccccaccttcgacgtcggtgaccgcatcgtcgccgagaaggttacttactactttaggaagccatgtgttaatgatataataattttcaaaagccctccagtgctgcaggaggttgggtatactgataatgatgttttcattaaaagagtagttgccagggagggagatgttgttgaggttcatgaaggaaaactcgttgtgaatggtgaggctagaaatgaagaattcattcttgagccaccttcttatgacatgaatcctgtgcaagtaccagaaaactctgtttttgtgatgggagataaccgaaacaacagctacgattcacatgtgtggggccctcttccagcaaaaaacatattggggagatcaatttttcggtattggcctcctggtcgaatagggggtactaccaagggttgcttcagccctgaattaagccctggagcaaagccagaatcacttactgatgtcaaatcgacaaagtaggagattgagaagttagttttggtggtgcctgatgtgcaggggaagcttcggttattcttcgtggtagaatgtcacagaggaatcctgtgttgtgtggcaggtagttctattagaacccagagagaggaagacaatttgatttctcattgagtcattgattggattggccaaaaggcacagaaaccattttgtctcagggtttcttgtccttttgccttgctgtatacgaacgtattagggaaacttgataccatgatggctgacctagttaagctgcaaaaaagtatggttccactgttgaaatctagagtctggaacatgataaaatccgcgtacagcatgacgcgcaagtacatcctgtaaatggagaacgtgtatattcgatgtgccgttgaacaacgcagagaaactacccggattacttacgctaccgcagaaaaagatggattatgttagattgc

SEQ ID NO: 54803 - DNA, 418 bp, Zea mays
  Clone ID: MRT4577_149979C.1
aacccagccgcgcgccctgcgctgcgtgctccaccagcttttcgtggtgccgcccggccgtgcctgtcggccagtggctggctggcgctcggccggtcgtcctcgcctgcctctgcagcgccagacaccgcaggacggccgcccctgttcccggaaccgatccgcagtgcgggcacggggcagatgccagtcggcaagagaaggagcgattgccgccgcggcgtggtgtgtggcgccaccagcgtgtttgccttttgcccgatcgggccggccgagcgcgggagtcgaatcgctgtcggatctagccccccccgcccgcgcgtggcccgctgcgctcgccgcgcgacatggcccgggcccccggccgacggacgggcccgcgcgcctttgaatgattgaatccggcccgccaagccca

SEQ ID NO: 54804 - DNA, 1233 bp, Zea mays
  Clone ID: MRT4577_14997C.1
ccacccgggctgccaaccgccctcgcccctttccctccctcccacttaaaacgcaaccaaaggaaagcgacgacgaacgaaacgaacacaaccgccccgcccccaagcgcggagcggagtccagtcctccaagtccaggaaaggcgcgcgagatccaacgagcggtgaagtgaccctgatcttccaagatgctccgccgagcaagggttccctgcgccgcccgcgcccgcgcccgcggtcgtcgtggcggtggcgctcctggccctcagcgccgtggccgccgccgacttcttctcccctctcgcccccatcttctcccccgtcatcaactccatatgcagcacggtggcctgcgggcagggcaactgcacggtggcgccgggcacgctgggctaccgctgcgactgccgcccgggctggacgcagctccacgtcggcgacagcctcaggttcctgccctgcgtcatcccaaactgctccatcgacagctcatgtttcaatggttcgccggcgccggcaccggcgctagcgctgacgcctttgccgccacctaaaaacttctcgctcgacccatgcgagctagcgtactgcggcgccggcggcacgtgcaggaagaacggctccggcatgagctaccactgcgagtgcaaggaggggtacagcaacctcctcaacatgaccgcgatgccttgcttccagaactgttccatcggcgcagactgcgcgagcataggtattcatccctcctcgaccagcaacagcccgcccgcgccacctggctccgagagcatttctaaccaaggcagtacagcggcaccaggatccatttcacagcggattctactgccactgctgctgatggtggtggtctcattggccgtcggttacgtgatgtaggtcgaggatggagcgtcccacggcaacactagactgttttttttttatccgcaggacagggtagagctgatagtttgttagggtggtgatacacttttggatgtgtattgtactgctgcgtggttacgttttggcgattggtttgtgtagatgttacccggccgggtcattttatgtcgatatggaataaagcgcctctgtgaatactactgggatgattaaactgactctgcattgggtaactgcgcttagctttgcttttttctgaacttctgatcacattcagataattttatgacagagccttttgcttcagaggacaaaaaaaaaaaaaaa

SEQ ID NO: 54805 - DNA, 263 bp, Zea mays
  Clone ID: MRT4577_149980C.1
cccttctttgtaagaacttcctccttaactacttggcggcctccgttattggcaggtggtattccaactccatggaggaagcttgagatctcaacaaccgttggaaagcattagctggctgtgcttactcctgctggaatgtgaagttccaacaagggccaactgggcatacccaacaattagcacaaccctaaagtgaactgtcctgaataaggcctctaaaacttgattaattaaccaaaccttgctcatggtttaaaaat

SEQ ID NO: 54806 - DNA, 366 bp, Zea mays
  Clone ID: MRT4577_149981C.1
gagcggctgagtcggccttttccgcccgatcccccctccccccgagcgccgctccggctgcaccgcgctcgctccgagtttcaggctcgtgctaagctagcgccgtcgtcgtctcccttcagtcgccatcatgattatctaccgggacctcatcagccacgatgagatgttctccgacatctacaagatccgggagatcgcggacgggttgtgcctggaggtggaggggaagatggtcagtaggacagaaggtaacattgatgactcgctcattggtggaaatgcctccgctgaaggccccgagggcgaaggtaccgaaagcacagtaatcactggtgtcgatattgtcatgaaccatcacctgca

SEQ ID NO: 54807 - DNA, 565 bp, Zea mays
  Clone ID: MRT4577_149982C.1
tggatctgatcaccatcccgaacctccaacctgctcacgcggattcagtcaaaccctgacaaaccattagaagcaccggcagatcgtcggctgctaataagaggcctcctttctcgaccggctacctcgtcgtgacagagagcctcgctcgctcgccctcgcgtctcgtttcctaggagagaaccggacaacacgatggcttgggataggaaggcgccgctggcagctgccctggccacggcgctggtcctggggctgtgccgcggcgacgtggtgcagttcatcttcggcgactcgctgtccgacgtgggcaacaacaactacctgaccaagagcctcgcccgcgccgcgctcccgtggtacggcatcgacctcggccgcggcatgcccaacggcaggttctgcaacggccgcaccgtcgccgacatcgtgggcgacaagatgggcctgccgcggccgcccgcgttcctggacccggcgctggacgcggacaccatcttcaaggacggcgtcaactacgcctccggcggcggcggcatcctcaacgagacatcgtccctcttta

SEQ ID NO: 54808 - DNA, 341 bp, Zea mays
  Clone ID: MRT4577_149983C.1
gcctaagctagcaggcgctagatacattctatacaacaacccacagatctgcgccagtccggccacaggagataccgcatctgcctctctggtctggacacaggagcgtccgtgacctagtacaatggcgaggtgagatctacgatgcgtactattccatgtatgggcatgtggggaaactagctgacgagatcaagaaaggagccttatctggtgctggagcagagggtcagatatggcaagggcctgaaattttatgtgtacacgtgcttggtaagatgggcgcgccccctaagccctgcgtgccagacataacacaccatgaacttgcggaggctgac

SEQ ID NO: 54809 - DNA, 2741 bp, Zea mays
  Clone ID: MRT4577_149984C.1
agcttgcttagtcttgtccaagattacaagggactgactgccccaactattggggatggaagaaccatccttttctgggaagatatgtggaataggggcaccccggctcatcaatatcctgagttattcttctttgcttgtaacagcaaacttaccgtcaaagaagctatccaaaaggaacaacttattgaaaattttcagcttcctctgtcggtgcaagcctatgaacaatttcttgacttagacgcaacctgggggcaaatcatggtagccaacacaaatgatgcttggaaactcatttggggagctgataatttctctacaaagaaaacttatagacatttgatgggtcaggctcaggttcactagatcttcagatcgctttggaaaaataagtgtcaaccaaaacataaggtttttttggctttggctaaagaacagactcaatacaagagatatgctgaggaggaaaaacatgaatctagagtcttacacttgtgagaattgcatctggcaaaaggaggaaaccctttatcatcttttcctcaaatgtaattatcgcgaaggcttgctggaattctattggtatgacgcccccaagaattactaatcctgtggacgctgcagtaaatctaatgcagcagctcaatgtttccttctctatggaaattgtcattctcatgacctggagcatttggaaatgtcgtaatgcctggctttttcaggataaggacccaacagtgcagcattgtaaaaatgagtttgcaaaggaattatatctggtcacgcttagagctaaaggacgattcgattcgacaatacctgaatggcttcagcattggcagtagatctcgtcaatttttcccttttgtaattttgtaatttataatttactttcctgtatgcttctaactctgtcgttttaaaattttaataaaatttcagtaggggcttgcccctcctgtcctataaaaaaaagttgacgtgaatagatttcattaagaggttggatgttagtgggatgacatgactattagtaggacgagatgatgtggaaagttagtgggagatgatatggatagtttttgctttcatcgaaaggttggaagttagtatgatgacatggctaatatagatacatagatatagactaccaacatggctgcatgcccccaagctctcccactatatatatctctggtagcacatcatcccaattcacaatgcttacaaaaacccatccatcattttagctgttgatacaaaagagctagaagggagatggccgagacaaatccagagttgagtgatcttatggcgcaaacaaacaaaaaaatagtaccaaagttcactgaaatcttccccgtggaggacgtgaactacccttacagcgccttcatcgcgtcggtccggaaagacgtgatcaaacactgcaccgaccataaagggatcttccagcccgtgctgccaccggagaagaaggtacccgagctgtggttctacacggagctcaaaactaggaccagctccatcacgctcgccatacgcatggacaacctgtacctcgtgggcttcaggaccccgggcggggtgtggtgggagtttggcaaggccggcgacacccacctcctcggcgacaaccccaggtggctcggcttcggcggcaggtaccaggacctcatcggcaacaagggtctggagaccgtcaccatgggccgcgctgagatgaccagggccgtcaacgacctggcgaagaagaagaagatggcgacactggaggaggaggaggtgcagatgcagatgcagatgccggaggccgctgaactggcggcggcggcggcggcggctgacccacaggccgacacgaagagcaagctggtgaagctggtggtcatggtgtgcgaggggctgcggttcaacaccgtgtcccgcacggtggacgcggggttcaacagccagcacggggtgaccttgaccgtgacgcaggggaagcaggtgcagaagtgggacaggatctcgaaggcggccttcgagtgggccgaccaccccaccgctgtgatccccgacatgcagaagcttggcatcaaggataagaacgaagcagcgaggctcgttgcgctcgttaagaatcaaactactgccgctgccgctgccgctactgctgccagtgctgacaacgacgatgacgaggcctgatcatcgacacatcatgatctgctgctgcacttaatatgttcgtatacaaataaatacaccccgcgtacgctgttccttatataaattttagactacataaataaaataaaataatgttttttttaaaaaatcttaagtttagcaactaaactttagacaagagaataaaacaggccatacgaagttttgaatccgagaagagaataatgagaatataaaccaggatcgagttgccatgctccttcgcaattcagatagaagtagttcaattgttcaaagcaatcattttcctcgtttgagcttgtccatgcacatagaaacgcatgtaggccatataagtagtcatataagtagtcgttgaataagcaaatactgcatctgttccaaaataaaatctgttgtacctttttatactagattcatacaatagttaatgtatgtgttatatgtctaggttcataatcatccatataaatatggatataaaaatctagagataaaatgacaattattttaagacggatggagcacaaaatacataccta

SEQ ID NO: 54810 - DNA, 474 bp, Zea mays
  Clone ID: MRT4577_149985C.1
cccccccggtgaacccggggttcaccacccagcacggggtgcccttgcccgtaacccaggggaaccaggtccaaaagtgggacaggatctccaaggcgcccttcgagcttcgagtgggctgaccaccccaccgctgtgatccccgacatgcagaagcttggcatcaaggataagaacgaagcagcgaggatcgttgcgctcgttaagaatcaaactactgccgctgtcgctactgctgccagtgctgacaacgacgacgacgaggcctgatcaatgcaacgacacatcatgatctgctgctgcacttaattactatgttcgtatacaaataaatacacccgggtgtccctaaaaaggtctaaaagggaccccgtaaattttaaacccctttatttcttggggccccataaaaaaaaaaaaaaaaaaaaaaaaaaaaaaccccccccaaaaaaaaaaaaaaaaaaaccccccccc

SEQ ID NO: 54811 - DNA, 3342 bp, Zea mays
  unsure (1)..(3342): unsure at all n locations
  Clone ID: MRT4577_149986C.1
gccgagataaccctagagccgagtgatcttatggcgcaaacaaacaaaagaatagtgccaaagttcactgaaatcttccccgtggaggacgcgaactacccttacagcgccttcatcgcgtcggtccggaaagacgtgatcaaacactgcaccgaccataaagggatcttccagcccgtgctgccaccggagaagaaggtcccggagctatggttctacacagagctcaaaactaggaccagctccatcacgctcgccatacgcatggacaacctgtacctcgtgggcttcaggaccccgggcggggtgtggtgggagttcggcaaggacggcgacacccacctcctcggcgacaaccccaggtggctcattcttctttagcttgtaacagcaaacaaactctcaaagaagctatccaaaaggaacaacttattgaaaattttcagcttcctctgtcggtgcaagcctatgaacaatttcttgacttagacgcaacctctgagcaaatcatggtagccaacacaaatgatgcttggaaactcatttggggagctgataatttctctacaaagaaaacttatagacatttgatgggtcaggctcaggttcactagatcttcagatcgctttggccaactaagtgtcaaccaaaacataaggtgggccgggctttggctaaagaacagactcaatacaagagatatgctgaggaggtctatcatgaatctagagtcttacacttgtgagaattgcatctggcaaaaggaggaaaccctttatcatcttttcctcaagtgtaattatcgcgaaggcttgctggaattctattggtatgacgnnnnnaagaattactaatcctgtggacgctgcagtaaatctaatgcagcagctcaatgtttccttctctatggnnnnnnnnnnnnnnnnnnnnnnnnncatttggaaatgtcgtnnnnnnnnnnnnnnnnnnnnnnnnnnnnnnnnnnnnnnnnnnnnnnnnnnnnnnnnnnnnnnnnnnnnnnnnnnnccacgtagctggcaaacgncccaacaaggtccnncngacgnaccacttacccaggaanccaaggataaggacccaacagtgcagcattgtgagagtgagtttgcaaaggaattatatctggtcacgcttagagctaaaggacgattcgattcgacaatacctgaatggcttcatagcttttattaagaggttagaaattagtgggtcaattcataactctgcacaaactgatgatcgaggaactcagcagcaaaggccacaatactcttcacaagcttcggaccaacagcaaagttctttcagtagatctcgtcaaaggggcagaggcgccaggggcttcgggggaaggtttggagacctatgcttctaactctgtcgcctattctgtggtgaagacaagcagtaggggcttggcctctttaatccctttcggttttgtggctcccaaactagcccttagtgggagatgataatggatagttagtggaagatgatgtggatggcttgctttcattaaatggttgaaacttgaacccctcctgtcctatnnnnnnnngttgacgtgaatagatttcattaagaggttggatgttagtgggatgacatgactattagtaggacgagatgatgtggaaagttagtgggagatgatatggatgagnnnnngctttcatcgaaaggttggaaggttagtatgatgacatggctaatatagatacatagatatagactaccaacatggctgcatgnnnnnaagctctcccactatatatatctctggtagcacatcatcccaattcacaatgcttacnnnnncacatccatcattttagctgttgatacaaaagagctagaagggagatggccgagacaaatccagagttgagtgatcttatnnnggcgcaaacaaacaaaagaatagtgcagttcactgaaatcttccccgtggaggacgtgaactacccttacagcgccttcatcgcgtcggtccggaaagacgtgatcaaacactgcaccgaccataaagggatcttccagcccgtgctgccaccggagaagaaggtacccgagctgtggttctacacggagctcaaaactaggaccagctccatcacgctcgccatacgcatggacaacctgtacctcgtgggcttcaggaccccgggcgggttatggtggaagttcggcaaggccggcgacacccacctcctcggcgacaaccccaggtggctcggcttcggcggcaggtaccaggacctcatcggcaacaagggtctggagaccgtcaccatgggccgcgccgagatgaccagggccgtcaacgacctggcgaagaagaagaagatggcgacactggaggaggaggaggtgcagatgcagatgcagatgccggaggccgctgatctggcggcggcggcagcggctgannncccacaggccgacacgaagagcaagctggtgaagctggtggtcatggtgtgcgaggggctgcggttcaacaccgtgtcccgcacggtggacgcggggttcaacagccagcacggggtgaccttgaccgtgacgcaggggaagcaggtgcagaagtgggacaggatctccaaggcggccttcgagtgggccgaccaccccaccgctgtgatccccgacatgcagaagcttggcatcaaggataagaacgaagcagcgaggatcgttgcgctcgttaagaatcaaactactgccgctgccgctgccgctgccagtgctnnnnnnnacaacgacgatgacgaggcctgatcatcgacacatcatgatctgctgctgcacttaattactatgttcgtatacaaataaatacacccggcgtacgctgttccttatataaaannnnnnnnnnnnnnnnnnnnnnnnnnnnnnnnnnnnnnnnnnnnnnnttaagtttagcaactaaactttagacaagagaataaaacaggccatacgaagttttgaatnnnnnnnnnnnnnnnnnnnnnnnnnnnnnaggatcgagttgccatgctccttcgcaattcagatagaagtagttcaattgttcaaagcaatcgattttcctcgtttgagcttgtccatgcacatagaaacgcatgtaggccatataagtagtcgttgaataagcaaatactgcatctgttccaaaataaaatctgttgtaccnnnnnatactagattcatacaatagttaatgtatgtgttatatgtctaggttcataatcatnnnnnnnnnnnnnnnnnnnnnnnnntagagataaagtgacaattattttaagacggatggagcacaaaatacataccta

SEQ ID NO: 54812 - DNA, 3723 bp, Zea mays
  Clone ID: MRT4577_149987C.1
agcttcggaagaggttcgtcatcttgctcaagatgaccagaaccgaagcctccgcgcagagagcttcatcaggaaggcttctacaatgaggacgactggtatgaggatttccatcatggaaattttgctttcgatgatagcttttattaagaggttagaaattagtgggatgacataacttttagggctaatttgagagctacaaaaccggagggattggaggggctagaatccctttcttattcaatagaattttagcctctttaatccctttcggttttgtggctcccaaactagcccttagtgggagatgataatggatagttagtggaagatgatgtggatggcttgctttcattaaatggttgaaacttgaaagttagtaattgtgtttagcgaagatgacgtgaatagatttcattaagaggttggatgttagtgggatgacatgactattagtaggacgagatgatgcggaaagttagtgggagatgatatggatggtttgctttcatcgaaagggttggaagttagtatgatgacatggctaatatagatacatagatatagatagattaccaacatggctgcatgcccccaagctctcccactatatatatctctgctagcacatcatcccaatccacaatgcttacaaaacccatccatcattttagctgttgatacaaagagaagggaatggccgagataaccctagagccgagtgatcttatggcgcaaacaaacaaaagaatagtgccaaagttcactgaaatcttccccgtggaggacgcgaactacccttacagcgccttcatcgcgtcggtccggaaagacgtgatcaaacactgcaccgaccataaagggatcttccagcccgtgctgccaccggagaagaaggtcccggagctatggttctacacagagctcaaaactaggaccagctccatcacgctcgccatacgcatggacaacctgtacctcgtgggcttcaggaccccgggcggggtgtggtgggagttcggcaaggacggcgacacccacctcctcggcgacaaccccaggtggctcggcttcggcggcaggtaccaggacctcatcggcaacaagggtctggagaccgtcaccatgggccgcgccgaaatgaccagggccgtcaacgacctggcgaagaagaagaagatggcgacactggaggaggaggaggtgcagatgcagatgcagatgccggaggccgctgatctggcggcggcggcagcggctgacccacaggccgacacgaagagcaagctggtgaagctggtggtcatggtgtgcgaggggctgcggttcaacaccgtgtcccgcacggtggacgcggggttcaacagccagcacggggtgaccttgaccgtgacgcaggggaagcaggtgcagaagtgggacaggatctccaaggcggccttcgagtgggctgaccaccccaccgctgtgatccccgacatgcagaagcttggcatcaaggataagaacgaagcagcgaggatcgttgcgctcgttaagaatcaaactactgccgctgccgctactgctgccagtgctgacaacgacgacgacgaggcctgatcaatgcaacgacacatcatgatctgctgctgcacttaattactatgttcgtatacaaataaatacacccggcgtacgcggtgttccttatatggtctaaaatgtagccagtaaattttaaactactttatttcttgaggctctataaacaatagatttaaagtgttatgtaacgtacctacctatttaaaaaactaaaagacagaaggacgccagcactcccaacatcaacgtgaattcagagaggaatccgaagctcatacagtcaacagtatggtaacaaattcaaagcacaaaaactgggggatatcttgcttttaaaaaatttttatgtcttatgccattttgcttttaaaaaagaaacaagaaatgaaaatttatttttaatttcttgtatggttttggcttcaatcgaattgaaatataactttatcatgaaaaaaaaaaaaaagagatgatatggatgagtttttgctttcatcgaaaggttggaaggttagtatgatgacatggctaatatagatacatagatatagactaccaacatggctgcatgcccccaagctctcccactatatatatctctggcagcacaggataaaaaggcacaatgcttacaaaaacccatccatcattttagctgttgatacaaaagagctagaagggagatggccgagacaaatccagagttgagtgatcttatggcgcaaacaaacaaaaaaatagtaccaaagttcactgaaatcttccccgtggaggacgtgaactacccttacagcgccttcatcgcgtcggtccggaaagacgtgatcaaacactgcaccgaccataaagggatcttccagcccgtgctgccaccggagaagaaggtacccgagctgtggttctacacggagctcaaaactaggaccagctccatcacgctcgccatacgcatggacaacctgtacctcgtgggcttcaggaccccgggcggggtgtggtgggagttcggcaaggccggcgacacccacctcctcggcgacaaccccaggtggctcggcttcggcggcaggtaccaggacctcatcggcaacaagggtctggagaccgtcaccatgggccgcgccgagatgaccagggccgtcaacgacctggcgaagaagaagaagatggcgacactggaggaggaggaggtgcagatgcagatgcagatgccggaggccgctgaactggcggcggcggcggcggcggctgacccacaggccgacacgaagagcaagctggtgaagctggtggtcatggtgtgcgaggggctgcggttcaacaccgtgtcccgcacggtggacgcggggttcaacagccagcacggggtgaccttgaccgtgacgcaggggaagcaggtgcagaagtgggacaggatctcgaaggcggccttcgagtgggccgaccaccccaccgctgtgatccccgacatgcagaagcttggcatcaaggataagaacgaagcagcgaggatcgttgcgctcgttaagaatcaaactactgccgctgccgctgccgctactgctgccagtgctgacaacgacgatgacgaggcctgatcatcgacacatcatgatctgctgctgcacttaatatgttcgtatacaaataaataccaccccgcgtacggtgttccttatataaattttagactacataaataaaataaaataatgttttttttaaaaaatcttaagtttagcaactaaactttagacaagagaataaaacaggccatacgaagttttgaatccgagaagagaataatgagaatataaaccaggatcgagttgccatgctccttcgcaattcagatagaagtagttcaattgttcaaagcaatcgattttcctcgtttgagcttgtccatgcacatagaaacgcatgtaggccatataagtagtcgttgaataagcaaatactgcatctgttccaaaataaaatctgttgtacctttttatactagattcatacaatagttaatgtatgtgttatatgtctaggttcataatcatccatataaatatggatataaaaatctagagataaagtgacaattattttaagacggatggagcacaaaatacataccta

SEQ ID NO: 54813 - DNA, 484 bp, Zea mays
  unsure (1)..(484): unsure at all n locations
  Clone ID: MRT4577_149988C.1
ccnnggccgggaaccctactgctaactctcatccgttcactgccggcatcgattaatccgccccattgtgacctctacagatgtctgcagaccgtaaagaagataacatagcccgctcagggaagtgcccacgttcaccttaacgtcaacggacagcgatgcttgatgatggtgcctctttctgcatagaatcactccacacccaagctgaacaaagctgatgaacgcttattgtgaccgacagcctgtggagatgattgccattccgctcctggtttgatggccacaggcttcgcgccgagcacacccctgatgacatgtacatggacgacgcccacaagatcgaggccatgattcaccagaccgacaacacctgtcctaccaccacctaaaagactcggtttgctctccgtaatgagcactactaaataaaacgcaaaaactcttattacataacttgtgatgctctgccttcttgtgccat

SEQ ID NO: 54814 - DNA, 590 bp, Zea mays
  Clone ID: MRT4577_149989C.1
gttggctcgcacgaaaaagggatgcattctgccaagggtgaactgccgccacggtggccgatccaaccggagactcttctagtggacaatcccatctacgactatgcgctggtaccattctcaagtattgcccttgttacggacgttgttctgaaacccgacatggcagagatcacccgacaccgtatcacacacatgcaaaatgtagcacaggagctccaggtcctggcgcattcttgggtatcggctggatcgattcccgaggttgattggagtaaagtcaagactctcgagttccaagacacgctcaagagcaggcaatcgttctcaactcgattggaaggcaaaatatgtcccacctgtccagacttcgatgagcactacaacatcattcatgcgaagcatgaactattccagcgcatcgcctatctcaagatggccatatctgatcagaacttggaacttttgccggattatgaacagcgaatagccgtgttgaaggatttgagacacatcgacgaaaaccaggctgtgcttttgaaaggccgggtggcatgcgaaatcattcgagcgaccagcttatcatgacg

SEQ ID NO: 54815 - DNA, 362 bp, Zea mays
  Clone ID: MRT4577_14998C.1
ccacgcgtccgaatgagcttcagggaaggccgccgccgcctactcctcgtcctcctcttcctggggtgtcgacaagccgcggtacgctcccacggtcggagacgaccaagatttcctcttttccgaggggagcacgagcacgagcaccaacgccgaccccgacctgacggttcgcacacacatggataatttgccaacttctgcataagttcgtagcagcctctgaaacatttcggccaaaatgaggatagcttttctcgtgctgttggttctctccctgtttctcctccctaatgggatcggcaaaagcttaaccgcaaggccttcggtcgtgaatattgtatcgattcttcagttgaact

SEQ ID NO: 54816 - DNA, 322 bp, Zea mays
  Clone ID: MRT4577_149990C.1
cgaaacccaggccgagccaggcgtacggccgaagaaaagcggcacgcgccggaggaccggcaattgcggggagcgggctacagaaaagggaagccagagaacgggcgggcgagagaagatggccacaaaacgaactccaacagcgacacccccacacagggcgcggagaagccgacacaggtgagaacaaccccgaacacagacgccaggaacgcgcaagctgacggcaaacagcccaaaagcggcaagcccaagcactgcaggcagaggagcaagaagagcaaagggggcaagaaaagcaaaaacaaggggggggaagccc

SEQ ID NO: 54817 - DNA, 1081 bp, Zea mays
  Clone ID: MRT4577_149991C.1
cattgcctcgctggaggccgggccgggactgcaattagttgcttcactcattcattcattcatccatcacccacccctcccggcctcccctgacctctctcgatcactcgtcatctccaccacacacacacacgcgcgagcgaatccaaggaagaagaagaggaggaggatccatggagaagtgcaggtcggtgccgcacgagcactcgtcggcgtactacggctgcggaggcgggtacgactacgaggacgtcggcggcgggcccgggcaggccggcaagtcgtacagcttcaacgggccgagcggccgggacgacccggaggcgaagcggcggcgccgcgtggcggcgtacaacgtgttcgccacgcagggccggatcaagaccaccgtccgcagcagcgtcaagtggctcaagtccaagttctccgacgtccgctacggtggcctctgaactgatctgatgagcgtgagcctactgcatgcaacgcatcctactcctacgaccgcacacatatatgtgtatgcacgaaccatggtgctcatatatatgcaattatatatgcacgcgcaagctatacgcgtgccaagctaaatagctgctgcgtatatatactactactactgtgtacatgtgcgtgtatgaactgtgtgtgtatggtctcaagtcactgcatgtgttcgtggctgctttccagatcggtcagtgtgttttctcggtttgcttttggatctgcacatcaagttgttgtatcaccagccaccagagggaccatgccctttgctttgatctggttcgccttttcagttccaaaaaaaaaaaaaaaaaaagaagcagaaaatccatagctgtgcctgtgttgtgtcttgtgtttcggaagtggagggtttcattccagtggttggaatttcgcccctgctgatctggattcgggtggttctgtcggaaaggcgaaaaaaagggtgctcttgagcacaaaccacgcatgcaggctgttggcaacaaaaatggatcggatcgatcaagaactgggtgaatatataataaaacaaataaacaatccttccccttttttttgaagg

SEQ ID NO: 54818 - DNA, 1015 bp, Zea mays
  unsure (1)..(1015): unsure at all n locations
  Clone ID: MRT4577_149993C.1
cattggctccctcgaggccgggccgggactgcaattagttgcttcactcattcattcattcatccatcacccacccctcccggcctcccctgacctctctcgatcactcgtcatctccaccacacacacacacgcgcgagcgaatccaaggaagaagaagaggaggaggatccatggagaagtgcaggtcggtgccgcacgagcactcgtcggcgtactacggctgcggaggcgggtacgactacgaggacgtcggcggcgggcccgggcaggccggcaagtcgtacagcttcaacgggccgagcggccgggacgacccggaggcgaagcggcggcgccgcgtggcggcgtacaacgtgttcgccacgcagggccggatcaagaccaccgtccgcagcagcgtcaagtggctcaagtccaagttctccgacgtccgctacggtggcctctgaactgatctgatgagcctactgcatgcaacccatcctactcctacgaccgcacacatatatgtgtatgcacgaaccatgatgctcatacgcaattatatatgcacgcgcaagctatacgcgtgccaagctaaatagctgctgcgtatatatgcacgcgcaagctatactactactactgctgctgtgtacatgtgcgtgtatgaactgtgtgtgtatggtctcaagtcactgtaattcgtggctgctttccagatcggtcagtgtgttttctcggtttgcttttggatctgatcatcaagttgttgtatcaccagccaccagggaccatgcccttttgctttaaaaaaaaaaaaaaaaaaaaaaaaaaaaaaaaaaaaaaaaaaaaaaaaaaaaaaaaaaaaaaaaaaaaaaaaaaaaaaaaaaaaaaaaaaaaaaaaaaaaaaaaaaaaaaaaaaaaaaaaaaaacaaaaaaaaaaaaaaaaaaaaaaaaaanngggggggggggtttaaaggaaaacatgttgtaaaccggaggggtggaaaatataaattttttttaaggg

SEQ ID NO: 54819 - DNA, 227 bp, Zea mays
  unsure (1)..(227): unsure at all n locations
  Clone ID: MRT4577_149994C.1
caaccaaccanccaccacgaccaagccngaaggcggcaggagcggangggaaacagcagcaccggaagaaggccgaaaacccaaagcagcacgcagacagcggagcagcccagggcacaccgaaagcaccagaaaagcggccaaacggagacagcggcacagcaagcacagagccagggccagagggaggcaaacagcaaaaggccaccgccaaacaagggcccccc

SEQ ID NO: 54820 - DNA, 365 bp, Zea mays
  Clone ID: MRT4577_149995C.1
cggccgcgtcgacctggggctgcgtctgggaccttacctcgacgggcaagccgactccggcaccgaccaaccagggcactcaggcgcccacgcctgcccccacgggcaagccgacgccggcaccgaccaaccagggcactcaggcgcccacgtctgctcccacaggcaagccgacgcagcccacatctgctccgaccgtgcctacgcagacgaccgcgcctccgacgggcaagccggaccagaccactggtaagccggaccagggcacgcccaagccagaccagactactgggaagcctgatcagggcacacccaagccggaccagaccacggccaagcctgaccagggcaatccgggccagggc

SEQ ID NO: 54821 - DNA, 278 bp, Zea mays
  Clone ID: MRT4577_149996C.1
aaatatttataatttttttttattattttttttctatgggtaatttttggatctttatttttaattttatacttttttaatttttttactataccggacctgtggggccacccggaaatttcgtaccggtccctgagggggtccaatattttcctaataggggtcattataaaaatggggatattaatggctaaaattgtttcctgggaaaaaaggttttcctctataaaatttcaaaaaaaaattcagccggatataaaataggtaaaaccgggggg

SEQ ID NO: 54822 - DNA, 549 bp, Zea mays
  unsure (1)..(549): unsure at all n locations
  Clone ID: MRT4577_149997C.1
gttgnaacgccggntcggcgggtggttcgagtacttgtgatcgaccgccgtctgggtgatgcgttgcagcactgccggcaactccaggagcatatcctgcaaggaagcggtgttgtccgcctgttcggtcagtaccgcgttggcatgttgaaacgccagggccatccagatctggaacaccggatcgttgatgatcaggcggcgctgggtgaccggcagcaggatcaggtgcaccgcactggagaaaaacggatcgagcctgggattgccctcgaaacgctggaagcattcggcatagagtgcggcgaaggtgctgtagcgctgttggctgagtcgatcgagcaaacggtgaaaacggtccggggtggcatcgggcaagaacgtgttgtattggaacagttcgtcgagctgggattgcaatcgggtggtcatgtcggtgtcctcgggatatcactcgatagatgacgggcgcgcaataaccctcctttcagaaagagaggcgtcagaatgtaaagtgtcggcagtgctcggggaggcgaacattaatag

SEQ ID NO: 54823 - DNA, 727 bp, Zea mays
  Clone ID: MRT4577_149998C.1
ctcggactgatgattggttttggtgtggtagaatttgatggcaactcctcttttatttgtgggaagatgagatgtagtttattggtgacaacaaaaaggtcaaggttataaaatccatctgaaaaggaccaggcaagactagaggggatgaataggtctgttataaaatttactcaaagcaatggttagtgataggtgcgccagttctaggaaaaaatgtactagcggtgcaacggttctaggcgcaactatgctactatcacaaaatagagcacctcatgaacataattcaaaatctacaacaagaaaagtatattgagtaaattactagtgttcccagtagtgtatagagactatttcatcacttttcctaggatggacgctctagcacaagtagataaagtgtaaaccctagaaatacatctaagagaagttagagctcaaaaacgatagcaagaacacaagatcaatgcatttatctcgtggtttagattgctatcaaagcttctactccatgttgttgaggaaaccaccaaagctaaaccctatcctcttctccagtcaagggagcaagtctctagcttgagagttttttgaaagggaaatagggtcaaaccttttcataaatgattctggtgggtgaattgcccaacccaaataattgtgactaactagtttgctttagattataagttctacaggtgccaaaggttcaacactaaccaat

SEQ ID NO: 54824 - DNA, 397 bp, Zea mays
  Clone ID: MRT4577_149999C.1
cccacgcatccgacaaggcactctagagttcaacaccaatccatcgccatggggctcatgcacaggggttggggggatatgcataaatatgccctgccgtacaagaggactgctcccatctagctcaagaccgctaccaccgagctggactaaatgattatcaaggctgaacacatcgaccacatactgcaggatatcggtgtactcctccgtgaccagaacgtgatccatcttgctaagagcatgactggtagcacgatcctacgtatcctcaatgaccatggacttgcgccttaaatccctatcgatctatacttactcattaacaatgaggtgatgactacgaatcatttgcagacgaacagcctggacatggactccatattcacactcattc

SEQ ID NO: 54825 - DNA, 299 bp, Zea mays
  Clone ID: MRT4577_14999C.1
gtcagaaaccaaaacgccccataactatttgtttataaaagatagatcgatatatagagatccacagattccatcatttggggacggcatgaagtgaccgtgtttttttttaagtccacgttgacccacacctccggacctgttcacgttatcaccctgatgaagacgaccggggagggcggaaacagggttccagattgtttttcggctatgtgcctgttaatgaacgggagtgtcaaggtcgttctcccttgggggggctgttgaaacgcaggggggcatgacaaaaagtctcggcc

SEQ ID NO: 54826 - DNA, 156 bp, Zea mays
  Clone ID: MRT4577_1499C.1
acgtctatcccattcatggtttcgtatctcctcatgaactacatgcacttcaagactctagtggccgtgtgatacgtcttctgagcactgggttatcctatacctgatcatttactacccctacgactgatctctttaggccgatctgcatttaaa

SEQ ID NO: 54827 - DNA, 397 bp, Zea mays
  Clone ID: MRT4577_149C.1
ccccggggcggcggcgcgtccgctttcgcagacgccgctcttcgttctcttttctccgcgtccgttcacaacgcaaatgagcttcataagcgcatcgctggcataagtataactgtgtaaacccttgatccgacgtgtcttgccgccatgctgatcgggaactgtccacccgctaggaggatatcgtactatgtcttgagcacaatacatgcacaaggtccccccaaatgccttccgccgattactagccggagcctgtacatacacacacagacagacatacacaccgtaccggaggttgaagcggaaaatcgatcccgacgctttgccgccgttgttttgtcaccggagaggagatttagcctcaaaagcactattttttgccttgttattttct

SEQ ID NO: 54828 - DNA, 479 bp, Zea mays
  Clone ID: MRT4577_14C.1
gtgggggagttggggcccggtttacaattactttcgtcatacgtacgttcaaacagagtagttgcgtgctgtagaaggactcccgttctcagtaaagccttggtcttgttactgatgacccaccacaacagcacaaggtctctgccagtacacagtttcccgggggggggggtagagaaaattcgcctattgtacgacatcgcgactttaacatagaaagccgacggaccttatgactcctactccacaatattttggcaaaaccaagacttaccagatcacccccgccgccgcacttttaggtctgggtttcttcgcatggatcgcagagggggggggaccttggcatgaagctcctcaataaagacgttggagaacttctggatgtcgaccaggatgcgctcctccgcgcggggcacatgcttgatggtaacacccttgctaccgaaacgaccactactaccagtgcgacgcacgtg

SEQ ID NO: 54829 - DNA, 311 bp, Zea mays
  Clone ID: MRT4577_150000C.1
gactagcgagtaactcatccatgcaacctcataacaatccgttcctttctactgacacttgcgataattaactaaaaaaacccccccacccccgcgaaatacccatcataaccttaatgggctacacatacatgccgacggagagcaaaacacacatgagatccaagtgctatataacgacgatcactaatcagtatcagtccaagccggcaaaaactagtattgacaggaacgttaacgccaggtattcctccaatgcttacgcagccacagccagccacaccttggatgctcacagctaggtcttgacg

SEQ ID NO: 54830 - DNA, 366 bp, Zea mays
  Clone ID: MRT4577_150001C.1
cctgaaaaagagccgccggatttgaaatattttagttttgaaaacagagattttagcttggttgacaaacacctttgggaatataaaactacagctttggggaatactgcgttatttttccaaaactttggaaaaactttacttccaaacaccccgtaagattgcaaacagggcctaacagttttagaacgacaggcggccaccagcaaatttttatcattatgcttggggatggaacataagatcaggtgggcgtcacattggaagctcgccgatatttgttatcacaacctggttcttagggtccccactttgccgggcttaagttttgagcttgtgcacaacattcattccagacaacacctt

SEQ ID NO: 54831 - DNA, 218 bp, Zea mays
  Clone ID: MRT4577_150002C.1
ctgccgtctacctacaatactttaatttagcccgctggcggtgggcattgcacctacgtacctaacacaacagttgctgcaacaaatgtacagctttgactcactagctggggcaaacctgtgctactacacagtgcttcattaacaatggtggtaacttgtggtactacaagacacgactatcatgaggctacatgtgtctctgaagacacatgtgc

SEQ ID NO: 54832 - DNA, 322 bp, Zea mays
  unsure (1)..(322): unsure at all n locations
  Clone ID: MRT4577_150004C.1
gggcgaggcagggcaagggaaatccagttttgggaagcgacatgccaaggttattccaaaccaacagcaaaaacaccggacaggcagcaaataaaacaaaaagggaccccaagaaaccatgggccacctaaggaaccaaaagcagaaagggcaaggctgaaccaccaacccgggaggaaacctctcacatcctaaaaaattcggggggaagactggaaccacaataaaacacgcggtaccgggcaaaaactgcnnggccctccaccccggaccaacaaggcaccgccccctccctgaccccaagttgaaaaggaacatgccc

SEQ ID NO: 54833 - DNA, 417 bp, Zea mays
  Clone ID: MRT4577_150005C.1
atctttactcaagtaaattttcttgctaacacttgtaaggcttagcttgttaaatgttaatcctataaaaagttgcttccatcatgtcattgtaacattgttgttcaatccatctttacacaagtaatttttcccttaataacgcttgtaagtcttaggttggtttcagtgcatctgacacttatcgaccgccacatcagttaccgatcacgttctcgaccatcgtcaggtcttatctatcgcagcgctcccctttaccgacagcttgcaaccacatcaatactatatcaacttttcttttatatacttgtagttgaaatgaaacacaatgttttatcaaaacaaaaactcattcgagtacataattaagcaaataaaatttacgtaatttataaaaacaaattaaacaactcggtc

SEQ ID NO: 54834 - DNA, 932 bp, Zea mays
  Clone ID: MRT4577_150006C.1
ccacgcgtccggccgttcgagaggaggaaggccagcgttccaaggagcacgccgtccccgccagaccgtggccatccagcaatgccaggcacccactggatgccaggcaaggcaccgcagcaagcagagccaaggcgaggagcgggagcataagccccagcaggttcaggaggcagtccacttccaaggctgccgagacaagagcgggaaatgccaagcctacagaggcgacgaggggagggagcgaagcggtcaatcacaccagcaatgtagccacgacgaagaggccggcggggagctccaaggtcagggttgtcccgagccgctacagcatcccacctggctcctccctagcagctgtgacacaaggcaaccgatgcaagcagtctctcccaggatcggctactgagaccagagtaaatctcactgagccgccgaacgacgagttgtctcctgaagaacttgccaaggttgcagagctgctcccaaggattaggaccatgccgccttctgatgagagcccgcgtgactcgggatgtgccaagcgtgttgctgatttggtcgggaagcgatccttcttcactgctgcaggggacgatggcaatctcgttacgccctaccaggcacgggtggttgaacttgaatcacccgaggcagcagcagaagaagcagaagcttgagaagtttgtctttgatcaattccgaagtggcttgcatctgggcgtggcctctttttgcagtgtgtgctactacatagtctactgttacattcatatcatatcacatttcctattttttcccccttgagacattgcttagtacttttgtgttgccttgtgaaaagagagtggaaaggtttgcatctgctgatgctcttgtttcggattgtgtgttcctggttcgatgaagtacaggataatgctgtggtttat

SEQ ID NO: 54835 - DNA, 260 bp, Zea mays
  Clone ID: MRT4577_150007C.1
caagggaacataccttaaaaattttcgaccggttggtttttagcttaaaacagcgccccatttgacacttttcttaaaaattcttttaatttgcagttttttttacaggccacaacattttttttaagatttttttttccctggggaaaggaaaaaccctgccccggccagtttttgttttttgagattttggattgccaggtccctttcctggtggggacccagggtcagttttccgttgctacacctttccccccagg

SEQ ID NO: 54836 - DNA, 574 bp, Zea mays
  Clone ID: MRT4577_150008C.1
aaaaataatgcttatgttgttttttctctattcttatttcagagaattcctagatggtggatctggtactactggatttgcccattggcatggacagtgtatgggctcatcgtgacacaatacggagacctgcaagaccccatcacagtccctggcgaaagcaaccagacgattagctactatataacacatcattttggataccatagggattttatgccagtcgttgcgccagttctcgtgctctttgcagtattcttcgctttcatgtacgcagtttgcatcaagaagttgaactttcagcaacgataggaacaagatatggcagaaaagctcttgagagtattttttctttttttggaaaatacttccttttctcctttcatttttgagtccctttaaaaaattgcaatgtacccagggtgtagcttcggtattccacacatcgtcaaatgtggcgaggtcttatacagatttctagccgtttaaccgtggaacattgtaatttgtaagagcacatcatgagaaagttttgttcatgcccaattaaattcaacccaaacaaacccacccg

SEQ ID NO: 54837 - DNA, 150 bp, Zea mays
  unsure (1)..(150): unsure at all n locations
  Clone ID: MRT4577_150009C.1
ttatcttatttctcaaatccgactccacacggtggggaccatttcccagttgggttgttctatnaaattttgtttggtgtaaataaatggtgcttcatcatctactcaaatttttttctcttttttaatgaaataagttgacttataatc

SEQ ID NO: 54838 - DNA, 390 bp, Zea mays
  Clone ID: MRT4577_15000C.1
gacacgcttgcatgcacacacaatgcgatgtgagccttgttcctcctggtcctcttctggggggtgcatggtgagaaggaagagtcaaagggcatcgatgcgaaagcgtccggacctggtgggtacttcgacatcaccaagttgggcgcctacggcaatggcaagacagacagcactaaggctgtgcaagaagcatgggcataggcttgcggctgcactcttaaacagacaatcctcatacccaaaggacacttccttgtcctacaactaatcttcacaggcccactcaagggcgacttgaccatccaagtggattgcaatttgctggcgaccacagacctaagccagtacacggaccattgtaatcatatccagattctactcgtctat

SEQ ID NO: 54839 - DNA, 271 bp, Zea mays
  Clone ID: MRT4577_150010C.1
atctataactaccttctttttgggagggtcaaactaaactaggggctgggtatcttatcaaatccctctcttatattgtaactatctttctccttgtctgaagcagcattacatgcattcatgcactatgaatctgagcacatccattatctgattgttactgctctcacctatctcttggctaatttactctctttctgtttacttacgaactactctcctttcaacatacataacatgattgcataacctatcaactaccactcctcca

SEQ ID NO: 54840 - DNA, 448 bp, Zea mays
  Clone ID: MRT4577_150011C.1
gagtgacatgaataaaacgaggaatccataaaacaagctgaattccttgtggtagccaatggagagtaccaggatcaaccgagtccacagtaccaggttcattttcttcttcttctcgtggtcatcgtgtcgccaaagttagtttattttattcctagtttgggggcattagtgccgtagatgcgtcattccacatccatctaggagggagcactgtcgtttactgtatacggatttcgtgatgtatcccgggaaatttttgtagatcggactcgtagaagaagagattgcaattgcaatactgtgtatcactctgatgttgtccagtttgagaacttgacaggtgtatgggatttgccccgaggctgctggttttcctgctgcttggtttgggaaaccgatctctcgattgtgagatacaggcaggtttgcgcacgagagtactctc

SEQ ID NO: 54841 - DNA, 415 bp, Zea mays
  Clone ID: MRT4577_150012C.1
tcactcgtccggctacgcgtccgattcattgccttatgtaatgaggaatgcactgttgacaagatctgaatcggtttccttgaggactggtgaaagctgcaatcctcatacaatgaacagacggataatattaacgtgtgatgagctgacgaaatgggtgagtgattttatacagctgacagaacatgctgtttcagcattcaacgacgtcctaagctaattggactacattatggaaacatatgtccggatcttggatgacttaatctcacggtatctgactatcttttctaaagtgatgaactatgctgcgcactttgttatgaacgtttatagtctccttcgtaggaagacgataatgaacatggcgatgatgaggcatctgacatgacagatactgctaaatacgttgaat

SEQ ID NO: 54842 - DNA, 435 bp, Zea mays
  Clone ID: MRT4577_150013C.1
cccacgcgtccgcggacgcgtgggcgccaagcaggccttcgacgaagctatttcggagctggatactcttggggaagagtcctacaaggatagcaccctcatcatgcagctcctacgtgacaacctcaccttgtggacttctgacatgcaggaggatggcagtgatgaaatgagggatgcaagcaagcctgatgatgagtagtagtgagaccatccaagtgactgccatctctgtctcttaagtcttaacccttgggggtagtcgtgatgcttgtacaaggaccattttcgttgtgtcctttatcatcgggtctgcttacctttcgttttgttatattgctattgtggtcccccatgtatcatttcaccttgcaactggaaccctgttactgttagtgtgtgggaaagaataacataagccctctgttaactagt

SEQ ID NO: 54843 - DNA, 362 bp, Zea mays
  Clone ID: MRT4577_150014C.1
ttttttttttttttttttttttttttttgcactattctctcgaatctcgttttcactgagttacaacccgttatcagcacgaatgctaacgaaatcagagaagcaaagaataggaagaatctgacgctcgctgttttgggatggagttgttgttcgtgacagagtgaagatctctttttaaaggtacgatgtctaacattgtttgcatcagtgctccacctttcccttcgatcttcacaatacgactgcgctccttcggagatgcgcgttaaaagaacgcatgcagcatgcgcccgcatgcattggcattcacgaccggccggtgacagtccccggcttgcgcgactcgtcgcacggggcac

SEQ ID NO: 54844 - DNA, 307 bp, Zea mays
  unsure (1)..(307): unsure at all n locations
  Clone ID: MRT4577_150015C.1
aaaggccaaattgaacaaatgttattaatgacccgttttatcgctcaatttggcggcaggcttttgggaggccgccaatacaacattggtgataatgtgccacaatacatattttgatcattacccttcatgaaaaccacccattaaccataggtgtttacactttttttggaatgtgccaagggggcccggcactataattggggttggcctgattattggaacaaaacatgagagcaagtttctcaagnaaaagtgaaatgaaaggggcttaaactgaaacttccgaggaaaaaagcctttttgg

SEQ ID NO: 54845 - DNA, 268 bp, Zea mays
  Clone ID: MRT4577_150016C.1
aaacaaccaaatagacaggtgaataggctacaaaacagataagtgagaaataagaaattggccagctttgcgctaggaccagaagcaaccaccaactggggggcgtgaatatttttttgaatcctacaggcatttcctaagcaaagagattaaaacatgggcaaaaccaaaatgcccggaacagggtgcccagcttccatgaaaggcactcaaagggtgaagggatctgactagcattagacaacagattagtcctatttgggcctgg

SEQ ID NO: 54846 - DNA, 455 bp, Zea mays
  unsure (1)..(455): unsure at all n locations
  Clone ID: MRT4577_150017C.1
gggaatnccggggcggaccacacgcgtccgcgacccctgggccggccccggggaacatttccaggtttggctttccatcttaaggccgaggatcccggaatttttgaaacctaaggaaggtcaaaggggggcctgttggttttgccaagcaaactttaagggcctgttggagggttaaaaaatttaatcgtcctgaaggcataaaataatggttggtggtaaataatcttttccctggtttttaattgggaatcttggctggattttgggggaatccttttttatttcccctttccatggtcccttaatttaatttcggtttggagggccagacctggagtcagttaatgtgtccaaagttgcgtttgaggctgcctgtaattgaatggtttggcatgtgaggaagatttaaatgtgttattcaactttgggggtcatgatagtggcccatattt

SEQ ID NO: 54847 - DNA, 205 bp, Zea mays
  Clone ID: MRT4577_150018C.1
tgcgtacagaacacgcgtccgccgacgcctgcgctcgttctgccttcagtgcttgctcgtcagctcggatactatatctcctatctgcactggccatgcgaagcgttccagctcctcccaccgcggctatggtcacggccagcacctccgggctcttcacgctgccctccctccgcgccttccctctttcctcgatctgacttca

SEQ ID NO: 54848 - DNA, 317 bp, Zea mays
  Clone ID: MRT4577_150019C.1
cgcgtccacactcagcgctagctgaggacggtacagcggcacagaggtgcgacgtacgacgacgacgacgcaggcgccacacatggcatcccagctctgccgccgccgtaggcgggttccacgggctcggtggcgacgccgggccgatgtcacgcgtggcagcgctggcgtccgtgagggtgggcaaggagaggtcgtcgtcgcagggcatccgctgcgactagatcgggtccgcaggaaagtgatcatggtgaccacgacgatgctcatgctattcgccgggcggttcgggctggcgccgtcagcgaaccgcaagg

SEQ ID NO: 54849 - DNA, 569 bp, Zea mays
  Clone ID: MRT4577_15001C.1
gtctaaatgcacattcaccggacataaaacactggagaataagcacaagccattagtgctgaaggaattgagaaaactatggaacgtggaagaacaagatcttccatgggaagtgggggactattcaccttcgaatacattactagtggatgattccccttacaaagctctgcgcaatcctccgcatactgccatttttcctcactcctacagttacttaaactggaatgacgattcgctgggtcccaatggagaccttcgtgtgtatctgcagaacctagccgctgcagataatgttcagcattttgttcgtgataatccgtttggtcaacctttcattactgagagcgatccgcattggaacttctatgctcagattgctgatagaggacgtgcacccttgacatgttgtgcttgaactcccaagggtcgtgcttttttctgggagttctgtggttatccatgatcaaaagatcatgatgtactgaagattacagagtttctgctatgggtttaaattgcaggctctacgaaaggtatcagaccaaatgaatgaattgtctgacatt

SEQ ID NO: 54850 - DNA, 1265 bp, Zea mays
  Clone ID: MRT4577_150020C.1
gggacctttctagatatttcccaaccccctcagcaagcacagcagaaaggagaaagaatcctccctttctctcctctcctgcctttccccattactactccccagtcccactcccacccgcaggccgcgccgccccagcaaatctcacgcacagaaacaccaaagccccaaaggcccaaactcaccacctcccaatggagaacggcgacgaaaccctcgcctcccccacggccgccgccgagacggacgcgctcaacggcggcgtcgcggaggaggagcaggtccccatcacccaccccgcaaagtcctacgtcacgctcgccgacgacaaccccgctcctaacggcggcgtcgtgaaagaggaggagggcggtgcccacaccaccgcgaagtcctacgcagctgtcgccgcccaagccgagatcgaggacctccgcgccgccaagctcgacctggaggagaagctcgctgaggcccgccgtgagaacaagtccctcgccgaggagacgcaccgcagcgaggggatcttcacgcaggcccgggaggaggtcaccatcgccgagttcgccgccacctctgccgagaaggaggtcgcctcgctccgcgcggaggtcgaacgcctcgatgctgttctcaggatcgagaagggcgagcacgagctggacaagcagagacacgagaaggtcgccaaggaggtggatgccgtgcgccaggagaagctcaagctagaggaggagatcagagccctgaaggcttccgccaccgccgccgccaccaccaaggagagggaagctgcgccggcttctgaggccccgaaggaaggggaagtcgcgtggctggggatggcggtggctgcggctgccggcgccgccggcacggctgccatcatgctagtttatctccgccttaagaggtaggtgttctggtgctcggttgcgtagcagtaaagggagttttcgtcgtgatgctgctattactgaactgggaggtatgcgacttctatgagtagttgcttattagcctacagaaaatatagggatctggagactggttatgtttcatggctgttcttctttcaccggtaccattttatgacgaacgttgtatgactgattatcttcttgtttacgttactgctacggcatggcctcatgacccttttttgatctaaaaatggtccgtgttctgcggcaaaaaaaaaaaaaaaaaaaaaaaaaaaaaaaaaaaaaaaaaaaaaaaaaactcgaggaaagggccgcggtacc

SEQ ID NO: 54851 - DNA, 266 bp, Zea mays
  Clone ID: MRT4577_150021C.1
atacaaggtactaggttgtatgacttctaccacttacaccatttttttgtcatctttgtttcttggcaaccgcaatatagcattctatttgtatcaaggagcatactgctggacaattgctttccatcaccagcaaagataatatgaagcctcggaacctaacaaaaaaaaaaaaaaaaaaataaattcaaaaaaaaaaactttgagcaaaagaaactgggaaaattaaaaaagaaagcaatgaggctatataaaaactaaccctc

SEQ ID NO: 54852 - DNA, 834 bp, Zea mays
  Clone ID: MRT4577_150022C.1
catctcatcgtgcatcttccttcgtccaccatgcggtacggaagggaagcagccgccgtctccgtcgccgtcgtctcgttcgtccccaaatcttcaccgagcttcctctccgctctcgccccgcgcagcaacgcggaggaaggaatggacaagtatcacagcagcacccgctttgcacccctgagagacgctccatttgctctccgtggtaagcgctcttgaaggaatttgctatgttatttgtacctctgaattctgaaatagtttggagatatcaaacaaacgcaccagtccacaagtcaatactagtataggtcatagtgggtgcacatatgcgcctttcaagtgcattcttgttgtgtacttttgtaggatgtgtaatggactaacagctgaggtgcaagctggaaagaatattagatagagtggtttgattggtgtgttataagagaatgcatctatatctcattttcatctgcatatatgggttcgtaagtcagtttgttgtttactgaagaacatccatgtttttagttcataaatctttggcatgcaattgctatgtgtaaatggtactatactattatcaacattgttttcatcattcttgctattcttctctaagaatctgcagtttacttttctaataaggccggtcacatttgttgcctttatcttcaggtgcctttggtacctccaactcgtctttcaactgcatggatggccttagacactcctcaagcattgggcgagcaaggagctacacatcttctccttaggagctctgcgacagagatgcctacatctggaaccgatccctgcatacagtcgtcc

SEQ ID NO: 54853 - DNA, 786 bp, Zea mays
  Clone ID: MRT4577_150023C.1
agcttcgctccgccgcgaagagccgccgccttctctccggcgcccccttccgccgcggccgcccgtccgggcctccagcctccgccgacgaccagatggattacctcaagacggtggtgccgtcgcagctcctggccgagcgcggctccaacctcgtcgtcatcaacccaggctctatgaatgtgcgcatggggttcgctagtcaggacgtgccgttcaatataccgcactgcattgcccggcacaagaacgatgcgccgaagctgtcggtgcgagaccagaggctcaactgtcgtgctgggtcgacgcacaacgcagagcgggagagggcgtatgatattatcgcttcaatgctcaaaatcccattttttgggtgaagtatcgccttcagagaaccaaccattacctcctaagatgggacgtcttgatggtctttcttcacagcaaaacaaagatgatagtatactcacatggacagatgtgatggataaaagcatcaaggcatccacgtcaattgaaaggtcagtaaacagtgacgccgatgaagatccttcacaaagcacatctgatcatggtaacaagcccaactccgaagaaagcaagtacaaggaaatgatatttggagaggatgctttgaaaatccttccttctgcaccatactgtttgggtcgcccgatcaggagaggccattttatatttctcaaaatattcgttactcaggttttagaaatttgcgactatttggactggagctgaccgagaagtgcatatcacccaaagacagac

SEQ ID NO: 54854 - DNA, 531 bp, Zea mays
  unsure (1)..(531): unsure at all n locations
  Clone ID: MRT4577_150024C.1
aactctacccggccgccgccgccgccggtacatgtaaaaaaaggcttcgacctgcgagatgaacgcaacggagagcattcaacaaaccaaaaccgcataaccaaaatgttcagactagcgcgtggaacggcaaggaagctcatcctagcgctgcttacatgtctgtcgtcggcgctgctgtacaggcagattcagccgctaccgcccaagatccccggcacgccgggcggcccgccggtgacggcgaccaggacgaggctcagcgacggcaggtacctggcctatctggaaaccggcgtcccgagggagaaggccaagcacaggctcgtctttgtccatgggagcttgcgcaagagctgggcgtttacatgttgtccttcgatcgccccgggtacgccgagagcgacccgcacccggccaggaccgaggagagcatcgccctcgacatcgccgagctcgccgacaacctgcagctgggtcgcaagttctaccttgctggcttntccatgggcggcgagatcatgtggagct

SEQ ID NO: 54855 - DNA, 758 bp, Zea mays
  unsure (1)..(758): unsure at all n locations
  Clone ID: MRT4577_150026C.1
ttgcgaactcctacccggccgccgccgccgccggtacatgtaaaaaaaggcttcgagacctgcgagatgaacgcagcggagagcattcaacaaaccaaaaccgcataaccaaaatgttcagactagcgcgtggaacggcaaggaagctcatcctagcgctgcttacatgtctgtcgtcggcgctgctgtacaggcagattcagccgctaccgcccaagatccccggctcgccgggcggcccgccggtgacggcgaccaggactaggctcagcgacggcaggtacctggcctatctggaaaccggcgtcccgagggacaaggccaagcacaggctcgtctttgtccatgggttcgactcctgcagacacgacgcgcttccgatctccacggcacgctttgtttttacctttagctactgttttgtgttttttgtgtgatagatattgatgtgtttcgctgaattggtgaaactggtgtgggtgcaggagcttgcgcaagagctgggcgtttacatgttgtccttcgatcgccccgggtacgccgagagcgacccgcacccggccaggaccgaggagagcatcgccctcgacatcgccgagctcgccgacaacctgcagctgggtcgcaagttctaccttgctggcttctccaggngcggcgagatcatgtggagctgcctcaagtacatcccacacaggctctccggcgtggccattctcggccccgtaggcaactactggtggcccggcttgccgtcg

SEQ ID NO: 54856 - DNA, 967 bp, Zea mays
  unsure (1)..(967): unsure at all n locations
  Clone ID: MRT4577_150027C.1
cctcgacattgggcgcctccgggccggaaaggaactcctacccggccgccgccgccgccggtacatgtaaaaaaaggcttcgagacctgcgagatgaacgcagcggagagcattcaacaaaccaaaaccgcataaccaaaatgttcagactagcgcgtggaacggcaaggaagctcatcctagcgctgcttacatgtctgtcgtcggcgctgctgtacaggcagattcagccgctaccgcccaagatccccggcacgccgggcggcccgccggtgacggcgaccaggacgaggctcagcgacggcaggtacctggcctatctggaaaccggcgtcccgagggagaaggccaagcacaggctcgtctttgtccatgggttcgactcctgcagacacgacgcgcttccgatctccacggagcttgcgcaagagctgggcgtttacatgttgtccttcgatcgccccgggtacgccgagagcgacccgcacccggccaggaccgaggagagcatcgccctcgacatcgccgagctcgccgacaacctgcagctgggtcgcaagttctaccttgctggcttctccatgggcggcgagatcatgtggagctgcctcaagtacatcccacacaggctctccggcgtggccattctcggccccgtaggcaactactggtggcccggcttgccgtcgaacgtgtcgcgggacgcctggtaccagcagctccctcgggaccagtgggcggtctgggtcgcgcatcacctgccgtggctcacctactggtggaacacccagaagctcttcccggcctccagcgtcatcgcctacaaccctgccctcctgtcccaagaggacgagatgctcatggccaagtttggctatagagcctacatgccgcagatcagggcacagggggagcacgagtgcctgcaccgggacatgatggtncggttcgggcagtggagctggac

SEQ ID NO: 54857 - DNA, 554 bp, Zea mays
  Clone ID: MRT4577_150028C.1
cacgcatcgcggttctccccgtgtccttcgcgtgagttctgcgacgactacgcgaccgccggcgccagcgccgccgttcgccaggtttccggatctctatcttcgggttggagcccttcaccggcgacgagcagccaccagtgttgcgagtcccgatggcggaaccagcgaagcccgaggtgacggaggaagctaagatggacctgctcgaggacgacgacgagttcgaggagtttgagatcgatcaagagtgggatgacaaggaagaaggcaatgaagcacttcagcaatgggaggatgactgggatgatgacgatgtcaatgatgacttctcgctgcagctgaggaaggagctggagagcaatgcgcccaagaactagctagcatttgcattttgcaactgttatttgttctggaccttggcatggctactttgatgtagtcgctgcatttgctgttgttaataccttgattactgaaagatctattttccgagttatattaacctgctttcatcatcatctaataataatccaaatctgatcggtctattc

SEQ ID NO: 54858 - DNA, 280 bp, Zea mays
  Clone ID: MRT4577_150029C.1
cgacccactcgtacgctggcgctaaactgctaccttgacatgtctactttcctaagccattgaccctgagccgggatcgtttccactggagcttgtgtacaatataccttcagtcctgaagcgtcacatacgtcgaatactcgcgcataacctattactctgaacaggccgcactccagtcatgtatcacaattctcacatgctcacagctcacttccatatttcagatctggatccaaccacttattacgctgacattctttatcgtcaactattgaaa

SEQ ID NO: 54859 - DNA, 782 bp, Zea mays
  Clone ID: MRT4577_15002C.1
aatttttatttttaaattactcctatttgaagagactcttgcgtgagttatttatccgcgaggggtaccaactagattatgtatttgactggaccattatgacaaatcgccagtttagagataaatgtccttttcaccctagcgacaagacggtgtgccacgcaggaccgtgtgctttgacaacgacgccaaactcagcttgaagctttgttagaagaactagatccggttccggtcacaatcgagaacacaccaagcacagaagtcttctagagtcactgatgccatccaagactgttgattcggataaaataaggccatcgtcatcatcgcgcaatggaagcacgtcaagaagagctgtgctttcatcaagcaaaccaagctcttctggagatccaagcgacccaaaccgcgtgggcggcttggccccgagtagcagcatacgcccattgagtgcccaaagggcacatcattcaggtggaacagagatcaaatcattatcttggtcaaaaatgggaaggtcttcacatgatgacgctatcaggaacttcgagttgctctcactttgtgctgacaagagaaaaataaggaactaacgaaatgggctaggatctggactctggatgatgacgattgattgctgggggtattatgagcaggcagctccagtatttctatgttggaaaatgttcttttaaaaataaaaaatgatttaacttatgagattgttttcctccagtctaaaaaaaaaaaaaaaaaaaaaaactagttctagatcgcga

SEQ ID NO: 54860 - DNA, 165 bp, Zea mays
  Clone ID: MRT4577_150030C.1
ctcacgggtcgacacacgcctctaaagacagtctggggaagtatcgatttgtcacgggaaggtacgcctaatgttgagagaaactgtattcttgtgctccactttctgcagtgccgacgtgtaccctttccgttttactaaattataattagcttcccttcattt

SEQ ID NO: 54861 - DNA, 424 bp, Zea mays
  Clone ID: MRT4577_150031C.1
cgggaacagcccatgacatacagggtatgttaacaggtttggccatacataagcacgggcctcgtggcaacatcatgcttgcaaaggctccgacatgcctattccacatggaggtgtatataaacctaggtgcaggaggttaaacactcccatatgtgaacaaaagtcctaacatggatgcactgttgttgctgcaagctctactccgagaagtgaacgcggctattatttctgacatgcccggattattggaatagtacctatcctgtgtactgtgacagttacccattccagggcgtatccccgataaagcttcagacagtcgtgaccaacaacctgaagtttactggcagcagactgctcttcatgaccaaacagtgccctccaaaagggtgatgggcccatagaatggagagcccttgcc

SEQ ID NO: 54862 - DNA, 523 bp, Zea mays
  Clone ID: MRT4577_150032C.1
ggaaacaaggggtacttacagtgtcattgtcaagaatatatacagcgagaagctgagcgcaggacaatgctaaggcaaagaacatgttcctgtatacacaactacattagcaacacttacacaggtcaatagtatgaatattctaacacacagaaccctgctccacaaaacataaactgtgctatttaccacatcctgggtcccgctcaagcatagcatggtctaaaatatatacggactaaaatgcttgttgcatgattcattggttaatatcaccactcgatccatagattgaattcatagcaaaaactattccagagaaccatgcaacgcgcatcaattgaattccaaggacgagtacccacacacgataccatgccacaaagacttgtgcaccatgcagtcaagcgcactgattatcgtcgctaactggagacccctcatcagctgatagacccgatagccttcataaaccacatgtacctccaaccataccgtgaattcgcactgaacatgtaagcat

SEQ ID NO: 54863 - DNA, 295 bp, Zea mays
  Clone ID: MRT4577_150033C.1
tatgagcaaattaaggatggttgttatacaacagtcattcaataaaaccagttggcggtcaaacttaaacaggtcaggggggcccaaaattgagttttctgttcaagggcgtttgataaaaatgaactatatgattatagaaagagaataattacatttgctacagccatcacataatcttcactgactccttggtctttcaactccaagacccccaaaaaaaagctcgtcctggtgggggaacaaatccattgattgcctcatggcataacgaatccggaatgttttttttgtt

SEQ ID NO: 54864 - DNA, 249 bp, Zea mays
  Clone ID: MRT4577_150034C.1
tacgccggctcttatacgactactatggggaaagctggcgcgctccgcaggctccggatcggaattaagacactgcggtcgacgagctgacgtattcagcagcccgcccaccattcaggaaagcgcaaaccttggcgcgagcattatcttcatgctgcagagccgctcaacgttgatccagcaagctgtgtgcatatctgagataggatggacaccatacatagcagctcattactgtaggaatggtgg

SEQ ID NO: 54865 - DNA, 275 bp, Zea mays
  Clone ID: MRT4577_150035C.1
gggaacttacaacatgttgttcacacatgcccaattacccagaaagggcgcagagacaactctatgtagaaacggttgcatgtgatcgatcatgttgatccacgagatagtacttgcaccccggcagaagagctttaatgactttgaactgtgggtaagcaaacagaatcaatcggattgagaccaacacatggcggtagggttgcgggtgcatacttgaggcttggaatccaaaggaaggcggacatattgagggaactttggacctacacctg

SEQ ID NO: 54866 - DNA, 165 bp, Zea mays
  Clone ID: MRT4577_150036C.1
tggggagttgcccggggagctcgagcccgacgcctgtatccccatttactatgcactccccaataccaacagcctcctattctaacaaactctacctaaacaataatggcaatattcacccatgctttcaccccggtggccgggcggtgctcacctcctacgact

SEQ ID NO: 54867 - DNA, 398 bp, Zea mays
  Clone ID: MRT4577_150037C.1
gccgaagaacacctccgcaggtcagcctgccctgttgcggtatcgccctgtcagtcttcgtcctcccttgactgaccgtcgccgctcaggatgttcaactccatcctaccccgccaagaatgttgatgccgagcgctccgcctgttccgctcccgcgccgccaacgagcaccgccgagctcctccctggcgccacgttccgacagacatcggcgccgagcggctggctccaccgtgccgagttgaccaaataggtctgtcggaaagaggagcatttgctgcttcttggcttgcaaaaggcatcctgacctacattcacccagcataaaaacgtgtattggtcatatcatcgagcaaataggtgatacgatgctttatgtcttattcttacatgcatct

SEQ ID NO: 54868 - DNA, 398 bp, Zea mays
  Clone ID: MRT4577_150038C.1
acggaaaagggtcagacctattgctggcggttcccacatgagtgaggtctgtgggtaggaataactgaataaccgaggcaagccttatccctgcatttttgtagagaggctgtgtagaacccacgacctttggctcagtggaaaggcttttcaccgctgcgttgtgcctgtcctcgcatcttttctgatgcaccaaaatgaaacacggtttacaatatgaaacaaacttttgcaataaggttatacttttgaccccattattacatacgttttttccttctttacaaaagaaaaactagcgttgcacttggatgaaatggcgttaatatttgctgctgaatcatttttctattaaaaagccattttttctcagtttggttaccagtcttgagcatttg

SEQ ID NO: 54869 - DNA, 167 bp, Zea mays
  Clone ID: MRT4577_150039C.1
cagaatttaactcgagtggtgctggtggaggaagaagcatcgcaccatgtggcagggtatgggtcgcggcggcgggatggggaacccagtcaacgtgggcatcgcgcaacaagcggactgtgagaacctcaaattcattctcaacatttcccttaacttccgactcc

SEQ ID NO: 54870 - DNA, 701 bp, Zea mays
  Clone ID: MRT4577_15003C.1
ccggccgggtcaaaccacacctactgttttgttgggacatgtctaaatgcacattcaccggacataaaacactggagaataagcacaagccattagtgctgaaggaattgagaaaactatggaacgtggaagaacaagatcttccatgggaagtgggggactattcaccttcgaatacattactagtggatgattccccttacaaagctctgcgcaatcctccgcatactgccatttttcctcactcctacagttacttaaactggaatgacgattcgctgggtcccaatggagaccttcgtgtgtatctgcagaacctagccgctgcagataatgttcagcattttgttcgtgataatccgtttggtcaacctttcattactgagagcgatccgcattggaacttctatgctcagattgctgatagagggcgtgcacccttgacatgttgcgcttgaactcccaagggtcgtgcttttttctgggagttctgtggttatccatgatcaaaagatcatgatcagtatacagtgatcttctctgagtagtttgcttgtatccctgtactgaagattacagagtttctgctatgggtttaaattgcaggctctacgaaaggtatcagaccaaatgaatgaattgtctgacattatctcagtctcaaactaaatgcagccgaaaaaaaaaaaaaaaaagcggcc

SEQ ID NO: 54871 - DNA, 567 bp, Zea mays
  Clone ID: MRT4577_150040C.1
atggctgagagggagaagctcggcggccaagggagctgggcattggcggccctgctgctgcttctctcccggtcttggctggctacctgctgccaggggaggaggctcggcggtcgtggtagagggccaccggcgcgggcgcctgctccaaggcggtcgcggaccaacggctggcgcggcgctctgaagccaggtggccggctcctagaggccctggcagcgcgcaagcacgaccggcgcacagaggcgacggtcatggtgcggccgcggtcggccaccactgcgcttgaccggcgctcggccccgacggctggggcgagtgctcccctggcggcggcagccggggcacgtgcctggtggtcggaggggcagaggcccggcgcggcgacggagacccgacgcggcggcgggcggatcccgcgcctacgcccgtggcggcggcgcccatgccctgggctgcgaggcggcgccggcgtctgcgcgctcgcgcgctcccttggtggcggcagcgtgcaggtctacgtagcggctgctcgcggcagcggcgggtccgcccttggccggtga

SEQ ID NO: 54872 - DNA, 438 bp, Zea mays
  Clone ID: MRT4577_150041C.1
ctcgactttttttttttttttttttttttttttttttgggtgtgggtagattattattgggttcctttttttgaaatgcattgtatatatgtatccgggccgggaaaaaacaacgaagccccccccatgaaaagggacgtaaaccgaaaaccccaccagggggcaaaccgcccccccgggggcctgaaaaaaaaccaggccccaaagctacaaccggggggacggggacaaaaagggcccgggagaatgaaaagggaccaaaaacaccgacgccgacagggggaacgcccccccccgggggaaaggaaagacccccagccacccggagggtccctgcttgcaagggcctgaaggagtccaaaaggggggaaccaagccctggacccccaaaagggaaccgaaaaggggggggccccaaggttcgggagcccaaccaaa

SEQ ID NO: 54873 - DNA, 216 bp, Zea mays
  Clone ID: MRT4577_150042C.1
cccacgcgtccgcccacgcgtgcgtgttgtgcactattatagtgtagtcacaaacgcactatatatgacatcatcaagagcggtgttcttcttgtgacattcctctttctcgcaaggtcagtctatgttcgtgttcgagcagctggccatggacacgctcgtcgatatcgtgtgcttgtaggatgagtgcctgatttgtcacggtatcatggttac

SEQ ID NO: 54874 - DNA, 283 bp, Zea mays
  Clone ID: MRT4577_150043C.1
ctagcgccggcgcctcctttcggtttcctcactctctcctccagctcagggtgccggcggacgaagggaaggcaacgagtacaccgcgggggaagaagaccaggagggagaaggtgttgagccctcccagttcgaggactccgttgcccaggctttctttggtctggagaacgggaaccaggagctgaagagcgacctcaaggacctggacatcaacaatgctatccacatggatgttaccggaagtaggaaggctggtgtcattcacgggccataccggctg

SEQ ID NO: 54875 - DNA, 176 bp, Zea mays
  unsure (1)..(176): unsure at all n locations
  Clone ID: MRT4577_150044C.1
aaaacaacaacctctgaacaactncnggncagcgtgcttgtgngtgactgttcgggtgcttgtattgcgttgcagtgctgnggncnctgncggtcggcgntgactcgnngatggcggcgtncgctgctggagcacagttcgacagcatgctgttcgacatggacgacactctgtac

SEQ ID NO: 54876 - DNA, 256 bp, Zea mays
  Clone ID: MRT4577_150045C.1
cttttaatttttttttttttttttttttttttggagaaaatactatatggggatttctttatgtaatacataacgccaagataaaaaaaacaatctggccaatgcaaactttgaagcccatttcctttaaattttaaaaggtctaaaccttctggctcattattaacgtctctgtcttgtttatctataatggcttgatataaaacttattgctatcttattctattaactatatcgtgggcgctatgattttaac

SEQ ID NO: 54877 - DNA, 342 bp, Zea mays
  Clone ID: MRT4577_150046C.1
atataaaagcggttatatgataagattctgaacatttcattaaaacatttacattggaacctttaactctacaaataacttattcaagctaaatgcttatatgaaacctctattttagaacagtttcaaatttaccaaccgtttaacaggtttaaacactgatcacaggaaaaacaaactattttgaagcctaccaaaaccgaataaaacgggaccagaatctctgagggcaacatgagcagagggtcacaaatttacaaaaaatccacaaaattcatcatgttgtttattaaatcaaggatctcctgggtgaagggtttaaagcaagaccaaggtataaaa

SEQ ID NO: 54878 - DNA, 303 bp, Zea mays
  Clone ID: MRT4577_150047C.1
tttgctactcaagtctcaattgttttttctttctgcaagggatctcatgacaggaacgcccacagcgtggggaatgttccagtatcatatatacatagacaggtccagagtctaacatccacaaaggtcgtcaagagcaaggccttcaaatgcaaaaataaactacaacattgcaggatcatctgcgtcgacatattgtatcactgcagaatggatccccgcatcactaccaggagtgacggccaacaggattgcacatagtcagtctgtgcctttttcaccaggtaacttgggggaggcaga

SEQ ID NO: 54879 - DNA, 904 bp, Zea mays
  unsure (1)..(904): unsure at all n locations
  Clone ID: MRT4577_150048C.1
ccccgggncgacccagcgtccggaccttgggaaagtgaggagctccatgcactcgctctcaagtgtggtttgttcagttgccccttttttaggaacgcacttgtgaggttgtattccaaatgtggatgcctgaggactgcaaaacgtcttcttctatttgaaatgggatcagagagagatagatacgcctggaactcaatcatctcaggttacgaacgccactccatgagtgaagacgctctgcatgccctacgtgagatgcaatccgaggcaaaacctagccagtcaacgttcagctctgcccttgcagcctgtgcgaacatatttctacttaagcatgggaagcagattcatgcatacatgatcagaaacaggtatgatattgacgatatactgcgaagtgcactggttgatatgtattccaagtgtaggctgtttgattattccacccggatctttgagttaggatcatctgatgatgtcatcctgtggaattctatgatctttgcatgcgcttaccatagtaaaggtgactatgggcttggattgttggatgaaatgcggaagcagggggttagaccagactctgtcacttttcttggtgctctggtttcatgtatctgtgagggccatgtcgggttggaaaggttgtatttcactctggatacatggttgagctagaggatttcgtggaccacatgccctatgagccaacaaccgccatgtggctcaggatctttgactgctgcagggaatatgggagcagaaaattaggggagagggctgcgcagcgcatcaatgatagcaaaccgtcatatttgttcagtccgctcctgtctacgaatgcagtggctgtgacgatgcagagcccatgtcatttcttgctgaggctgacaaaactggt

SEQ ID NO: 54880 - DNA, 187 bp, Zea mays
  Clone ID: MRT4577_150049C.1
ggccgcttttttttttttttttttgggtagaagcctgatccaccagtgacagtgtacctcaaagcgcccatcactggaacaactagcagtgtacttgttttgtcatgtgatattaactaaagttcactatttacaaatcagagtgaagtcgcttgtgaaaaagcaggtctccagttctaccggtgca

SEQ ID NO: 54881 - DNA, 414 bp, Zea mays
  Clone ID: MRT4577_15004C.1
atatcttgatcatttctttatgaggacaagcagcaagcattcacgagaacacccttaataaaggcttgtcccaacacaaacagtgggcttgactggggataccaaacataggaccttatttgcgggcagattggcttgtccccgctacgaagctgctggatatttgtagccacacaccttgcgttcccaggggcctatcacaggttgccaagggcccgcaaggctgggaattggccagggtgacccatacttttggaaaacctgcgggtttggaccgatcatgtgagcaagctgcggggggggcaacttgctacctgggcttgcccgcatgaaacctgtcttaaagttacttcccaactgggtaatgggcaaggccactctgtgggggaccccacgcccttggggtttagggac

SEQ ID NO: 54882 - DNA, 344 bp, Zea mays
  Clone ID: MRT4577_150050C.1
cgggtagcaggtacaacggcgccggctactactgactgctcaatcgaggtgctactagtcatccagttcgctgcggctgggggaggccggggatcccacgaaccggcggcccactccgctcctgagcaaaccggaccggccgtggcggatgctacgtgaacgggacagcgctcaaggtggctcggatctgagcagaagggcccggaggggtcgttcgcgtaagaccccagcaccggatccgtaacggggagcgactccggcacggtgagcacacgaggggaagcgcccgtctacgctgcgctagtcgagtgaggccgcaggcagggatagcagacgagctggga

SEQ ID NO: 54883 - DNA, 2494 bp, Zea mays
  unsure (1)..(2494): unsure at all n locations
  Clone ID: MRT4577_150051C.1
cagttacccttagatctaaatcggatgccccagatcgcttgattgcatgcttgccctaggataagtgattgcataggatattttccccctaaggttgagacatattttttagcgaataccacctgagggatgagattgccgatgcggacgcgtgggtggggagtctggatctcaagcaaccagcccaagaactgttctgctccccagttgtatacgatcgaaggaaaaaaaaaggatcccaaaccctagcatctctcatggacgacggcgacggcggactgagcttcgacttcgagggcggcctcgactctgccccggcggccgggggccccgtgccgtcctccaccgaccctggcgcgggtgtcgggggaggcggcgacgggccgggtatgcacgggcgcggccgaggtcgcgggagctaccgccagacggtgtgccgccactggcttcggggcctatgcatgaagggcgaggcgtgcgggttcctgcaccagttcgacaaggcccgcatgcccgtctgccgtttcttccgcgacttcggcgagtgccgcgagcccgactgcgcgtacaagcactcgtacgacgacgtcaaggagtgcaacatgtacaagatggggttttgtcccaatggtcctaattgccggtacaagcatatcaagctacctgggccaccgccttctgttgaggaagttcttcagaagattttgcagatgcgctcttttaacagatacagtcagaatagaaatagtaattataatcagcaaggggagaggccacaacatccacagggttctgcgttgcctaaccaaaactcagcagaaaatgctactgctgcagctccaccagctggtggacaacaagcacaaacgctgaatcaacagccaccacagcagcagcagaagccaaatacaaatgaccaggcccaaggtgtttcaaatggccatcaggccactagaatcgccacaccccttccacaaggaccatctaggtatttcattgttaaaagttgcaatcgggagaatctggaaatatcagttcaacaaggaatttgggccacacagaggagtaatgaggctaaactcaatgaagcttttgaatccactgagaatgttattttgatattctcaattaatagaactcgcaatttccaggggtgtgcaaagatgacttctaggattggtggctacattggtggtggaaattggaaatctgctcatggaacagctcattttggtcggaacttctctatgcagtggcttaagctttgtgagttgtcatttcagaaaacccatcatctccgaaatccatacaatgataacctccctgttaagatcagcagagattgccaggaactagaacctttcgttggtgagcagttggcttctctgctttatctggagccagacagtgaacttacggctatgctaattgcagcagaggccaagcgagaggaggaaaaagcaaagggagtgagtgctgatgaggcagctgataatcaagatattgtgctgtttgatgacaatgaagaggacgaggaagaggaaagcgaggaggaagaaggcaacgcccaagagtctcagggaaggggaagaggaagggggatgatgtggccgcctcaaatgccgatgatgcgtggggcaatgttggcagggcgtggcttccctcccaacatgatgggtgatggctttggttttggcggcggtttcggcatgcctgatccatttggcatgccacgcggcttcccaccattcgttggcccaaggttccctggtgactttgctagaggcccgatgccagggatgggggttccctggcagacctccgcagcctttccctctgggtcttgacatgatgatgggtcctggccgtggtccgctgatgggaggcatgggaatgggtgggcctggacggcctaatcgtcccatgggtatggcgcccttcatgcccccgccacctccaaataaccgtgctgcgaagcgggagcagagaaggccagggggtgaccgaggggacaggtttgaaacagcatcagcattagaccagggcagcaggggccatgataacactggaaaccctggagcagatggagccagagcccagtctggagacaggtacggtagaagcgcccttcgggacgatgacagcgagagcgaagaggaggccgctcccaggcgatcaaggaaacgatagagcgtctctgacatttcatgctgttacttgaaatgagatgtactgttgaaagatgagtagattgtcttcacccagattagagctaagataatgaaaatgtggattgtgtataactgtatgctgtcaagtgacattggtagttgaatttttcttaggcggaaaaggcagccggctgagattattcttccggaggtgaatcacagtatatgactccagttaggaacgggtagaataacgttggcatgaactatctgtttcggagcttgttcgtttcaaccaaaaaaaaaaaaaaaaannnnncccc

SEQ ID NO: 54884 - DNA, 447 bp, Zea mays
  Clone ID: MRT4577_150052C.1
tttttttttttttttttttttttttttttttttggtgtgttttttttttttttttttgttttttttttttttttttttttttttttttttttttttttggggaaaaaggaagtttttttttttcggtttccccaaatttaaaacgggttttaattttgacaggaataaactggttggttttgggccaaaatttttgtccaattggcgcccattccaacatgggccttgtggccggcccagatttccccttttaaattttggggtttttcccagggggccccacccggaccccccttgttttaggaaaggggccgggggttcatttttttgaattttgcccccccaagaattgtgacccctttgaccctaaactttttcggggggctaaggggacctttggggggtccttaagatggagggcccggggcccccttttttaaggggggg

SEQ ID NO: 54885 - DNA, 2023 bp, Zea mays
  Clone ID: MRT4577_150053C.1
tctgttctctacactgtttatatacatgtgggagaggagattaagtgtggtgaagagagcagcagacacgggcaacggcaatgatgggttggggtagagggagacacggagagggacacactgctccgcccactggccactgccaatcatggatccatccgccgctcccatcactcgctctggcgcgcggttccaatctcgatttcttcttttttttttcgcgcgcgcacggcgatggccccagcaatcccggtgaacaacggcggacacttgtcgccctcgtggagctagcactgtgctgacgcgctgtgcgtgcaggtatcgcgccgcagacgacgagcggcgacgggatggcggcgctgctggccggcggcggcgagggcgagcacaaggaggtgcgcggcaggctgtccgcggcgtacgagcggcacattgcgccggcggtgaagctggacgtctgcgcccgggaggcgacgcccggcgggcagcaggcggcgtcgcggcgcgcgtcgaaggcggcgtcggagtggacgacggggtggtggacgcagttcgcggtgctggtgcagcgcgggctcaaggagcggcgtcacgagtcgttcaacaagctgcgcgtgttccaggtgctgagcgtggcggcgctggcggggctgctgtggtggcgcacgccggcgtcgcacctgcaggaccggacggcgctcgtcttcttcttctccgtcttctggggcttcttcccgctctacaacgccgtgttcacgttcccgctggagcggcccatgctgctcaaggagcgggcctcggggatgtaccgcctgtcctcctacgtggcgtcgcgcgccgccaccgacctgcccatggagctgggcctgcccacggcgttcgtgctcatcctctactggatgggcgggctggacccgcgcccggggcccttcctgctctcgctcgccgtcgtgctctacagcgtgctggtggcgcagagcctcgggctcgccatcggcgccgtgctcatggacgtcaagcagggaaccacgctggcctccgtcatcaccatggtcttcctcatcgccggcgggtactacgtgcagcacatcccgcccttcgtcgcctggctcaggtggctcaactacagcttctactgctaccgcctcctgctcggcatccagttccccgacggcggagggtactacgactgcggccacggcgcgctctgccccgtcgccgagttcccggccatcaaggccgtcgggctcaacaaccactgggtcgacgcctgcgtcatggcgctcatgctcgtcggctaccgcgtcgtcgcgtacattgcgcttgaccgcctcaagcccaggtgaaacaagataagagaagagaagagaagggatcaattagtttagtgctctatgcataatacaaccagaggggatgaaatgaatacgatacaaacctgcagcagctgagctctctgttttactccattcacaagggtttccagaactcgtaagctttccttcggctcctacccagcttcccacagccatcgccgaatctcattctccggaacaaaagctccgcgtcgaatagaaccgaatccggtcgagctccgcgtgaccgagactctagactctggtctctggtgccctacccaccatggccatgccttgcagctctcaaacagtgttacgacagggcacgaagagacaatgtaacagaaatagattttctttccgtacaggagaatgtctatatgctattcttctgtaaccgaaacatatgctgctagctgctctgctcttctcaactcccagtgataccacggcatctccttgacataatatggctatagatcttgggtcgatctgcaggacagaagcttcgatctgtcgttgttccgttcccatttccctcattcctacaaactgcttcaccatcagagcgtacagaggatcgatgggctaggtggtctttaaattttacactataaaatgtaagtatcggatcagatactattttaagacacgaacaatttatg

SEQ ID NO: 54886 - DNA, 379 bp, Zea mays
  Clone ID: MRT4577_150054C.1
tttctcttttttttctttttttggttgggtttgttttactctatttggggccccctcccgtgccacaacgggccgtggcgtacgggatatcgtcggttccccgggaaacacttcggcgggggccgcatccttaactggggcaaaacctttttggtctggcagccacggtttcgcgcgcgggtgggctaccagagaatttgctttacgccggatgtctagtggactgccctctgctcgaccagatgctggctggggggttttggctggacccctttcccctatgggcagaggaaaacccaccttgaacccgcgctcgcttcgcggccttggacgcttttcgcccctctcccgtattatctcctggccggtgtttgccggc

SEQ ID NO: 54887 - DNA, 303 bp, Zea mays
  unsure (1)..(303): unsure at all n locations
  Clone ID: MRT4577_150055C.1
caagaggagaccaacaagcccaccgccggggccggacggaggcagcagcngccgcgcgcggccaagcggccggngccagcgcgcccaagaaanggcgaggccgccgacgggcacgcgcgcgacagaaccgcagcccagcgcgggcagacncaccagagggggacggnacggggagcnangacagaacagggccagcagcagacgncaacaggaagggacacgcaaaggcngagcagagagcaccaggaaggcaacgaaggcaaaaggcccgagccnnnaccgnggcngagccgaacggcaagc

SEQ ID NO: 54888 - DNA, 159 bp, Zea mays
  Clone ID: MRT4577_150056C.1
attcggcacgagctttaggcgacgacacaaactaccgacgacatccaggctgtcaacatagggtacgagattcatatcaggatggttcctgggctcatagttcttcagacctaactccatggtgtgaccgaaagataatatcgagtgggtgaaagggct

SEQ ID NO: 54889 - DNA, 256 bp, Zea mays
  Clone ID: MRT4577_150057C.1
ggaaaacttgccatggggcctgtgcttccctcctgctactatgctacaaaacattttattccgtccaccatcctcatgatgccttctctaccaaataggatgataggaggaacaaagtttccttcactcacccatttttctacacaaacacacccacccttatttttcgggctttctttttttttagattcggtatgttttatcttacagctgttcgccgggtgcctccaacgtggaattttttttttggttcgtc

SEQ ID NO: 54890 - DNA, 289 bp, Zea mays
  unsure (1)..(289): unsure at all n locations
  Clone ID: MRT4577_150058C.1
tnataatttttttttcttttttttttttttttttttgtctttttttttgtcctttgttctgccccgtttctgcccgtcctgacctctccctcggtttccggctagaaaaagatgccncggctgcggacatgcctacgcgggaccaaacactgaaggcgggggcgggggggccccccgcaaaactcggccggaccccggggggacccccaatcgccttaagggccagcccttttcacgccggggccatggcccccaccacaggggccccccccccagaagggatggcgcg

SEQ ID NO: 54891 - DNA, 1406 bp, Zea mays
  Clone ID: MRT4577_150059C.1
atgtgagcaacaagctgcttcgaagacggaagaacgggaaagacagctaggtttgcatggggaaggagtactgaatggttttctagagggtctgactgggctccttcaatcaccgattaggggagctgagaaacatggtcttcccggggtcatctcaggtttagcaatgggaacagctgggcttgtggcacggcctatggctagcattcttgaagccacaggcagaactgcccagagcattagaaaccgaagcaaccctcacgaatccaactacttgcgagtacgtttccccaggcctgttgccagagatcgccctttgtttccctactcctgggaagaagccatcggtgaatcgttgcttgcccaagctgacagtggcagactaaaggaggagacatttgtcatgtgcaagacactcaagggggctgggaagttccttgtgctaactgagaagctgcttctgctagtctcaagcccatacttggtggatctaggatcgcctcggttcatcggtgttcctcctgacccgcagtggtcgatcgacacggagatgcacctcaagagcgttgttcatctggacaggtctcaggaggtagtgaacattgttgggagcaacggacagacctcacctagggacaaaagaggtggcacgagaaacagggtcatgagctcggccttcgtccccctgtttcacctcagcatagagctgccaaatgaggaggatgcagaagggacggtgcaggtcctacaggcactcatcgagaagggcaaggcacggaggtgggacaagaacatcctacaccggagcaacatcagttgaggttttcacaacagtagtagaggttggtgttttgattgaagtggaagataaactaaattcaaccccgatttactctgactcaggtggattaaatatacaaacaaggcctcaaggcagagcagtcaccagcatacataagcttagtgtgaataagaaaacaaagtgttccataggtgatcaccgttggacacgtgcttcggtttttttttgcggtctaggtgtagcttctagaagttttgtcgacggctcttgtaaatgaagtgtgagagggcttatgttatgtgtagcaacaccactgttttatgccacggctatgtttacaaacttcgccgttcatgggccatggatatttctgatttcaccataatgaacttagcggaggtagggggtacgctgacaaacgtattgtcgagtagtcgaactgtcattaaaggttgtggatccaggatttaaatctaggatagtcaagaataaaaaatatgtaataccatgtatatttagtactgaaagggaattaggcttacacctagttcctaaataattttggtggttcaattgcccaacaaaaaaaaaaaaaaaaaaaaaa

SEQ ID NO: 54892 - DNA, 820 bp, Zea mays
  unsure (1)..(820): unsure at all n locations
  Clone ID: MRT4577_15005C.1
cattgggtacctcgaggccggccggggcctttagctagacaccgaacgcgccaagtcccggaggcggaggcggtggtctttgttcgtttcctcgcctctactgtctcctctccttccattccctgtcccgtgggcggcaatggcgggcactgcgcggattcttcctgccgcggcggcggctctgctgctgctgctctgcatcgcgggcggcgcgcgggcggccaacgtgacgtacgaccaccgcgcgctggtcatcgacggcgtgcggcgcgtgctcgtctccggctccatccactatccgcggagcacacccgactacgacttcgagggccgcaaggacctggccgcgttcgtcaagaccgtcgccgacgccggcctctacgtgcacctccgcatcggaccctacgtctgcgccgagtggaactacggaggcttcccgctgtggctgcacttcatccccggcatcaagttccgcaccgacaacgagcctttcaaggcggagatgcagcgcttcacagccaaggtggtggacaccatgaagggggcggggctgtacgcgtcgcagggcgggcccatcatcttgtcccagatcgagaacgaatacggcaacatcgactcggcgtacggggcgcccggaaaggcgtacatgcggtgggcggccgggatggccgtctcgctcgacaccggcgtgccctgggtcatgtgccagcaggccgacgcgccggaccccctcatcaacacctgcaacggcgtctactgcgaccagttcacgcccaactccgccngccagcccaagatgtgggacgagaactggagcggc

SEQ ID NO: 54893 - DNA, 273 bp, Zea mays
  Clone ID: MRT4577_150060C.1
gcaagtgcaccttccaagttagcattgcttaaatttgcctttgtcacatttgccatggaatacatcttttgatggatcaaatattacaggcgctgacttcacggatgtaccactaagagaagatcaacgtgaatacctctgcaaagttgctgatggagtgaacccaacaactggaaatgctacgcgtgatacattgttctgcaattagtattccattgctgaatactcactccaagaccttcaaatgtttgcgtagaatggtttcatagctaa

SEQ ID NO: 54894 - DNA, 292 bp, Zea mays
  unsure (1)..(292): unsure at all n locations
  Clone ID: MRT4577_150061C.1
gggcggacccaggcgaccgaccagcnggaagaaccggcaccacaggacaaccagccagcaggcaaacaaaccgggggggccaggaccaggcaagagacaacgggcccggcccaggcagaaggggcaaccccaacgccaagcccgggggcgcggcccaaacggacggccgcccggggcggaagccggggggaaaccgggggggggagccggacgcagcccgacagaaaaaaagggcccggcgaaggaccaaaacaaagcggccgcccaccaaaaacaaggcaacggggccggc

SEQ ID NO: 54895 - DNA, 478 bp, Zea mays
  Clone ID: MRT4577_150062C.1
atggagcatgagtacggtcacgacagcggagcgcgcgggcaagtgcccggagaggtgccagcgccaccaccagcgccactggtgggagagccagcgctagctgatggactgcatgagccactagcggaaggaggagcgcgacaacgacggccgccgcggcgagcaggacgaggacagcgacgaccgctgcccttaccagaagcattgcgagggccaccacgaccgccaaagcatgcagcaatgcgtgcaggcttgcgagcaccctcgacagcaccgcggacagagccgtgactccaacctcgactaggacgacagcgaccgccactgccagatgaaatgccagctccacagccatcgccacacgaggcagtggtgcatgcagcgctgcgagcgtaagcaacagcaggaggaccccgacgacgactactacaacagcggccgcttccagaagagatgtcagcaccacagccatcggcat

SEQ ID NO: 54896 - DNA, 331 bp, Zea mays
  Clone ID: MRT4577_150063C.1
ctgtcgcgtgggtgctattctgcatgaggagatagactccgaaagttaaccttggccatgaattactgagagcgctaaagactcggtctgaaagatgttgacaccagatccaacgaaaacactgacttcagctcaagtacttcaacattcatgattcacagaaagcgagagtgcatcatattagcctatcgacagacctggtatctctacagtgaggcagttcagagccatgaataagctgaaaaggatggccataagggttattgcctcagaccttttcgagcaagataccaaggggctaaagcaaatgttcatgaacatggacacatac

SEQ ID NO: 54897 - DNA, 679 bp, Zea mays
  Clone ID: MRT4577_150064C.1
ctcgaggccggccgggtataatatcgttgcccacttgcagccatgatttaattagaaactcgatgtcaaatgatgtttgtttttttctagtcatgggcactagttaattcatttcatgtcgttatgtttaacttccctttgctagcagattaataatgcttagtatgtttttgtcatgatatatgtttttacactgttgcccctcggttatgcaatttttcaaaggagatgctgccgaaattttatatttaaaaaaaaaaaaaaaaaaaaaaaaaaaaaaaaaaaaaaaaaaaaaaaaaaaaaaaaaaaaaaaaaaaaaaaaaaaaaaaaaaaaaaaaaaaaaaaaaaaaaaaaaaaaaaaaaaaaaaaaaaaaaaaaaccccttgggcccctttttttttttgcccccccccttttttggcccccccttttaaaaaggggggggggggggggccgggggaaaaaaatccccggggggggggggccccccccccccaaacaccggaaatttggggaaaaaaaagggggcaaaaaaccctttaatttttcccccgagggggttaaggggggggcctaaccccttgggccccccttgggtggggaaaattgctctgccccccccaaaaaaggggaacccccccccccaaaaaaagggttggtcccccttttttccccccca

SEQ ID NO: 54898 - DNA, 356 bp, Zea mays
  Clone ID: MRT4577_150065C.1
caaaaaaaaaataattggcctgggatggaaaaaaaacaagtttcttttcaaatatgtattggcccctaaaaaaactttaagagtcggggcatgagacccccaacaattaaaaagaacccggggaagccaaattgggtccctgggatggaccccggccacccctaacccaaatgagggaaaaaatgttttgggctttgaacaaaaaggaggctatggccggaaaaaacccgtctccccaaagcgggggcttataaaaacgaccccgccctctctgggggccactaaaataaagtttttttaaaaagatgtccctgggggcaaccaccctaagggcaaattttgaaaatttccaaaaa

SEQ ID NO: 54899 - DNA, 607 bp, Zea mays
  unsure (1)..(607): unsure at all n locations
  Clone ID: MRT4577_150066C.1
agatatagatgagctggagtcgtccctgtcttccagtctagttccgcccccaagctccacaccacgacggaggatggagaaggacggcgacggcggcgatggcctccgccaccacgccatccggctcccgctcacagcaatggagggctcggactcggagatcaccagcaacggagactcggagatcaccagcaacggaggaccaagcgtctcgctgcgccagaaagcgtcttcgctcatggcctcctcggcggcggcgtaccgcagcaagcccgcctccttctgggcgctcctcgcgctcagcggcggcgcgatgctcaaggcgttcccggcggccagcctgctctcgcggctctactacaacggcggcggccagagcaagtggatcctctcctggtccgccgtcgccggctggcccatcccggcgctgctcctgctcccctgctacctcttcggcgacgcgtcgccgacgtggccgccgtcgccgtggctctgcttctggtacgccctgctcggcctgctcagcgccgccgacaacctcatgtacgcctgggnctacgagtacctgccggcgtccacggcgtccctcgtcgacgcgtcgtcgatc

SEQ ID NO: 54900 - DNA, 310 bp, Zea mays
  unsure (1)..(310): unsure at all n locations
  Clone ID: MRT4577_150067C.1
cccactcgtccggcggctgcgactaccttttaggccgccatcacctgcggtcagttnatgttcaattttaaacggggcctgtcctacacccgcttcacgttgtccgtccccttctcatcctgctttatctgcttatttaaccttataatctcatttagtatcttacttttacattctatttttttaattattttatatctatattttttattttttttttatttatttcttttatattattttttatttattttatatatttatatattatatatttattttttttttttttatattcttttatttattt

SEQ ID NO: 54901 - DNA, 171 bp, Zea mays
  unsure (1)..(171): unsure at all n locations
  Clone ID: MRT4577_150068C.1
aaacacatacttccaccaaanattttttttccaacncaaacttacctcctaacaatcggcttttctattaaaatcgcgtgtcaactcacaaccacaattacctttatcaaaaacttcttatttctaacattcctttaattttctcatcttcatctatttcaatatattttt

SEQ ID NO: 54902 - DNA, 380 bp, Zea mays
  Clone ID: MRT4577_150069C.1
cggacgcgtgggaaaaaaaaaaaataaaaaataaaaaaaaaaaaaaaaaaaaaaaaaagaaggcgaaaatataaaaaaaaaaaaaaaaaaaaaaaaaaatactaaaaaaaaaaatatactataaaaaaaaataaatataataaaaataaactacaattaaaaaactacttgactattaaaaactttcaatttttgaaatcaatccttttatagaacatattttttaatgcgcatcccaaattaaatgaagatggctcgacttttaaaaccttctgaactttaaaacatcatgaatcactaatttaactcgctttggatcaaatcattttttgcggagttgcagtattttcaacaagaccagaccggttaacttttcaaaa

SEQ ID NO: 54903 - DNA, 813 bp, Zea mays
  Clone ID: MRT4577_15006C.1
aattcggcacgaggctttagctccgaacgcgccaagtcccggaggcggaggcggtggtctttgttcgtttcctcgcctctcctctcctcccctctcctttcattccctgtcccgtgggcggcaatggcgggcaccgcgcggattcttcctgccgcggcggcggcgctgctgctgctgctctgcatcgcgggcggcgcgcgggcggccaacgtgacgtacgaccaccgcgcgctggtcatcgacggcgtgcggcgcgtgctcgtctccggctccatccactatccgcggagcacacccgacatgtggccggggctgatccagaaggccaaggacggcggcctggacgtcatcgagacctacgtcttctgggacatccacgagcccgtgaggggacagtacgacttcgagggccgcaaggacctggccgcgttcgtcaagaccgtcgccgacgccggcctgtacgtgcacctccgcatcggaccctacgtctgcgccgagtggaactacggaggcttcccgctgtggctgcacttcatccccggcatcaagttccgcaccgacaacgagcctttcaaggcggagatgcagcgcttcacagccaaggtggtggacaccatgaagggggcggggctgtacgcgtcgcagggcgggcccatcatcttgtcccagatcgagaacgaatacggcaacatcgactcggcgtacggggcgcccggaaagcgtacatgcggtgggcggccgggatggccgtctcgctcgacacggcgtgccctgggtcatgtgccaagcagccgacgcgccggaccccctcat

SEQ ID NO: 54904 - DNA, 251 bp, Zea mays
  unsure (1)..(251): unsure at all n locations
  Clone ID: MRT4577_150070C.1
ctcacgcgttttctctcgcaaatccatttcatcacacagccactgccatgagggggtgcaaatccaaaagtctcctttaccacaacacctgcaantctgcaaccgaacacagagatctaaacgactgtgaaccatacgttcctcgaccagaaactcttcctcgccaatcgctactccctagaggcaaccctcaccttagccaaagctgcagccataaactactatcgccttctctaaccccaccctagcca

SEQ ID NO: 54905 - DNA, 291 bp, Zea mays
  Clone ID: MRT4577_150071C.1
ctcacatccttcatattgaaggtgactcatttttctgcacacttttttgatgtgatgcttgacgtgaggcccgacactaggattctcaatgcaagaatccagtaccttgcacatagaagtagcaacccatcccttgcctattttcatcttgctgttttcttttttttaaaaaaatggatgtgacttgttttgaatgttttgtattatacttgtttttgtgtgtgcataaatgtcattctgtaggatcctaagaaaaagagtcccagaatgttgcttctattattgtgcaca

SEQ ID NO: 54906 - DNA, 459 bp, Zea mays
  unsure (1)..(459): unsure at all n locations
  Clone ID: MRT4577_150072C.1
cggacgcgagggacaatatgaagttgaacattgccaacccagccactggctgccagaagaccatcgacttcgatgatgagcgcaagacccgcatcttttacgacaagcgtatctccgctgaggttgccgtcgactctctcggtgacgagttcaagggctacgtcttccgcatcaccggaggtaacgacaagcagggtttccccatgaagcagggtgtcctcctcccttcccgtgtccgcctcttgttgtccaagggtcactcttgctaccgcccccgccgcaccggtgagcgcaagcgcaagtcggtccgcggatgcattgtcggttccgacatgtcggtcctctctgtcaccattgtcaagcagggtgagcaagacctcnccggtcttactgacaccactgtccccaagcgtctcggacccaagcgtgccaaccacatccgcaagttcttcaacttga

SEQ ID NO: 54907 - DNA, 207 bp, Zea mays
  Clone ID: MRT4577_150073C.1
ccggccgggaactatacgctgttaatagctgcagctgaacgagcggaagcgagagacttcattatattatattgctcgatctctctatcggaacgtacacacagcgcaacacagatgacgcgacgtcaccggcctgctgagcatgtagcagcctccgggccccgtgcgactcttctcatgtccagaccgggtggactcccggccgac

SEQ ID NO: 54908 - DNA, 415 bp, Zea mays
  unsure (1)..(415): unsure at all n locations
  Clone ID: MRT4577_150074C.1
tttttttttttttttttttgaggaataactttgntatatatatatatatatattatccggcaatgcaatgtgaaccaaacaacaggagtacattactataatgtagcagggagaaaaaaaagacataattatcagtactactcactgtcaacggttaaccaaccaatgtcaaaaaaaaaagaaagaattaaatccatttcctgctagctcaagttcaccagcatcatctatgaatatgatgactaggaggaggaggaggaggagatgatcaggcatgccatcatgcacacctaccgtaccaaatggcgccatggtatggtgagagagggatggggacagacaagttgcttactgcagtccagcgagcgcgcggtcccgggccggctccctctcttcctccctccggtggttgagg

SEQ ID NO: 54909 - DNA, 379 bp, Zea mays
  Clone ID: MRT4577_150075C.1
gctcggaattcggctcgagaataaatataaccggctctttatttgatcacctcaatactcagcacgggggggggctgttgggacatcaagagttctatatgccatgggattcgccacctactcattcatatgctgttgcagataactgtgaacaaaacactggagatgttcttgttcacatgtcacacatgctcacaacaatatgcccgcacccctatcagtatctggggccaagatgtgcacttggggactgcggtcggccagctggagggacagatgactgtggagattactgcaacgcttaccatgctgggttggctctgaatgatgacggcatttcaagggatcagaccgtgtgacgcgtccaacaggtattgat

SEQ ID NO: 54910 - DNA, 465 bp, Zea mays
  Clone ID: MRT4577_150076C.1
aaccatgaggaaacaaaaaccaccactattgcacaaacatggttcaatattagtggacaacgcccactcattatctgaactggcctatgcggtgcacgcgaaacaaaagacacacatgcatgctcgcagcatcaatcaatgcacgtggcgtacaccctctccgatccgaaagacagtgaacttgcatatcatagccgttgagcttagttgccagagaccaagttggtggcgtaggcccatgcgctgttgttgactggatcaacgatgtgggcagcgagggtctcgagcggtcccttgcctgtgacaatggcctggacgaagaagcctaacatggaaaacatggagaggcggacgatcttgagctccttcactattgagctcggtcaacgccatggggtcttcgcccataccaaggaggtcctagctggcgccatggtacagcggatgcacgacctcacatagcgg

SEQ ID NO: 54911 - DNA, 359 bp, Zea mays
  Clone ID: MRT4577_150077C.1
gccgccaaaacataagaggttttggggacaagattatttttttcataaaaaaaacaaccaccaccatccggcgtttttttcccccaaaaatgccaaaaaaaaggacttctttgaaaaaacaccaaaacaacaaaaaaatgcagcacccctaaaaaaaaatcctgcccgccttattatggccaccatataagagggggggcaacaagctccgttgatacaacaaacaacaagctgcttaaaaagaaggaggcatcaaaaaagctcctactaagccttattagggccaccaatgggggggggatatgtcccaccatttttttttatttctccggggggaaaaccccccccgccgccccagg

SEQ ID NO: 54912 - DNA, 307 bp, Zea mays
  Clone ID: MRT4577_150078C.1
aacaaagctttccttcctcagggtgactggttctgtccagaatgtatggttaacaagcttggcccaacttcctcaagaattgagcgtggtgcaagaggagctcaaatgtttggcattgatatgtgtgggagactattcttaggaacttgcaactatttgctggtgatcgaaacagcttcagatgcagagtcttatgcaagatattacaatcagtatgatgttgccaaggccctcaaagcctgctgtctcagatgcatatgtggacatatgcaagcaaatataggactactggaaacatttacttggt

SEQ ID NO: 54913 - DNA, 357 bp, Zea mays
  Clone ID: MRT4577_150079C.1
cccacgcgtccgggttaattctccccattaaccacttgaatgtgtgtttctttgtgttttgtgctcatattgctaggttacctaatagttaacatcaacatttgtttgaaatcaagtagcaaatgctgctgtatcaagcccctgaaagtttctacatcttctgtatttgtcagtgagttagcttgcttgtatttgtcagtgagttagcttgctcatctgcatgaactagcactatattattcgtaaaaagcatacatcaagagatatctctttgtatgttctttgtaaccttatccatcaccatgggaaaaagataagggattgaagctaatctttgattagtcctattctaattgg

SEQ ID NO: 54914 - DNA, 619 bp, Zea mays
  unsure (1)..(619): unsure at all n locations
  Clone ID: MRT4577_15007C.1
gctaacaaatactgtgtatgaagtgccatatccttattcatgagagggctcagggatatgacaacaggctttggtcttattgtgagatgcttgcgagcctatgctgtactggtatatgcagcaagcaatagccaggcatgttagcgcagacacgatgtaggacctaccatacacatatcttttcagacgcaccagcatgcgcatccatgcactaccggagtaattaggctgctaatgcaacatagatcatacctttattacccagggattgaactgatttggatataccaccatccttatacctggctatgtgataaaggacaaaaaaactggtcataataactcttttccactaaggatgatgcagaaacaatcaggaatgcctgtcanaagctggagaggttagaggaggaaaacgaatccatcctggcccacatggccgagctgaagaagatactgtacgggaagttcaaggatgccatcaacctgaaggaggattcgggttctggagtccaggctatttgaccctctttctagataagtgctgtttttttccttgctctacggctattccaaacatcagttttttaaaactggcctggttggaaaaaccagttct

SEQ ID NO: 54915 - DNA, 606 bp, Zea mays
  Clone ID: MRT4577_150080C.1
cattgggtacctcgaggccggccgggagagcatccgacgacgctggccggcgttcgcctcgtcgctcgtgctctctacgaggcaatacaaaaagtgatctcatgaattcaatgaagaacagtgggagccagcgttacctgtacagggaaaaagcaggggcagcttccctccctgcctccttccatgatgtcttgggatgccagtcgtccatcgcaaattacacacttgctcaaggccattgttcatacccctgaatcttccaatatcatgcaatctgtgagagtcagccttccttagaccgctggcctataaggaataattactgtgctgagaataggacattgcaagatgcatacataaattgcgccccaagacttcctagtcatcttgcgaaatcttatatgttctcaaagacggatgcctctgagataacctctgtgacagcacaacgagcacagggccccaagcttactacagggaagatactgctgtcaagaggtccaccacatgctgaggcttctgaaaatgtagagatcgactcatctgaagtttgtgaggctagagcagtccagagtcacacagaagtgagtattctcactcctgaca

SEQ ID NO: 54916 - DNA, 228 bp, Zea mays
  Clone ID: MRT4577_150081C.1
cctccccctccatggatccccgctttttccttcccaccaacgccacactatttctattctgatgtcgaactcatctttacgaatgtggcctacattaaacacaaccgctttctttatttatgaatagaaaagctacctagggcaccgctgacaacataccaccgataaatacccagaaccccgccacgcaaatctcctgtccccttccggacttttccccccttctgg

SEQ ID NO: 54917 - DNA, 1750 bp, Zea mays
  Clone ID: MRT4577_150082C.1
ctccacgtcgcctcgcctcgcctcgccggtaatcgacttccttctcttggcccttatgcaatcggttgggttgtggctgagccgatctgacccgatcgggtgggtccttgcgccgccgctgcgtgggctcatctcggtcgcccgcctgctcggctcgatcggccggggacggcggcggctagatctgcgatggagggcaacaaggacgacgcggccaagtgcctgcgcatcggcaagggcgcgctcgaagccggggaccgcgcgcgcgccatcaaatttatgtccaaggcaaagcgcctcgacccctcgctacccatcgatgacctgctcacctcccttctcaacgcgcaagacgactccccggcttcctcatcatcatcgccgcctccaccaccgcaaactgccgcagcaggggcatcggaggcagctgaggctgatgggctgagagagaggaagcacaagggcaagaagagggaggaggaggaggaggcgactcctgctgccagggagtacaccgcggagcagctcgaggttgtgcgccaggtcaagaagcacaccagggactactaccagatcctcggcctggaaaaggactgcagtgtcgaggacgtgcgcaaggcctaccggaagctctcgctcaaggtgcaccccgacaagaacaaggcccctggcgcagaggacgccttcaaggccgtctccaaggccttccagtgcctgagtgatgcggagagccgcaagcgctacgaccttgttggctcggatgagccagtagcacaccacaggagggcctccactgcccgcgcatacaatgggttctatgaggatgactttgacccagatgagatattcagaaacttcttctttggcggtatggcgcctgcaaccaccaggcagtttggacagtttggaactttccattttaggactggtgggatgcatgcccatgcccatgcccaacaaaactctggtggctcaactgtcaggatgcttattcagctgttgcctgtcctactgctgctgttgctcaacttcctgccatcctctgagcctgtctactcgctgtcccgttcatacccttatgagcataagttccaaaccccacgtggagttgcatactatgtcaagatgtctaatttcgaggagcagtatccacaccaaagcactgagcgagcgacgctggagcggcatgttgagagggattattactccataatcacacagaattgcagggctgagctgcagcgtcgccaatgggggctgtcataccagacaccacattgtgatatgcttaaaaattttgaggctgcagcaaagtaataactcatccaattctgtaaggttgacatggggagagagactgctggccactcatgtaaaggcgctgccttagccgccagcttgaagtttgaggggacattttagtttggcttagtagtaaattttgtggaataagtgcctttgataactatacaccgctgtccagatgctccctcttagtattggcaaggagtgcgttaattagttacttcaaaaagatatgcaagcttcataggggctgatcacatgcaaaccagtgtatgtatatgaagtatatctatctcattcttttaacttttttgaagtgaagactgtagttaaaacagaaatgcaactataacacaaatgtgatattcattttatattagcttgtgtgttgagatgtccaaagatgctaaaatacgatcatcggacatcattccgttggtattgg

SEQ ID NO: 54918 - DNA, 140 bp, Zea mays
  Clone ID: MRT4577_150083C.1
gcggccaatcacacacgcatttatattagcttgtttcgcagcaggacgctgtggatgggatcagggctgacgtgagagcgggcgagagagagcgagggagaggcctggctagatgcaaggttgcgacgatggtggtggcc

SEQ ID NO: 54919 - DNA, 784 bp, Zea mays
  unsure (1)..(784): unsure at all n locations
  Clone ID: MRT4577_150084C.1
ggggtcgctcgccatatccccttttcccccctccctgcgtcccccgactccggcgatccgccccacctgaaccctactccacgtcgcctcgcctcgcctcgccggtaatcgacttccttctcttggcccttatgcaatcggttcgtactccatgctcggattctccttctgatccctatataccaaccgcgccgattgtattgtcttaggttgggttgtggctgagccgatctgacccgatcgggtgcggtccttgcgccgccgctgcgtgggctcatctcggtcgcccgcctgctcggctcgatcggccggggacggcggcggctagatctgcgatggagggcaacaaggacgacgcggccaagtgcctgcgcatcggcaagggcgcgctcgaagccggggaccgcgcgcgcgccatcaaatttctgtccaaggcaaagcgcctcgacccctcgctgcccatcgacgacctgctcacctcccttctcaacgcgcaagacgactccccggcttcctcatcatcatcgccgcctccaccaccgcaaactgccgcagcaggggcatcggaggcagctgaggctgatgggctgagagagaggaagcacaagggcaagaagagggaggaggaggaaggcgactcctgctgccagggagtacaccgcggagcagctcgaggttgtgcgccaggtcaagaagcacaccagggactactaccagatcctcggnctgggaaaagactgcagtgtcgaggacgtgcgcaaggcctaccggaagctctcgctca

SEQ ID NO: 54920 - DNA, 296 bp, Zea mays
  unsure (1)..(296): unsure at all n locations
  Clone ID: MRT4577_150085C.1
gcttgacttctcttccatctccagcgagaagaggttctgtagcttccgttccatcccaagcattatggcctgccacctgagatccgcaagtgtgccctcaagcccttgctccaacaaaaccagcgtcgaggagcagctccagagcctgaaggcgaccatctcttcaccctctgcgacagtccaaccgatcaccaatggcctgtccaggctcgggagcatctacagctgcatcgatgagctcgcgtgcctgcccagcaccagcagccagcgtcacagaggnnaaacagtggaggagg

SEQ ID NO: 54921 - DNA, 780 bp, Zea mays
  Clone ID: MRT4577_150086C.1
gtaccaacccagccagcgaaaagaatcggctctcgagtcgtcgccgtgtcggtgtcgctcgccatatccccttttccccctcccttcgtctcccgagtcctgcgatccgcatccgccccacctgaaccctactccacgtcgcctcgcctcgcctcgcctcgcctcgccggttgggttgtggctgagccgatctgacccgatcgggtcggtccttgcgccgccgctgcgtgggttcatctcggtcgtttctgtccaaggcaaagcgcctccccgcctgctcggctcgatcggccggggacggcggcggctagatctgcgatggagggcaacaaggacgacgcggccaagtgcctgcgcatcggcaagggcgcgctcgaagccggggaccgcgcgcgcgccatcaaatttctgtccaaggcaaagcgcctcgacccctcgctgcccatcgacgacctgctcacctcccttctcaacgcgcaagacgactccccggcttcctcatcatcatcgccgcctccaccaccgcaaactgccgcagcaggggcatcggaggcagctgaggctgatgggctgagagagaggaagcacaagggcaagaagagggaggaggaggaggcgactcctgctgccagggagtacaccgcggagcagctcgaggttgtgcgccaggtcaagaagcacaccagggactactaccagatcctcggcctggaaaaggactgcagtgtcgaggacgtgcgcaaggcctaccggaagctctcgctcagggtgcaccccgac

SEQ ID NO: 54922 - DNA, 1857 bp, Zea mays
  unsure (1)..(1857): unsure at all n locations
  Clone ID: MRT4577_150087C.1
ggggatgtacggggtaacaatatggaagacaattcggcacgaagagaaaacccaaccaggccgaaaagaaatcggctgtcgagtcgtcgcaaggtgttgctcgccatatcccctttccccctcctccctgcgtcccccggctccggcgatccgccgcacctgaacccttctccacgtcgcctcgccggttgggttgaggtgagccgatcagatccgatcggggccggtccttgcgccactgctgcgtgagctcatctcggtcgcccgcctgctcggctcgatcggccggggacggcggcggccagatctgcaatggagggcaacaaggacgacgcggccaagtgcctgcgcatcggcaagggcgcgctcgacgccggcgaccgcgcgcgcgccatcaagttcctgtccaaggcaaagcgcctggacccctcgctgcccatcgacgacctcctcacctcccttctcaaccccgaaggcgactcccaggcttcttcgcccccgccgtcttcaccaccgcaaactgccgcagcaggggcatcggaggcagttgaggctgatgggctgagagagaggaagcacaagggcaagaatagggaggaggaggaggcgactcctgctgccagggagtacaccgcagagcaactcgaggtcgtgcgccaggtcaaaaagcacaccagggactactaccagatcctcggcctggaaaaggactgcagtgtcgaggacgtgcgcaaggcctaccggaagctctcgctcaaggtgcaccccgataagaacaaggcccctggcgcagaggacgccttcaaggccgtctccaaggccttccagtgcctgacagatgctgagagccgcaagcgctacgaccttgttggctcggatgagccagtagcacaccacaggagggcctccactgcccgcgcatacaatgggtttctatgaggatgactttgacccagatgagatattcagaaacttcttctttggcggtatggcgcctgcaaccaccaggcagtttggacagtttggaactttccattttaggactggtgggatgcatgcccatgcccatgcccacaacaaaactctggtggctcaactgtcaggatgcttattcagctgttgcctgtcctactgctgctgttgctcaacttcctgccatcctctgagcctgtctactcgctgtcccgttcatacccttatgagcataagttccaaaccccacgtggagttgcatactatgtcaagatgtctaatttcgaggagcagtatccacaccaaagcactgagcgagcgacgctggagcggcatgttgagagggattattactccataatcacacagaattgcagggctgagctgcagcgtcgccaatgggggctgtcataccagacaccacattgtgatatgcttaaaaattttgaggctgcagcaaagtaataactcatccaattctgtaaggttgacatggggagagagactgctggccactcatgtaaaggtgctgccttagccgccagcttgaagtttgaggggacattttagtttggcttagtagtaaattttgtggaataagtgcctttgataactatacaccactgtccagatgctccctcttagtattggcaaggagtgcgttaattagttacttcaaaaagatatgcaagcttcataggggttgatcacatgcaaaccagtgtatgtatatgaagtatatctatctcattcttttaacttttttgaagtgaagactgtagttaaaacagaaatgcaactataacacaaatgtgatattcattttatattaggacatcatccggtaaaaaaaaaaaaaaaagcggccnnaaagaaataannact

SEQ ID NO: 54923 - DNA, 278 bp, Zea mays
  unsure (1)..(278): unsure at all n locations
  Clone ID: MRT4577_150088C.1
gnaccaatcacctcgtgggggtttttttaatttttttgggggacaccactcaaatcattgaattgccatggcagctttgatttgtttccaggcttttcgaaaataaggcccctttttatgagggggctaatttttttaatcgcccaaaaaagtaagggggggccagcacggatctaaaaccttcatagaaaattttaaccaatttaaaccaaaaggttccgtctttaaagggcccttaaagggcccatcgttgttgttaccgtaaccccttcggggcc

SEQ ID NO: 54924 - DNA, 242 bp, Zea mays
  unsure (1)..(242): unsure at all n locations
  Clone ID: MRT4577_150089C.1
atttatttccaattntatataacttttaaatattcaggcctactgcctgnattttgcctgtttgcaaaatatattgggacacactaatatataagcaaccttatttacactttattaattatgtatacaatatatataacttttacatatttcattgattaattatgtatacaatatatataaccttgtgttattttatcaagctacttcatacgattaaccttcccaaagctttaacttta

SEQ ID NO: 54925 - DNA, 158 bp, Zea mays
  Clone ID: MRT4577_15008C.1
cagatgatctcaaaaaagacccttgatttccagaaagaaaataatgaggaacggaaccaaaaaagggttcaccaatcgatcgtcaacaaggagggaccacgcatttttcaaaaaagaagtccagaagttcttgattcgcacgaagcaggtggtctgtg

SEQ ID NO: 54926 - DNA, 541 bp, Zea mays
  Clone ID: MRT4577_150090C.1
ggcgatagaggttgccgaggctattgcgaggaacaaccgcaacttagttgtattatacaaatcggttataaatgatgggtttaagctggatttggaacatgctcaggcacttgagaaggaaagaggtcacaactattacaatggaatgacaaaggagcaattcacgaatatgcagaaattcatccagggccggagttctaaaacaccatcaaagctgtaacttgttgatgacattttccgtggtccgtgtacgatgtacaactactgaaagcgtgtgcagtagtctgaaaaataaagatgccggtgtggcaatatacagatactgtcttctcatattatggaaagagacatacttctacctaagtttactaatcagtgctcacgagtcaggaccttgcaaacacgtgttgtagttagttgccaaaccgtgttgctttctcttttctgatgctaaaaccgatcaggtgctgggaatatattgtatcttccctgtctcccatcttccgcaagtggtttaatggaaaatggtgtgttgaggtgt

SEQ ID NO: 54927 - DNA, 876 bp, Zea mays
  Clone ID: MRT4577_150091C.1
cgcggacgcccaccagcattctccccccttgctgtcgccgcctctctccgcgcgaccgatctaccgccgccgccaccatgtcgctgatcgccggcgaggacttccaacatattctgcgtctgctgaagcaccaacgtggatgggaagcagaagatcatgttcgccatgacctccataaagggtgttggacgccgcttctccaacatcgtctgcaagaaggtcgacatcgacatgaacaataggaccaggagagctgacgtttgaacatctcccacgcctgatgacggccccccgcactcctactttattatggctttctcatttgctgttccccccccggggagagggggcgttatggtttaatactaacagaacgaaaacaacacatcactctctttcttacgatctcccaattattcccctttccactcttaattccacccaccctcccctactctcccccccccaccaccccctctattccctcctatccttactactctcctccctcttcactttacaatcccccccccccccccccccatcactccccctccccactcctattctcccttctatccacactctcccccccccctccccccccacccccccccccctcctccccccctctctccactttcctccccctctccttcctcccccccccccccccccccccccccctcttcacctttcctctcccacctccccccctctttttacctcccccttcctctcccccccccgcctcacccttcttctcctcacctccctctcccccattttcctccccccccccttctcaccctgcgtcctctcccccccccccccccccctcccttatcccccccccccgcccccccccccccaccc

SEQ ID NO: 54928 - DNA, 1236 bp, Zea mays
  Clone ID: MRT4577_150092C.1
actcctatgggcgattgggtccctcgaggccggcctcgaatgcggccgggacacgctcagatccacaagatactaccccagaaccgctacaccaaaccgagacgctaacccaaacggacaaacccaatcagaccgaatgggcaccgcatcaccggactccggcgaccttatcgaggtggggccggcgaggccgggatctccggtagccgtggtgaccatcaaccggccttcggcgctcaacgcgctgacgaagcccatgatgatctccatggcggctgcgttccggcggctgggtgccgacgacgccgtggcagcggtggtgctcgcgggccgcggtcgcgcgttctgctccggggtggacctgacggcggcggcggaggtgttcaagggcgatgtgaaggacgtcgccacggaccccgtcgtgcagatggagctctgccggaagcccatcgtcggcgccatcgccgggttcgccgtcactgccgggttcgagatcgccctcgcctgcgacatcctcgtcgctggacgctccaccaagttcttggacacccacgccaagtttgggatatttccttcctggggtctttcacagaagctttctcgcatcattgggccgaatagagcaagggaagtgtcactaacttgcatgcctgttactgctgaaatggcagagaggtgggggcttgttaaccacgtcgtggatgataatgaggtgctgagtaaggcgatagaggttgctgaggctattgtgaggaacaaccgcaacttagttgtattgtacaaatcggttataaatgatggatttaagctggatttggagcatgctcaagcacttgagaaggaaagaggtcacaactattacaatggaatgacaaaggaacagttcacgaatatgcagaaattcatccagggccggagttctaagaaaacaccatcaaagctgtaggttgctggtgacattttctgtggtccgtgtacgatgtacagctactgaaagcgtgttcagtagtctgaaaaataaagatgtcggtgtggcaatatatacagttaccgtcttctcatacttttacgtaagtttatgtttatttaccgtctgattggttggttgcatcgtctcgtcctagatcactgtgtgcattgactttatttgaatatttgtttggttgcctgtatatctggagcatgagttccacgagtggatacaaaataaatcattttgagaccctttgattgcaa

SEQ ID NO: 54929 - DNA, 415 bp, Zea mays
  Clone ID: MRT4577_150093C.1
attcggctcgagggaaacgtaacttgaccgttctatgccagtgcctgtcgctagaaaccgagagggggacacccaaacagtatcctgggcctcctgctgatacatactatatccattctgcgcgggaccgcaccacccccctaactgaaagtgctgacctcacacagagagggtcctgtcaacccctgcctcacgacagagccctacatgggctgagcgaaccagacatcgctcggcccattcatgctacagtcctggccgccatgcttaaatcaccaggaaaaacccctcaagagcgaacggagataatgcaccaaaccacgcacacttctaagttcatgagaaccatgcccctagctggacacacgcccatagcttataaaaccggagaccaaaacacactgcatcataggca

SEQ ID NO: 54930 - DNA, 153 bp, Zea mays
  unsure (1)..(153): unsure at all n locations
  Clone ID: MRT4577_150094C.1
ggaggtagcgaggcggaggaggtagccggcgcaagaaggggaaccgaatcttggtacggnacacatagatttctttggtggaggcatgaggagggcaacatgaggaggctgcgtgtagcccaatagatctacatgctgttgagggagttgatg

SEQ ID NO: 54931 - DNA, 317 bp, Zea mays
  Clone ID: MRT4577_150095C.1
ctccgctcccgcgagtaacttggctccgggggctccgctcgcctgcccgtacgccgcccgccactcaggaccgcgccgtcggcctctgcctcgagcagaccccttccgacggccctcgctgcgcaggctgggacgcctctcccccctccgcccccgccgcggaaagttaagtttgaagaggggggaagagagagaaacatggacatgaagaggaggatccacctggagctgaggaaccggaccccggcagctgttcgagaacttgttctggacaactgcaaatcaaatgatgggaaaattgagggcttaacagctga

SEQ ID NO: 54932 - DNA, 616 bp, Zea mays
  Clone ID: MRT4577_150096C.1
gattgtattcacttctgacaattaaagaatctgctgcaactgtccctaaaaatttagaagccaggcgaagacttcagttctttacgaactcactgttcatggaaatgcctgttgcacggcctgtttcggaaatggtctcctttagtgtgtttactccatattactctgagattgttctctacagcatggctgaacttcagaagaaaaacgaagacggtataactacactgttttatctccagaagatttacccagatgaatggaagaacttccttactcgtatcaacagggatgaaaatgcagcagactctgagctttttggcaacccaaatgacatacttgaactacgtctatgggcttcttatcgtgggcagaccttagctcgaactgtccgtggcatgatgtactataggaaagcccttatgctgcagagttatttggagaggatacaatctgaagatttggaatctacattagggttggctggttcagctgataggcattttgagttgtcacctgaggcgcgtgctcaggctgatttgaagtttacatatgtggttacctgccaaatttatggaaaacagaaggtggaagggaaggctgaagctgcagacat

SEQ ID NO: 54933 - DNA, 206 bp, Zea mays
  Clone ID: MRT4577_150097C.1
tctacaagggacaatgcttgtcctagtgaagggacacaacttatctcggggtgacacacacactaagagcgaggcttgattaaccatgagcggcctcattattgaccaggccttcacacaagccccctagcacctgccctagcccatcttcacccaggacaccgtcattcttgttatagacctgtctcctatgttcggcagttgcg

SEQ ID NO: 54934 - DNA, 204 bp, Zea mays
  Clone ID: MRT4577_150098C.1
acgcccacgcgtccgggatactcatctgcagcatgaagggcgaatatactccgagcgtgcgacacccagagtgtcagtattatctgaagaccggaccatgccagtttggtcctacatgcaaatttaaccatcccagcgaaaacgacggacttgaagggaccgtgaacctaaccacattaggatatacaattctccaggtttgat

SEQ ID NO: 54935 - DNA, 307 bp, Zea mays
  Clone ID: MRT4577_150099C.1
ttttgtggtttttttttattatttttttatttattaaaacttatgctcatattaggaaggaaaacccccccggatgaaattttaccacagatacaagacagaaaaaggggagggcaccgcaggaaaacaaccggcgggggaagaatccccgaaaaaaaaaggcacccgttttgaatgggccggaaacataaaagggcacaaatgctaaggggggggcccaccactttaaaaaaaaggaaaaggatggggccctcaaccagacacagggggacccggaaagaaaccaaagaggaaaggtcaggggggc

SEQ ID NO: 54936 - DNA, 198 bp, Zea mays
  unsure (1)..(198): unsure at all n locations
  Clone ID: MRT4577_15009C.1
gcgggggactgaacccttaagaactnagggttgtttgacgtctccgagacatagtggtaggataagcttttgccgtgttatgctagagagatctgagtgtgatggtttggttggttgggtttgtgcatttgtgggggntggggatcctttgttgggtgggggggggctatttttttttttttggttgttgtttgttgt

SEQ ID NO: 54937 - DNA, 445 bp, Zea mays
  Clone ID: MRT4577_1500C.1
aagcgaaaaaaaccccaaccaaaaaatggattattttaagaaaacccccccccctaggagggccccctggggggggcccccccaaatgttttttaaaagagggcccccccaacgagggggggccgcccccacaggggggggtcccccccccccaacgggggggagggcaaaaattggtgccgcgggaggaaggccccccccaaaggaaaaaccccccctgggggaaaaaaaaacggggggcggggggggagggcccccggccgccccccccctaggggcgaatcccaacacacgggcggccgtgcctaggggacccgagcccggacccaagctgggcgaaaccagggccaaagggggtcccggggggaaatgggtatccccccacaatcccccccaaaaaacgacccggaagcaaaaagggaaaacccgggggcccccaaggggg

SEQ ID NO: 54938 - DNA, 324 bp, Zea mays
  Clone ID: MRT4577_150100C.1
gtgaccaaaccgaaggggcacttttaaccattttatttaacctcctctttcacaaaccccacttgcacacaaatttatatcatgttcacgacggggcccacgccgaacaccgcggcatctgggcctgccggccactaaaaaacacacaccaaactgacacacacccatttatccaccttctttatcttggggccagggccaccgattacaaccacagcgttcttctgcattccccccgaacaacatatgttggcacccccgccctggtacacattgtttattataggattgaaaaagcttttcacctacttcatcttgtcatac

SEQ ID NO: 54939 - DNA, 462 bp, Zea mays
  Clone ID: MRT4577_150101C.1
gcggcgatgtaactatacttcatacccttatcgtcaataacagacaatacaagggtatgccatcaatacagagggcgcacaaataatgatgccactcatgtctcgacgtcattgttttacgaggcaattggtaaccattaaccaatgtgcaaagtaaattacaatttttctattgaccagagtcaaatgagcacatctagaaaaggaacaattctgcagaaacaccagtaaataataaagccaaaattgcaaaactatcaacaaagacgtttaacattattccatcacaataactcaagacgatgatgagggacctttttctatgtctagatcgtcaaccatcttctatatagattcatccatcacgggttcaacttgtatgttgtgagctgtttccaccagaggatttatccacccacatcgagcatcaaaatgaggaccatttctcacttagagctagac

SEQ ID NO: 54940 - DNA, 254 bp, Zea mays
  Clone ID: MRT4577_150102C.1
cgcctccgcccatacgtctggtggattttggatcgatatggcttggctatagttttgtcctgctgttgacggcgttcagtgccggtgggatcggccttcctacatgtctaagtaacttttcgaaagcattctagtcaccatggtcagtctgagctatcagatacttgacactcaactataccttcccaaatgtcagcgttgacctccctgaatcactattgccgtctctcgcatctacaacgagttgatgcgat

SEQ ID NO: 54941 - DNA, 375 bp, Zea mays
  Clone ID: MRT4577_150103C.1
tccctcgcgtccgggtggctgatgatctcatgctgctgatgccttccgggccgtgagtctcggctatgctgtgcctgctgggcgcctgcaggatcctcggcaacacggacgtcggcgtgtgggtcgccggcgtcctgtaggagtctgtgcccacggtatccggcgcgtacgtgctgctgtcctacttctacgccgatatgggagtctggggcgcggaggcgtgggagcggcggtagttgcgggggatgggcgtctagtaagaagtcgggttctgctgggaggacgcgggcggagccaacgattccctgcacctgcacaagttctcgtcggacgtcacgtcgctcccgcagtgggttgtgatattccgtgtggccg

SEQ ID NO: 54942 - DNA, 156 bp, Zea mays
  Clone ID: MRT4577_150104C.1
tcctcaggggacattcatctctttaaacttctgtgagtctgctgtcaccaagtttctatacgagtgtctctcctgcgagtggggtacggtctaggtctagtctgtaggactggcacgcagctcagtttatcgtccattcgttgtttcccttccctt

SEQ ID NO: 54943 - DNA, 624 bp, Zea mays
  Clone ID: MRT4577_150105C.1
ccggccggtttgattttatgcaaaatatatttgtataaaaaaaaaaaaaaaaaaaaaaaaaaaaaaaaaaaaaaaaaaaaaaaaaaaaaaaaaaaaaaaaaaaaaaaaccccttttcattttccgttggggttttggggggtacgcggacacagccccgatccgaatggtggtctttgggagcctggccgatcccccattcccttcccttggtttaaagaggcaaatttttgggaaaaccttaacgggaaaaattataaccttggggggggagttttttgacaccattgacaatgtaagggttaaaatccaggacagggggggcttccttcttgaccagaaggggtttattttcgccggaaagcagtttggggacggacgcacatttgttgactacaacatccagagggagtcacccctccattgggggctgccccttaggggaggcatgcaaatttttgtaaaaaccttgattggaaaaacaatcaccttggagggggagtcctaaaacaccattgacattgtcagggcaaagatccaggacagggagggcttccaacttgaccagaaacgtttaatttttgccggaaagcagttggaggatggaaggacctttgttgactac

SEQ ID NO: 54944 - DNA, 484 bp, Zea mays
  Clone ID: MRT4577_150106C.1
gggaagttcaaggggcacatcaagctactttctttttgcaaaggttgggccggcaagcaacatccacttttaccctcggcaaaaaaaaaaaaaaaaaaagaaatccggggtttgtcatcgaccgggtagggcaactttaaatcataagcgggggctccttgtttgggaggggtggggggcttctttttgcttggcatactcagggaaaataacccaaccggaaaggaactttccatccatgccttttatggcctcaccagctttttgtacagttgcatatttgacaaacccaaatccttgggggtatccaaatatcctatcagggatcacttttgcttcaataacctgaccaaatttaaaaaaggcttccttaagcccctcggacggtgggcgtttatttaacccttgaatttttccaaatctttgcctttctccttcgaggaaaaaactgactatttgacccagataaccagatgaacttttg

SEQ ID NO: 54945 - DNA, 523 bp, Zea mays
  unsure (1)..(523): unsure at all n locations
  Clone ID: MRT4577_150107C.1
ggccgacgggcacgcgcatcatcaacaacaatgcacaggagaccttggactgcgttaccattcaaccaaccaacagatctncattcacatattcaatccagacgtacacgtgatgagaagacacacctcagctgacttactgttcgaagtgcaccagacaagcatacatacccatctacacacgacgtcagctagtaagctactagtatgcacttacttatatgcactanacaagattgctcgtcgatattcgctatacgacagttagttggcaaacattgggtgatgtcttgtactaccatcacgtgcgtggcttcctacccacatgccagtggaaagcattaacagtcgttgttgctgaacctacgcttgctgacactctacccactggccgtgcaatcacacttgatggcttattacatcaacacaagagtgagtgacatcagcacccatgggtgtgacgaggactaccaccttatagtctcagcccaccatcgatggtgacatcttctagatacctaac

SEQ ID NO: 54946 - DNA, 174 bp, Zea mays
  Clone ID: MRT4577_150108C.1
gggaacaattctgaacaagacgttgggttttacaaacgatctccacaggggccggtttgggagtagttcaatattcgcaacctttctgcaggggtgattaacattcattgggcacgcacttacacttggcgggcccaaaaagggttaacctggagagtggggactttacaaccc

SEQ ID NO: 54947 - DNA, 311 bp, Zea mays
  unsure (1)..(311): unsure at all n locations
  Clone ID: MRT4577_150109C.1
ncactcnatttttttttttttttttttttttgtttgtttttttgaaggttttgtcggttttttctttttttgggggaaaaaaccaaacagtttggtttcaatcaagggttcctaagtccaaacatgcccaaaagggccaaacgggaaatacttttttgggcccaaaacactagtccggcaacccccaagcagttaattgattaggggggaattttaagatttttaagccacccattttacaagacttccccaaaaaaaggggtttggcaagggcaccaggtttttcaacttctttaaaccagcaacaattt

SEQ ID NO: 54948 - DNA, 250 bp, Zea mays
  Clone ID: MRT4577_15010C.1
ctccgccaacagggggggttgtattagagtgtctgtgtttttcatctgggacaccaagaacggtgcgctgggggactactgcatggacttgtccaagatccgtgcgatgcccaagcagaacaagaaggagctcttccgccacatcctaagcggccacaagcacctgggcagcccacgctcacgctgagaacatcgcacggggacagcgtctacggcaagcttgttcaggcgtgacgccagaagggaaaga

SEQ ID NO: 54949 - DNA, 253 bp, Zea mays
  Clone ID: MRT4577_150110C.1
ccattggccactttctttacaaaatgatcaccacaccccaatgaacaaaataaagacttacattactcacacacacctccaattttttttaatggaatgcggtaataaatttaaaaaaacaaaattggccctttttattttgttcaccaacaaggaagggacacgacttggacaaaaaaaaaaaagatagggggtccaataagttttaaaaaaaacatagcttttgagcgcacactttaggccgccagcgcca

SEQ ID NO: 54950 - DNA, 383 bp, Zea mays
  Clone ID: MRT4577_150111C.1
gaaacagaatgcgagcgcattttaacatatacagaagcaacagataagcgggcatataaagggtaactaaacactgagtagggggcttgcagaccacataacagggactggttcagacagacaccatcaacaacataacagcatggacaggggagcaaacccaaaaaacatgggcaaagatagaaaatttgggacatgaccattacatatggaccacaggaacatggtacatgaagcccaccgggggtacgcagctggagaaagaggacagacacagaaagaacatacactaaaatgcgataaggtagggtcgggctacaggacaaaaaggtggccggggggggacatagccggaaggaggggttctaccttgactgggtggc

SEQ ID NO: 54951 - DNA, 346 bp, Zea mays
  Clone ID: MRT4577_150112C.1
cgtacaagaatgcggcgaaaacggccaattcgggtttatctggatgtcatgcatggtcgacggacgtagctggcttggctatgcgaagacggtacctgatgtcggacttgcaggtatacataggcattggaactcgtagatgctgggagctgatctgtttgtgccgtatagcttatatataatatggcggatcgattggagatcccagctcttcaaccatataaggtcgaacgagctataggatccaggcttatacacgcatggatgctgctgtttaaacaatcgacagcgttatctaaggtgcagtcattggcacaaaccataaagggacatcacttggaaaaac

SEQ ID NO: 54952 - DNA, 495 bp, Zea mays
  unsure (1)..(495): unsure at all n locations
  Clone ID: MRT4577_150113C.1
ctgctttaaaaaacccaggaacaggctctgnaccatgttcctggtgacaatggctgacctgcagacctctgcgcatggggcttgagccacatgcagtcaggttgtcagcaagcatctggaagaatattccatgaaagaactaagattttgcctttttccttaaaaatttatgtttcttctgcaatgtcgtgtccaatttggtttgactggaaactgaagttcagacctgctgtttgtaggaacctgcaaatgagctgtacaggaagtctctagacttgtcaatgaaggcacctgaactgcatttggagatccagaggcaaatggtttctcaagcggcaacacaagcatcctcagcctcaaatccaagggtagtctaccttatcttgttcctagaaactacttaaacacttgccagagttaacttcagaaaagttccatgtcgggttaatctctaccattttttgtgttctctacccttttatttatcactatggg

SEQ ID NO: 54953 - DNA, 637 bp, Zea mays
  Clone ID: MRT4577_150114C.1
tcgaggccggccgggccgggttaaaaaaatagacttgtgtctatgtatctatcagagatagaagcttgttttgtacctcaatagcatggatggcttgcagatgaagatcaaactgcgggtgctgctcctgctgcttctgcagctggagttaccctcgaactgcaggaaacgaccacctcctgccagcccatacctcccctctgggtggcctggaaataaaaggccagcgacctagttcatccagggcgaggcatactctgtggagaacgcccactcttgctactgtgctatacggtgcacatgcgacccctgtgactggtgatcatctgcatgaagtaacatgtgtattattattatcttatcatatcttgtggtggagaacgcacagtacataaccgaggtcgatctgtctgtcatatcgtaatgattgatgtaatgagtgtgggataaagaagaaagaataagttctacgtgctgctatctctctactgaatgtccctaggcacccctagcgctcatgtatgtgtcgcctacatgcatgttaattgatccctttgcgtatgcttgaaccttatatgtttctcgtgcgacaatgatatatccggtcactatccacatatactacaacccggcttag

SEQ ID NO: 54954 - DNA, 263 bp, Zea mays
  Clone ID: MRT4577_150115C.1
gcgagacgcacctgagcgtgcattagctgtcgtgcgtcgctgggcgctctaccgccggaattcgtgcggtcttagcaggaccagccggtctcgaccacgtagcgctgtgccgccgttccggacgcgccggttatcgacatatctgagcccgggttcggctctcgcatggcctcagcctccaggaattggtggctgctccatgtggtgaaccacggcttgccctcagctgcgttggcggactccatcgcgtcgggcggtccttc

SEQ ID NO: 54955 - DNA, 246 bp, Zea mays
  Clone ID: MRT4577_150116C.1
gtgagtcgtattaaacgacaccaggtcgaggagctcgagggcaccaatcatggccggcgtgaactccagcgtcgtcgggctcaagcccgccgcggcattgccgcaggccgccgccggctcagcgggggcgaagcgggtggagcgggccgcgcccgatggcgtccgcgccgctctggtgcggcctggcggccgtctgcgccggcatggagaggaacgggtcagcgaaagccacgatcttcgacgagt

SEQ ID NO: 54956 - DNA, 898 bp, Zea mays
  Clone ID: MRT4577_150117C.1
accccaaggccgggtcctacgtagtcgaggactacagcaagaaatgggggtcaacaagtctgcagttctgcttggtgtggttttggtctcagtccttctcggcttcctggacgttgtgtacgcaagggagctcactgaagccaatggctctggactgaagaataatgtgaagcctgcaggagagcctgggctcaaggatgagaagtggtttggtggtggatacaagcatggtggagggtatggaaacaaccagccaggatacggcggcggaggaaacagccaacctggatacggcggcggaggaaacagtcagcccggatacggtggaggatacaagcgccatcaccctggtggcggctacgggtctggacaaggagggcctggatgtggatgtggaggagggtatggaggtggcaatggtagtcctgggtacggcgatgacaatggtggtggcagtggcactggtggcggaaatggcaatgctggtgggtacggaggaggaggaggcggcggttatggaggcggctacggcagtggtagtggtacagcaccaggaggcggatatcatggcggtggtggtgcacaacgctacgctgggcagaactagcaagaacaaccccttatgctagtttatgttaaataaacgatccattgttcatgtgactgagcaatttaagcagtgaaggatcttgactcgtgttatttgtgttaccatatgtattggttgttttatgtttaagatgaatgtacaccgctatttgtatgtcgaactcgttgcatggagatgaaaaaaaaaggcacaaaaacatcagcaaaccatgctttccttccggtcgaccagatttgggctgatatttattgagtaaaaaaaatgtatctctgggagattgtttcaagt

SEQ ID NO: 54957 - DNA, 359 bp, Zea mays
  Clone ID: MRT4577_150118C.1
cggggccccttctccctttctctctctcctgcttctctcccgcctgcattgcgcaagggccggatgaagctgactctgagatgcctcgacggacggcctaccttgcaagcaatcccaccacaatgacgactggtaatgcgattagccgcgcttatcgacggataccacgtggctagacgccttgcacgtagatgtcagcggtctgatctcgtttgtctgctgtacctcgcagttgttccttttgactgctccgcatttgctttatggttgtaatgatgcttgaactcctttgtgttgcgtgttgctcttctcgcttcctctctggggagatgcttcaatgaaagttatatgtgcgctgg

SEQ ID NO: 54958 - DNA, 264 bp, Zea mays
  Clone ID: MRT4577_150119C.1
ctccgaacagaacgacactactggcacgctttcaccagcaccagcaccacaccacatgaatggtggagcctagcacgggcagctatttcccggccggcgacgagacgaccaccaccaccacatgttgcatgagcactagggaccgccaacggcagtagcagcgccaccgtcatacatcaaccccgactacgacagagcccgtcaggtacaggacacaagaaaacaccaaatacaccctctgatgcccgacgcgccgccgcccgc

SEQ ID NO: 54959 - DNA, 1497 bp, Zea mays
  Clone ID: MRT4577_15011C.1
ctggccgggaactactttcatttcgtcgtcgtcgcccgcccccacccgctcctccactccaccaccaccggacagatacggatgtctccgcccgcacatccacttcacaaacgaaaacccgcagcaaacgctagcagcggcggcgccggcagttggtagccgcgaccgagacacggcgggtgacctgccccgccgcagtcggggtgtatgtattaccaccgccagaattccaggagacgaggatcgaggaggcaccgatccgtagcggcgatatcgtagagccgctggtctcacgccgcaccgagacaatggcagaccagttagggtcttacactattagatcccatggaatgatattggcaaggttgcacatgtatgactggataatacttctcctccttgctgtcatagacgggctgttgaatataattgaaccatttcaccgttttgttgggaaagacatgatgactgacttgagatatcctatgaagggcaatacagtgccattttgggctgttccactgattggaattatactgccttgggccatctttgttgggatttacttcaaaaagaagaatttttatgatttgcaccatggcatactggtgattactgatgcaattaaggatggtgttggacggcctcgtccagattttttctggcgctgtttccctaatggaaatgatgtttatgataacattactactggtgttatatgcaatggagtgaagagcgtaatcaaggaaggccacaagagctttcccagtggacacagttcatggtcttttgctggtctaggcttccttgcatggtacttagctgggaaactcacagcctttgaccgcaaagggcatattgcgaagctatgcattgtgttcctgcctctccttactgccgcacttgtggctgtttctcgagtggacgactactggcatcattggcaagatgtatttgcagggggtcttataggtcttacagttgcttcgttttgctacctacagtttttcccatatcctttcgatggcgatgctttgtggcctcacgcatacgcggtccggttagccgaggaggggaacagcagaaatgcgaactcgtacagcgtgagaccaaccgagatcgaaacagtcgatattcctgggcacggtgcgatcatcaccctaagagagactctaaacgatgtggagtctggcagtgccaggagattgtgagatgggtctgcaggtgtggagattgatgtctcagataccatgggagttgcttgcatatgtgtacaggtagatctattgtagagctgttgactgctgccaccgtgataggggagggttgcttagacgggcctggcagtaaatttacttggtaggggtgctgtttcttctgagaacctttggcttttgtttgtatatatactcttatcaaagtgtttgctgacacttttgtaaccagtttggtcgctgcattcagcaactatgatctgatcagatgttgcccagtctg

SEQ ID NO: 54960 - DNA, 1021 bp, Zea mays
  Clone ID: MRT4577_150120C.1
gtggggcaacgcgatggatgcacgacacagcggacatgatggctcgctgctcagcgcccgcggggaggagcccaagccgcgccaccaggagtgcagcagcccttcaatgctgccatcgttcacaaactctctgccgccgccgcgcccgagtccgccccgcccgctcgccgcgcggcgctccggcgctcgatctcctcgcgcccacccagccacgcgtggagccacccttctcccgtcgtccggggcccggccctcaatccctcacgccctagcttctctgccaccgcccgatttccggtcagcccctcacgccctagctttcctatcaggcgctcggtcgctccctttgccacgcgctcctagcttctctggtcggctcttcctccgccatttccggttggatcctcctatgtgcagtgctcgacaaacggcaccagcgccgctgggtactgtcaccgcttcggtcgccggagcccggagatgtaaatgcgctggagttttcatgctgtcgctggaggaattgaggaagaaagtttgcctcgtggccaatgcaattgatgccctggaactgccgaagggatctgcaattgctattgacatgcctatggatgttacctaatttcaggatgctaaggtaataatgcttggactggtacccagcatcgttcgtacttggaagaatacggactgtacagccggactagactggtcctccatccggtaattttttaattgctcaactatccagaccttttgtcttaactttgcaagttacacatatagtatggtatgcagtttctattgaccatattcattatatacagatgctttagctcctctagggaggcatccagtgtggattttgtgttaaaggataggttggaaaccacacgacagcaatatctgaatttcttatttgatgatgctcagatacataattttttgactgagccttgatattctcagaaggtgatgtcagtcttttcctaagagaagtaagtagtgttactccatccttact

SEQ ID NO: 54961 - DNA, 193 bp, Zea mays
  Clone ID: MRT4577_150121C.1
ctcgtcgtcgcgtgccatcctaggtttctttccccgtcgcgcctccccagatttggcgccgccgccgctgacccaggttgtcttgatggcgccgctgtaaaccggaagagacaggacttccagaaggtcctgccttgaacaaagatactgtcatccatgtccagaggctgtgctgccaccttggatgatctgg

SEQ ID NO: 54962 - DNA, 241 bp, Zea mays
  Clone ID: MRT4577_150122C.1
cggggcaatctccatctgcattctcgactccgattccaatccagcaaaccctacagccttttgcaaactcagagtaggacccgatggcacccaaggcggagaagaagccggcggagtacaatcccgcagaggaggagcccgcgtccccggcggagtacatgcccgctgagaactgccccaaccacgtctaggactacctgcggcgagatctccagcgcgttctctcctgatccccccggcc

SEQ ID NO: 54963 - DNA, 148 bp, Zea mays
  Clone ID: MRT4577_150123C.1
ttctcgcacatccagaaaacataaagcgggggctctaattcaacgcatagccgagccaaaaaaattactcactaccacccctaatcctcttacacttaccaaaacctcaaagctgacttctccagccactcctccttccctctcaaac

SEQ ID NO: 54964 - DNA, 217 bp, Zea mays
  Clone ID: MRT4577_150124C.1
gtgactcgtcaagatttatcttgcccacttacatttgggtactacaattgggcattttctacctttaaattagtgtccctagtgcagagacgctccttcactttagtggaatacggcgatctcgcttgcggtttagggggctccgatgttgccttgagtctatcacatcctttattgggtcagcatctatccgatccttttgtgggatcacactaag

SEQ ID NO: 54965 - DNA, 384 bp, Zea mays
  Clone ID: MRT4577_150125C.1
gggacgttggctttgatgaaaatcacttttctcgctatttgcttgtttctcttaatttccatcgatgtgttggctgtccacagacaatactatgaccttttgggtgttgagccaagcgcctcacaaaacgacattaagaaggcctatagaaaactttctatgcaataccatcctgacgttaatccatctgctgaggctcacgaaaaattcacaaagatcaacaacgcttatgaggtcctttctgatcctgaaaccagaagaaaatacgatcaattaggtccagatttcgaaaagcaacaacaacaacaaggcggtcatccttttggagacttcttcggcgatttcttcggaggtggcggtcatcatcaagaaagaaaagacctg

SEQ ID NO: 54966 - DNA, 134 bp, Zea mays
  Clone ID: MRT4577_150126C.1
tcgcctactcgtccgcccacgcgtccgagcagaggcattgttacttgttagttccgaaagcacgtacgtctcacattagcttgtttcagccttcgttgttcaggactatagaggaaaccgcatacatggccaac

SEQ ID NO: 54967 - DNA, 183 bp, Zea mays
  Clone ID: MRT4577_150127C.1
cagtaacgtcggaataacaccgtcctcgacttatcacgttagagggaggctcatttaaatcacggctaacgagaaaacggcactaagctaatttgtatgccgctcgtttattaagggactaaagtatccgccatcgacaaagaccagcgaaaaagcgttttccatcaccacacatccgaaccg

SEQ ID NO: 54968 - DNA, 140 bp, Zea mays
  Clone ID: MRT4577_150128C.1
cccactcatccaaaaccctctgcgcacaacacgtcctgcaaccaataatactgttacgaatttgcgtatcacacaacacaccgcaaaatatcctttaaaccctgatgtcaactcctcatggtaggatccacaaaccccct

SEQ ID NO: 54969 - DNA, 420 bp, Zea mays
  Clone ID: MRT4577_150129C.1
gctggacccccgcggcaccgccccggactgaattaactgggtggacgagctcactttctgttggccgcccgtccttttttttttttttatcaagaggttcttacaatcccctccaatatcttgggccggaaccgaatccacatatagctcactcgtcgaataactacaaagaatgaccctagtttcttttcacaaattggcaggaatttgcatattaaatacacctattcacaacacattatttatcataaggtggcttgaaaacatgttgtcaaattgaattccagaacttcaaagggaatggtgaccaattttttaaatgcaagagtaacttccaaggccagcgatcaattggtgtaaatgggggttctggaaattccagcactttcggttgcaaataccccggggaggggggcgccc

SEQ ID NO: 54970 - DNA, 264 bp, Zea mays
  Clone ID: MRT4577_15012C.1
aggttacgtgacatagaagtgtgggggagatttttgtgagcggcggcgaccggcacgggcgggggacttgagcgggggaacagggtacgccgatgagacccaccccggacaggcggagggaggagaaagctgcaggcggcgcagggaggagagctgcctcagtatgatgggacaggggctagcagggaaacgaccaatctgaggccgagggggagagccagtaacgtcggagcggggaagttgaggaatactgcgtggcggcgg

SEQ ID NO: 54971 - DNA, 398 bp, Zea mays
  Clone ID: MRT4577_150130C.1
gtctatattcctgaccaatagcttctcctgccatacaagccaattgtaaccgataaacaaccatggacttacaccggtaccgacaccacgatgagggagagcatcggggcgcacatccgcaaggccggcatgcaagtgaggaacgcgtgctgggagctgtactgcgtcgagcatgacattcaggctgatggtctgatgcgcggcgacaagaccattgggtgaggtcgatgatgcttgcaacacctccttcagtgagactggcgctgggaagcacgtcccccgtgctgtttacgttgaccttgaccccactgtcatcgatgacgtgaggactgacacatatcgacagctcttgcatccagagcagctgatcagtggcaaggaggatgcatgcaacaact

SEQ ID NO: 54972 - DNA, 359 bp, Zea mays
  unsure (1)..(359): unsure at all n locations
  Clone ID: MRT4577_150131C.1
tccacgcgtccgaaaagattagccacctttttttcatcattgcctcctcgcttgcttgattgccttcggacttgggttagcatggatggaggcagtcccatgcagaccgtgctgtcggccctcggcctggcgccgcgggctccccgacgtgcgcccctactacgccaacccatgcaagcccgagccgcacctcgagtacgccgcgggtgccggcgtcagcctcgccacctacgacaccgaggacgaggtggccaaggtcgcgcgctgccaccccgggtgccagctcctgctccgcctcaaggctcccgacngcggcgtcagcggcggcgacctcatgaacaagtacggcgcgcacgcca

SEQ ID NO: 54973 - DNA, 544 bp, Zea mays
  unsure (1)..(544): unsure at all n locations
  Clone ID: MRT4577_150132C.1
ccggccgggngtcaaaccacccacagggacgcgggggctggtgtggccgatcgtacaacgcatgcggcatttacttcgtactggcctgggacaatactgaactgctagagggaatcaggctttctttgccaactgcaagatgttccattgttagcctacattgacctatctgaatgtgctgagtgttgagagataatatagagactgtttgctgaactcaaggcctgcaagatctctgtctacatgaaaggagaccattgtgaggagccctgtacaggcacatgttggggggccacttgactttatggtgcatgatttactatatagagcagagcgaggatgcacgcagctgaggaaacgctgtatcaatctacattgatatcatgtggggcattccagaccaaacatgccatgatccatgtaggtatcctcaagctgactgcgaccgctttgtagattcattcactgtgcacgcaaacagggtttctatctattatgaacggagattaccccttataccgtgctgtgtatatgactgaacctg

SEQ ID NO: 54974 - DNA, 706 bp, Zea mays
  unsure (1)..(706): unsure at all n locations
  Clone ID: MRT4577_150133C.1
aattcggcacgaggttagagagatatactttataaaggaaggaaattattactagtagtcattttatctcatcttttgaagaaacttttataaatctcaaaattggattttgggtgttacaaatcctcgtccattcccggaccggcgatacttactcctgatagtcctctaggatcatggaccatcccgtcaggccaatatgagtcttttatgtgcaactttgtccccactcatacgcacctgagaagactttccggtcagtcacacatcccaagattgctctaggccaagcacgcttaactcagaggtttgtttgagataggctttcgaaaaattagatgcaccttgttgatatgagtactctattaattctattaagccttaggccaggatatcacacaatccacccgggctaggatatcacacctcttcctttacctttgttcctgccaccatcgtccacaccacgtgcggccccgccactttcgaccgtgcgacacatggccctgtcgcttccgaccgcgccacatgcagccccgtcgcttctgactgtgccacactcagccctgtcacctacgcccatgccacgcgaccccacttttcgggacgcctacgactcactntgccgcccgcttgtgtctaccagcaacgtgtgcggcctattgcacttgtcccctctcgtgacccgccgnccgtgtactaccct

SEQ ID NO: 54975 - DNA, 784 bp, Zea mays
  Clone ID: MRT4577_150134C.1
ggaccctcgaggccggccgggccgggacattgaccctcgtcatctacaccctctctctctcccaatcctctcactgcgaatctgcgatggccattgcgcagcgtctcaccgcgctggagctccaccattgctgctgcccaacacctcgtcatacgtcgcgcctagacttgagctcgctgcgcgctgggagccccgccgagttcgctgttgagcaccgccgcggaagactcttcctgccgtgcgtcgtcgcaaggtaagacttcgtcgtcttcaaccccctcggactcctagctccctgcgaatcccgacatagcggcctgctccctcccgtggatgcgtgcgtcctggccagaggccgagcgacacagcgccccggtggctcccttcccctgcgtggagctcgcctgaagatcccctgaacctgccccttgccagccctgcgctcagccgcagccagcgctgctagtgtgcccacctggccggacgaagccccgttgcgcgagctccgcccgaccctggcgagcgctctctggccaccggatttgcccagcccgtgctcgccctgctcggtgagctagcccctacgccgcgtcgcccttccttgctcattcctgctcccctccggtgagacgccgcggcagccgacgaacggccttcttctctatgtgcgtataggttgcagaagaaagaaaaactgaccacgttcaaacgccgagcaaataggctggaaaagagaactgcatggggcccacgatcccatcaccatacgtgcactatgcattag

SEQ ID NO: 54976 - DNA, 327 bp, Zea mays
  Clone ID: MRT4577_150135C.1
ggcttggggtaggcccgattcccctgcccctactttactaggacacgacgtcggatccctctgcgcgcacctggaggaggagcacccgttcgaaccccaagccgggtctggctagtgatagagtgagacaaagtatataaattatggtctcatatataatgatttaataagtatgacgaattataggcaatatcctgactttgtctgggttgtatatcttcttttttgtgtgtatacactaagtaccatgacttgccttacttgctgtttacagccgatgatgaacttgctttctcccattatttattaagccactttaatgttaat

SEQ ID NO: 54977 - DNA, 1447 bp, Zea mays
  Clone ID: MRT4577_150136C.1
tgggaccctcgatcgaggccgggccgggaacgaaaaccagctctcatattggcataattccaaatttctctcgtccgcaccgccgccactcgccttttcattccgcaccgccgccaacccgccgcctcttctttccatggaagtggacgacggtagccgcgccaccccgccactggacgccgtggccgccgccttcaagtcccaagtcatggagttgcaggacctcgtcctcgcccgcagcatgttcccggccacggcgctgcccgacctcgccaacgtggacgcgttggtgacggcgatggagtcgcaggtggaaaccatcagccgccgccttcaggaggagcttgacgccatccctaaggccaagaagctagtccagcggtccttgaaggaggaagagaagctgcagcatatgcttgcgaacttaccttctggaatgcgcaagaatgattttgctaatcagcacgaacagagctcatcaaggatgctgcctcattttaactcttcttttactgaagctaatgaatgtgaactgaagattaaggatgaaccagttgcagctcctaggaagggaagagcacctgcacctcgttggtatatctcaaccgaggagcttgattcactctcatcgtacatgaggggaagactgactttggaaaaggttaatatcgcaataaatgaagtggcttcatatgcagatgccaatgctcatcttgttacatgccctaagaaaaagttgtcagaagatacatgggaaaaagctttggaactaagggatattgcagcaagtggtgcagtaaagggcaaccatttcttcctggaagcagatataaaaggacctgggttaaaacttgacaatactggcaaagctattcttaccgttcttcgccaccttgggcgcttccatgaagttcggattgggcaccatcgggtctttatactgtcaaagcaggcatgaagatatttcatttgatttgagttggtgcactgtaattcggcaaaatccggtagcctccaaaccgtgatattgcaaaatgtatttcacatgcacctacttattaagagatactccatccgttcataaatatatgacatcattgattttttttttaaactgaccactcgtcttattaaaaaaataatgagtcatttattttgttgtgaaatgttttatcatttaaggtagttttagtttgtgcttatttaaaattttatatttttgaataaatattttgaataagataatggtcaaagttttttgaaaagaatcaataatgccatatttttgtgaacggaggtggtacctgtgctttcatcagtgatatgcttggcggtgtgttttcattttgtatgtggttacattaggccaatgtttccatagcatgtatatgcgcggtcgcaaacgatagtttcctgaatgagtaatgcgagaacatgctgtaattcc

SEQ ID NO: 54978 - DNA, 285 bp, Zea mays
  Clone ID: MRT4577_150137C.1
agtctacgtcgtctcactcaccccgcattcacgcctccctcatcaaatagcgtcccgcccttttcggacattcgcaggggggacaggaactcatccgccacggacacgagtccggcgacgaccttcgccgtcatcttatccgtcctcttctgtgccgcagctgtcaccgccgtctacatcgacgtcaccgactacttcatccaacgcctcgtctattgctacacctgccgctccgggttcgtgactaatgtcaccgagtacatcgctgccgccaatgtgatgctg

SEQ ID NO: 54979 - DNA, 286 bp, Zea mays
  Clone ID: MRT4577_150138C.1
ttctttggttcacgatcagataagtaagaaggcgacacatcatgatgcgcctggcggcattggggctctttcaaggtacgttccacaaaagttttccttggccaggctttgccactgtctcatgactgaaagagatggctacaacctggatatgatagacctactacaagagaaggttgctgtcatcgatgcttgagggtatatatcctacaatttcgccattgctgctgattcctactgcggcccaaaggcacgtcatgagagctacaatgtggggagtgcagat

SEQ ID NO: 54980 - DNA, 347 bp, Zea mays
  Clone ID: MRT4577_150139C.1
gtttcttgagggtgtttctgagctccacatgcgtccggtgccaagactactggatgctatcacaggaggagccaccaacaccaaaatctactcaatgctatcagtggaggggtcacctacatcagtgtgacatctgtttagctgtccctcaaactaaaatataactcttcagaaaacttttagctatcccatgagaatatagtagtttatatcatatcatatatatatgtaaggacttgggcatttgtgacctggaggtggtagaaaaacaaatatgtacacgtatgatgcttgaaacttttgatgcccaaggaagggaaataaacttgggatatttctcattttgc

SEQ ID NO: 54981 - DNA, 419 bp, Zea mays
  unsure (1)..(419): unsure at all n locations
  Clone ID: MRT4577_15013C.1
cagcttctgataaatccgggggggaaggagagagagagagcgagagagagagattgtactagtagagaggctagtaggtggtcctcgacgaaaagttggcggtgttcagcgggcaggtggnggaggagcttttttttttttttttttcgggcagccggacgccgttttttgcgccggaggagaaaaaaatcgtggggcgcttcctgttcgggggggaggggggcgtgtccntgcagaaaggagaccacngccacctngnctactcccacaccaaccaggcgctcctcctcccctagncgnncgcggccaaagacgaggngttctgcctgtncgaaggggggctggacaacctgngncggctgagctagcagcacgggctggcaagcaagggcgccaacgaggagctttttttttttttt

SEQ ID NO: 54982 - DNA, 308 bp, Zea mays
  Clone ID: MRT4577_150140C.1
acccaaactgccctgcgtgagaatagatcgacagaaagaaccggaaccaacccacacaagacacaacaagctgcacccgtggcaggcatggggccacccgtgccactgacaccgggccccaccacccttaccaccccgacgcacactttatttacgccacgttactcgcagaccgcaccggacaagcccaccgcgacagccactgctagctacctaccgggcctacccccaatacacccccagagagagactcccgtaacccgtaccgtactcaacagcacaattctgtgttatactgccctgtaccc

SEQ ID NO: 54983 - DNA, 338 bp, Zea mays
  Clone ID: MRT4577_150141C.1
ttgccaaactgaaaataactccggctacataaaagataatgggtttgcaagaatgacaagggaccaatatgcctacaggattaaaagacaatcctcactcccttggttgttactgacagcctgtaaatgttgaactcttcatcaaaacaaaacaaaaatgcttgagtttctcgtggaccccaatgaatctaagaatcggagatgggactacagcaccatggtaactgaagaaatgttatatactgcagtaaatatccacaggctacagaacctgtttgagccactttgcataaccattagcgattgacccacacaaaatgtgtacgtctattcaacca

SEQ ID NO: 54984 - DNA, 318 bp, Zea mays
  Clone ID: MRT4577_150142C.1
ggaggaggtcaatttcgaggggccattccctttcgcggagggcaggctctatggcctgactctcagtgctactctgaaggcttaccatgtgagcgtcgatgggcgacatgtcactctacttgcttaccgcactgcgtacgggtcggaggacgctacaggcctctctccgaatggggacctagatgtgcacccagagattgcaggatctttggccactacacacccaagttctgcgccacataatgatccgcagtattataatgagtggcatgctgctttgctggctgatgagccagctgagatgctcattgacattct

SEQ ID NO: 54985 - DNA, 361 bp, Zea mays
  Clone ID: MRT4577_150143C.1
caacacacacacacatccctccccccacttttaccaccacacacatacccaatccaaagaagattttaaaaaattttcgacaccccaacaaacaccacaatctcacctctacaccacacctactcatccaccccaacctcacttcaaacaacatcacctccttcctctccatctccttcatctacatctctacctatcacaaaccttaccaccaacatccatcatatttctatccattctttcactcattacaataattatctttacactttctactatatctttacttactatctcccataccactatccctacctacaactttaactatcttatcaattctcacatatttttcaccaac

SEQ ID NO: 54986 - DNA, 367 bp, Zea mays
  Clone ID: MRT4577_150144C.1
gcccctgtcccttgcgtttcgtttcacgacgctgagcctcatgcccggggcggacgttggcgccgagcaggagccggccgtcgcgagggggcaagaaacagactggtcccttcttcacggtggcgccgctcaccattttctacggtggcagggtggacaagatcgaccacttccctgttgagaacgcatccgttgtcatgcgcctcgcagctggcgccgagcgccctgctgtctcggcccccggcgactgcgccggctccgcgctacgacctgcccattgcccggaaggtttcgttgaaaaggtttctggccaagcgcaaggaccgtcttgtggagcgcgccccctacatccgtccgtttcccatcc

SEQ ID NO: 54987 - DNA, 474 bp, Zea mays
  Clone ID: MRT4577_150145C.1
tttcgaacacaccaagttttagactccagcatcgccatccccacccacccatctgctcagcctcagctgccattcccgcgaagcgccgcctcccggctctatcgatggaccgcgtagccgccggagccgcggcggctctgactccggctgccgcgcccgtcacggagaagagcgccgccgtctcagcctccgccgccgccgccagcctcgtggccatcgttgccgccgtgacagccgccgtcgcgttctagaccgggaccgaccttgggacatctgatatgtcggtggatccgtggaggagctagagctgcactctttctctgctgtgtgtgttgggtgttttcctcctcttttttcggatcctatttatttgtttattcatttgttatttcgaggcttgagacggagctgaggacgtgtaatcctaccaatttttcagacgggagctgatttctatacttatgagaagattta

SEQ ID NO: 54988 - DNA, 3203 bp, Zea mays
  Clone ID: MRT4577_150146C.1
gggcacaccctcgggccgggataccaagttttagactccagcagcggcatccccacccacccatctgctcagcctcagctgccattcccgcgaagcgccgcctcccggctctatcgatggaccgcgtagccgccctcgccgtcgcgctcctcgccctcttcttcgccgccggggccacggcgcaggccccggcctcgtcgcccaagcgcactccggcgccagcgccgcccaggacggccttcctcccgccgccgccggctgccagggcgcctatggcctccccgccctcgcctcccgcgatggcgccggtgcccgcgccctccgccggcgtgccggccacgagccccgtcggcgccggcggttcctaccttcctccccgtcctatcctctccctcgccatcctcgtctccgcctccgccgctccccctcggtccccgccccacctcccgttctctccctccttggatagggttagagactgagttcccccgcacgcgcgcgagccatggtctccttcacctgttcccaggtcggcgcgacggcagcgggcggagcctcgcccttcctcggctaccggtggcggagcggccccgggggagccactccgtcgagctccctcttcgttggccggcggctggcggcggtgcagatgcgcgcgccctctcgcggggcccgcgggggctccgcgctgcgggtcacgtgcgagaaggtggtggggatcgacctgggcaccaccaactccgcggtcgccgccatggagggcggcaagccgaccgtcgtcaccaacgccgagggtgcgcgcacgactccctccgtagtggcgtacaccaagacaggggagcgcctggtggggcagatcgctaagcgccaggcggtcgtgaaccccgagaacaccttcttctctgtcaagcgcttcatcggccgcaagatgtctgaggtcgacgacgaggccaagcaggtctcgtacggcgttgtcaaggacgagaacggcaacgtcaagctcgactgccccgctatcggcaaacagttcgctgccgaggagatctccgcgcaggttttgaggaagttggtggatgatgcatctaagtttcttaatgagaaaatcacaaaagcagtggttacagtcccagcatacttcaatgattcacaaaggacagcaactaaagatgctggccgcattgcaggactggaagttctccgtattattaatgaaccaactgctgcatcgttggcctatggtttcgagaagaaaaataatgaaacaattctagtgtttgatttgggaggcggtacctttgatgtctctgtattggaagttggtgatggtgtgtttgaggtgctttccacatctggtgacacacaccttggtggtgatgactttgataagagaatagtagattggcttgctagcaacttcaagaaagatgaaggtattgatcttctgaaggataaacaagcccttcagaggcttactgaggcatcagagaaagctaagatggaactgtcaacgctgacacaggcaaatattagcctgccattcattactgctactgctgatgggccaaaacacattgaggcaaccctctcgagagccaaattcgaggaactatgttcagaccttatagacaggcttaaaactcctgttaataatgccttaagagatgccaagttgtctgtcagtgatctagatgaagttattcttgtgggtggatccacccgaatccctgcagttcaagaacttgtgaggaagcttactgacaaagatcccaatgttacggtcaaccctgatgaggttgtttctcttggggcagctgtgcagggtggggttttggcaggagacgtgaaagatgtagttcttctggatgttactccattatctcttggtttggagacattgggaggagtgatgacaaagattatccccaggaataccacactgccaacctcaaaatcggaggtattctcaacagctgcagatggacagacgagcgttgagattaatgttctccagggagaaagagagtttgtcagggacaacaagtccgttggaagcttccggttggatgggatccctcctgcacctcgtggtgtcccacaaattgaagtgaagtttgatattgatgcaaatgggatactctcagttgctgccattgataagggcactggaaagaaacaggacatcaccatcactggtgctagtacgttacctaaggatgaggttgagagaatggtagaagaagccgataagtttgccaaggaggacaaagagaagagagatgcaattgacacaaaaaatcaggccgattctgtggtctaccagactgagaagcaactgaaggagcttggcgataaagtccccgctcccgtgaaagagaaggtggatgtgaagctccaggagctcaaagaggcaatatctggtggatcaacacagagtatgaaggatgccatgtctgctttgaaccaggaggtgatgcagattggccaggcaatgtataaccagtctggtgccagtgctgctgggcctactcctggtgctgaggctgggcctacccctggtaccggaccagcgcagaatgatggggatgtcattgacgcagacttcacagatagcaattgaggggtgattgatgcatggccatgtgttgagcaaggttggcgttaaggagtgaacaaattgttccttttttgtgttgggattgttactataggctatctagcatggagttgatagagatagtttttcgcgaacttctcctgtgattgactcaacaattagctgaatgctatataaagtcgaaaggagcgcataaggtttttattcaatttgtagctgattaattgaattgttgcaataaaggtgttgaattgatcagttgccttctataaaaaaaaaaaaaaaaaaaaaaaaaaaaaaaaaaaaaaaaaaaaaaaaaaaaaaaaaaacccaaaaaaaaaaaaaaaaaaaaaaaaggaaaaaaaaaaaaaaaaaaaaaaaaaaaaaggttttccccccccgggggggcctttaaaaggggaaattcccacccctggggggccgttttttggggtccccgccctgggcccaaagtgggggaaaaaaggggcaaagctgttccccggggaaaaattgtttcccttcacaattcccccaaaaaaaagggcccgaaacaaaaaaggaaaaccccggggggcccaaagggggg

SEQ ID NO: 54989 - DNA, 434 bp, Zea mays
  Clone ID: MRT4577_150147C.1
tttttgatcccttcatagggaccaagggtgggggggggggggtgtcggttacacgatctagtgaggacgccatctagacacaaaagaagggatctttttcttttgtgctgctggaaaatatgcatttgatgcttgtttatctacttctatcttcagtcttggttgacgaagctctgtgggtgacgggtcttgcgatattgtataggacatgttcgcctgcctctaccttatcctcagcggttatgcttatcttgtgtagctggagcatcttgttgatctccatgggctttgagcctttggttgtactattgggaccctaacatactgtattgtagcttgcttttgacgacagccagctagaatgccgggtagctgtgaaacataatcgttctgtgtaacatatggatagaccgaattttcttgaaccttgtatg

SEQ ID NO: 54990 - DNA, 2538 bp, Zea mays
  Clone ID: MRT4577_150148C.1
tctcgtttttttttttggtcttatcccctcgccctagtacgtttcctaaggaccccgtagagagactggtagaagccctccttggattgggcaagaattccaccggcaagagagatgcaattggcctaaaaaatcaggccgattctgtgggctaccagactgagaagcaactgaaggagcttggcgataaagtccccgctcccgtgaaagagaaggtggatgtgaagctccaggagctcaaagaggcaatatctggtggatcaacacagagtatgaaggatgccatgtctgctttgaaccaggaggtgatgcagattggccaggcaatgtataaccagtctggtgccagtgctgctgggtctactcctggtgctgaggctgggcctacccctggtaccggaccagcgcagaatgatggggatgtcattgatgcggacttcacagatagcaattgaggggtgatcgatgcatgaccatgtgttgagcatggttggcataaaggagagtgagcaaatagttccttttttgtgttgggatttttactgtaggctatctagtatggagttgatagcggtagtgtttcgcgaacttttctctcgtgattttgactcaacaattggctgaatgctatataaagttcaaagaagggcacaaggtttttattcaaatgatgcatctaagtttcttaatgagaaaattacaaaagcagtggttacagtaccagcatacttcaatgattcacaaaggacagcaactaaagatgctggccgcattgcaggactggaagttctccgaattataaatgaaccaactgctgcatcattggcctatgggttcgagaagaaaaataatgaaacaattctagtgtttgatttgggaggtggtacctttgatgtctctgtattggaagttggagatggtgtgtttgaggtgctttccacatcaggtgatacacaccttggtggtgatgactttgataagagaatagtagattggcttgctagcaacttcaagaaagatgaaggtattgatcttctgaaggataaacaagcccttcagaggcttactgaggcatcagagaaagctaagatggaactgtcaacgctgacacaggcaaatattagcctgccattcattactgctactgctgatgggccaaaacacattgaggcaaccctctcgagagccaaatttgaggaactatgttcagaccttatagacaggcttaaaactcctgttaataatgccttaagagatgccaagttgtctgtcagtgatctagatgaagttattcttgtgggtggatccacccgaatccctgcagttcaagaacttgtgaggaagcttactgacaaagatcccaatgttacggtcaaccctgatgaggttgtttctcttggggcagctgtgcagggtggggttttggcaggagacgtgaaagatgtagttcttctggatgttactccattatctcttggtttggagacattgggaggagtgatgacaaagattatccccaggaataccacactgccaacctcaaaatcggaggtattctcaacagctgcagatggacagacgagcgttgagattaatgttctccagggagaaagagagtttgtcagggacaacaagtccgttggaagcttccggttggatgggatccctcctgcacctcgtggtgtcccacaaattgaagtgaagtttgatattgatgcaaatgggatactctcagttgctgccattgataagggcactggaaagaaacaggacatcaccatcactggtgctagtacgttacctaaggatgaggttgagagaatggtagaagaagccgataagtttgccaaggaggacaaagagaagagagatgcaattgacacaaaaaatcaggccgattctgtggtctaccagactgagaagcaactgaaggagcttggcgataaagtccccgctcccgtgaaagagaaggtggatgtgaagctccaggagctcaaagaggcaatatctggtggatcaacacagagtatgaaggatgccatgtctgctttgaaccaggaggtgatgcagattggccaggcaatgtataaccagtctggtgctagtgctgctgggcctactcctggtgctgaggctgggcctacccctggtaccggaccagcgcagaatgatggggatgtcattgatgcggacttcacagatagcaattgaggggtgatcgatgcatgaccatgtgttgagcatggttggcataaaggagagtgagcaaatagttccttttttgtgttgggatttttactgtaggctatctagtatggagttgatagcggtagtgtttcgcgaacttttctcgtgattttgactcaacaattggctgaatgctatataaagttcaaagaagggcacaaggtttttattcaaatttaatttgatcggctgaatgctaaataaagttcaaaaaagggcccaaaaaaaaaaaaaaaaaaaaaaaaaaaaaaaaaaaaaaaaaaaaaaaaaaaaaaaaaaaaaggggggggg

SEQ ID NO: 54991 - DNA, 911 bp, Zea mays
  Clone ID: MRT4577_150149C.1
atacttacctggtcggggtcgacgtgggatcaagaagccccgtggcctagatcagtggcctgcattgcacttggctggtgcgctggtctaccatctccccaagtgggagagtggacgtcataatttgtggcagagggggtacgcgttcgcgcggcccctgctaccaagttttagactccagcagcggcatccccacccacccatctgctcagcctcagctgccattcccgcgaagcgccgcctcccggctctatcgatggaccgcgtagccgccctcgccgtcgcgctcctcgccctcttcttcgccgccggggccacggcgcaggccccggcctcgtcgcccaagcgcactccggcgccagcgccgcccaggacggccttcctcccgccgccgccggctgccagggcgcctatggcctccccgccctcgcctcccgcgatggcgccggtgcccgcgccctccgccggcgtgccggccacgagccccgtcggcgccggagctggtgacgacgcgatggcccccgccggagccgcggcggctctgactccggctgccgcgcccgtcacggagaagagcgccgccgtctcagcctccgccgccgccgccagcctcgtggccatcgttgccgccgtgacagccgccgtcgcgttctagaccgggaccgaccttgggacatctgatatgtcggtggatccgtggaggagctagagctgcactctttctctgctgtgtgtggtgggtggtttgctcctcttttttcggatcctatttatttgtttattcatttgttatttcgaggcttgagacggagatgaggacgtgtaatcctaccaatttttcagacgggagctgatttctatgcttatgagaagattttatattctttcataaaaaaaaaaaaaaagcggcc

SEQ ID NO: 54992 - DNA, 754 bp, Zea mays
  unsure (1)..(754): unsure at all n locations
  Clone ID: MRT4577_15014C.1
aactactttactttcgtcgtcgtcgcccgcccccacccgctcctccactccaccaccaccggacagatacggatgtctccgcccgcacatccacttcacaaacgaaaacccgcagcaaacgctagcagcggcggcgccggcagttggtagccgcgaccgagacacggcgggtgacctgccccgccgcagtcggggtgtatgtattaccaccgccagaattccaggagacaatggcagaccagttagggtcttacactattagatcccatggaatgatattggcaaggttgcacatgtatgactggataatacttctcctccttgctgtcatagacgggctgttgaatataattgaaccatttcaccgttttgttgggaaagacatgatgactgacttgagatatcctatgaagggcaatacagtgccattttgggctgttccactgattggaattatactgccttgggccatctttgttgggatttacttcaaaaagaagaatttttatgatttgcaccatggcatactggggattctatactcagtgctgataactgcagtgattactgatgcaattaaggatggtgttggacggcctcgtccagattttttctggcgctgtttccctaatggaaatgatngttatgataacattactacttggtgttatatngcaatggagtganagagcgtaatcaaggaaggccacaagaagcttcccagtggnacacagttcatggtctttgctggtct

SEQ ID NO: 54993 - DNA, 992 bp, Zea mays
  Clone ID: MRT4577_150150C.1
tcgaggccggccgggtattaactcgagctacacggcaaacctgacatcgcttctcacggttcaggagctgacttcggggatacagggcctcgatagcctgatctctagttcgagtgcgattggctaccaagttggatctttctccagaaactacctcgtggacgagctcagcatcgctgagtcccgtctggtggcactaaacagcccatcggattatgcgagagcgctagagctaggttcaggaaacggtggcgtcgccgcaataatcgacgagctcccgtatgtcgagatcttcctgtcgaagtactgcaagttcaagacggttggtcaggttttcacaaaaagcggatggggatttgccttcccaagagactcccctctcgccgaggacttgtcgacggcaatcctggcgctatcggagaacggcaagctccagaagatgcacgacgagtggttgagcgggacggagtgcagtgcagacaacggggctgggccgtcgaactccttgagcctgtcgagcttctggggcctcttcctcatatgcggcctcgcatgcttcctcgccctgctgattttcttcctccggatattctgccagtacagcagatacagtaaccaggtggaggcgcagttcgctgagccccgggttctgaacaggccggcgaggctaactaccatcaagtcgctgatctctttcgttgataagaaggaggaggaggtgaagaacgctctcaagaagagacccaatggtagtaccggtcagcagcatccaagcactcacaacgcggaagaacagcccacattaccgccgtgaggtctacgtcccgctgcgtaactaatgactgccaaaataatgtggaatcctgctttgaagcgaaagttgtactaacgcacaggcctagttgatgctgctgaaggggtttttcctgtatgtggctttctggctgtgaaaacatagcatcggaatcagcttcagacagactattgtcttc

SEQ ID NO: 54994 - DNA, 442 bp, Zea mays
  Clone ID: MRT4577_150151C.1
attgggacctcgagccggcgagagccaacccttgtaacatggcgttcactggctgcgctcatctcctcctcaccatgtccattctgctgctactctgtcattggaggacacgtgcattcccactaccatcaccttctgcatcgtcaagcgccgcctccccgtcgcctcctccggtgccggcgctaccgcgaggcctaccacggctcataccggtgtggacgtcgctgcccgtgaatccgttcacggcgaaggcggcgtttatccggtactggaaccggaaggtgagcagcaaccggccgcacccgggcttcctcttcgccaaggtggcgccggtctcgggcccggaagcggccacggtctccaacctggcctccgcaaggaaggtcgcctcccggattcacgaattctgcgaagcggcggccctggtctggtcatcgaaccc

SEQ ID NO: 54995 - DNA, 800 bp, Zea mays
  unsure (1)..(800): unsure at all n locations
  Clone ID: MRT4577_150152C.1
cattgggtacctcgaggccggccgggaaacctcccacgacattcttggcagctactctactcaatggcgctgtcctcctccggacacccggcgacgacccgcctgctcttctcgcttctgctcgtgggctcagcggcggcggcggcggcggcgggcttgccggagcgggcggccatcgacagggtcaaccggcgaggcccttccctcggcctcgtcatgtcctacgtcgacgaggccaccgcgctgcaggcctccggctacttccagccttggcgtgccctccctttcgttgacctctacggacggcggtatcacatcggcagcattcggggcgtgaacgtgatatacgcactgacagggcaacgcaggctgaacgccgccgtcacagtacagacgctcatcgacgtcttcagcgtgtccggcattgttcactacggcacggcagggagctgcaacgactccatnctccttcggcgacgtcagtgtccccaggcttgtcgcctacacgggtgctgggacatggaaggtcgaacttgaaagatgcaacgacactttctgcttacccacagctccacggattgtctacgnggctgaaggggtcgtcggctgacatgttcctcgacaacgcgaaatacaggaagttcctttccaagagtttggggtgtctacaatggacgagannagcgcagcggtggtgatgacagcaacgtcgcctgggcgtacctgtgatcgtggttccgaggagtgtctgacttgggctgggagggagcccgacatggtcgtccacagcctgatgaacc

SEQ ID NO: 54996 - DNA, 1636 bp, Zea mays
  Clone ID: MRT4577_150153C.1
attgggacccggcgtccgcgggggcgcggggaaaacctcccacgcacattcttggcagctactctactcaatggcgctgtcctcctccggccacccggcgacgacccgcctgctcttctcgcttctgctcgtgggctcggcggcgggcttgccggagcgggcggccatcgacagggtcaaccggcgaggcccttccctcggcctcgtcatgtcctacgtcgacgaggccaccgcgctgcaggcctccggctacttccagccttggcgtgccctccctttcgttgacctctacggacggcggtatcacatcggcagcattcggggcgtgaacgtgatatacgcactgacagggcaacgcaggctgaacgccgccgtcacagtacagacgctcatcgacgtcttcagcgtgtccggcattgttcactacggcacggcagggagctgcaacgactccatctccttcggcgacgtcagtgtccccaggctcgtcgcctacacgggtgcctggacatggaagaagttcagatcaccgagagagtcatcggcggaattgagcttcggcgaatacaacgtcccagacggaggaggaggggagaatctgctcggatccctcaagtacagaaacgaggagctttactcggccggcaagcccatggaagaggtcttctggctgcctgtgcattcggcatggttcagaactgcagaacagctcacggtggaacttgaaagatgcaacgacactttctgcttacccacagctccacggattgtctacgggctgaaggggtcgtcggctgacatgttcctcgacaacgcggaatacaggaagttccttttccaagagtttggggtgtctacaatggacgaggagagcgcagcggtggtgatgacagcaacgtcgcctggcatacctgtgatcgtgttccgaggagtgtctgacttggctggaggggagccgacatggtcgtccacaagcctgatgaacctggcgtccattaatgcattaaaagtggcggtagagttcatcgctgcagttggcaagcatagttcaaccgcatcagtaaaaagatgatcgccatcctcgtccgttgctgctccaaaataggcctgcggcagtaactggaagttacttatgttcagaatgatgtcaaaccttgtggcttcaagtcataatataatacgtcctctctaataaagcggtaggaagattgacgtacatatccacattactttgctctcagttgcgttgcgtcgatcccctgctttggggatgtgtacccattctcgaggctataaaatggacctctaaatgtatggaacaacacatcaaacattctaagagtacattataacttcgagaatacaaaaaaaaaaaaaaaaaaaaaagcgacagtaactggaagttacttatgttcagaatgatgtcaaaccttgtggcttcaagtcataatataatacgtcctctctaataaagcggtaggaagattgacgtacatatctacattactttgctctcagttgcgttgcgtcgatcccctgctttggggatgtgtacccattctcggggctacaaaatggacctctaaatgtatggaacaacacatcaaacattctaagagtacattataactttgag

SEQ ID NO: 54997 - DNA, 1494 bp, Zea mays
  Clone ID: MRT4577_150154C.1
cgcacattcttggcagctactctactcaatggcgctgtcctcctccggccacccggcgacgacccgcctgctcttctcgcttctgctcgtgggctcggcggcgggcttgccggagcgggcggccatcgacagggtcaaccggcgaggcccttccctcggcctcgtcatgtcctacgtcgacgaggccaccgcgctgcaggcctccggctacttccagccttggcgtgccctccctttcgttgacctctacggacggcggtatcacatcggcagcattcggggcgtgaacgtgatatacgcactgacagggcaacgcagggtacttattaacaaggaacccatctgcttttgcatctgcattttaccttgtgtcgtgtctgtgtatgctctgatctaaccttcctctggtcttccagctgaacgccgccgtcacagtacagacgctcatcgacgtcttcagcgtgtccggcattgttcactacggcacggcagggagctgcaacgactccatctccttcggcgacgtcagtgtccccaggctcgtcgcctacacgggtgcctggacatggaagaagttcagatcaccgagagagtcatcggcggaattgagcttcggcgaatacaacgtcccagacggaggaggaggggagaatctgctcggatccctcaagtacagaaacgaggagctttactcggccggcaagcccatggaagaggtcttctggctgcctgtgcattcggcatggttcagaactgcagaacagctcacggtggtgactagatagactaccggcatcatcagtaacataatactaagtaactgcgtaacagagatactacatgtatgtctgtgcagtaacagtgacattattttctgcaggtggaacttgaaagatgcaacgacactttctgcttacccacagctccacggattgtctacgggctgaaggggtcgtcggctgacatgttcctcgacaacgcggaatacaggaagttccttttccaagagtttggggtgtctacaatggacgaggagagcgcagcggtggtgatggtcagctcagctcccttactcatacagtcatacttgcactacgtacatcccgaccatgtatgttacttactacttactagtaagataaatttagcgctcaactctgatgatcagacagcaacgtcgcctggcatacctgtgatcgtgttccgaggagtgtctgacttggctggaggggagccgacatggtcgtccacaagcctgatgaacctggcgtccattaatgcattaaaagtggcggtagagttcatcgctgcagttggcaagcatagttcaaccgcatcagtaaaaagatgatcgccatcctcgtccgttgctgctccaaaataggcctgcggcagtaactggaagttacttatgttcagaatgatgtcaaaccttgtggcttcaagtcataatataatacgtcctctctaataaagcggtaggaagattgacgt

SEQ ID NO: 54998 - DNA, 842 bp, Zea mays
  Clone ID: MRT4577_150155C.1
cattgggtacctcgaggccggccggggcctttctctcatttcccccaatcggaccaaaccctaggagccgtagatttcgatttgaatcggaaacctggcatggcgatgccagatctcacagccaccgtgatccaaatctccgggccgcgcggcgagctaccggtcctcggtgctggccgccgccgctgcgtctggcagttcaacttccgcgagttcgacgacgcgcgcgacatcttcgcgtccgactccatcgagctgctccgtcgcagcggcatcgacctccgcctcaacgccgagcgcggggtcgatgctcgccgcttcgccgagctcctcatgtcttccggcgtcgtgctcaatgactccgtatactgggttaccttccacgcaggatacgacttcgggtacctactgaagatcctcacctgcaattgcctcccagacacacaagccgggttctttaaacttatgaagatatatttcccgactgtgtatgacatcaagcatctcatgaagttctgcaacagcctgcacggtggactgaacaagcttgctgagctacttgatgtggagcgtgttggggagtcccatcaagctgggtccgatagcttggtcacgtcctgtgcattctggaagctcaaggattcattcttcacgggctcaacagagaaatatgcaggtgtgctgtatgggcttaatgcagagattgatgttagtgcacattgaggggtgcaattctctttggattttagctttgtgaatgggttgatttaggacagaaagggtgacaagtgtccaggagggctcagtgaaagattaagtctgtaggttaagtctgtctcact

SEQ ID NO: 54999 - DNA, 460 bp, Zea mays
  Clone ID: MRT4577_150156C.1
ccggccagggttgtcctcagtccatcacccaattcgtcaacccaggtctcgtcttataatacacaatggctggtatcgcttactacaccattgccggcaagcaggtcgccggccactacctggccatggcctggttgggaaccctcttcgccggtgtccagtacgccacctctggaagctcagctaagcctaccgctaccgctactcctcccatcaacgcctccagctccgacgaggccagcttcatccaggacttccttaaccagcaggacaagaagaactagacggttgcatcaatgacaatggtcatgcggttatttggatgcggtgtacgtttataagccatggaagcataagcggtccatcgagccggacagtcaaattcagataccaacaaaagcctgtttcgccaatcgtggcatgacgaaaaaacaaaaaaaaaaaaaaaaaacccgcggcc

SEQ ID NO: 55000 - DNA, 1222 bp, Zea mays
  Clone ID: MRT4577_150157C.1
aaaagatccttgtttggctgttacgactctgttctgcctgtgattgatttctgctattttcccttgggaaaattaaaatgtattaggaacacggtgttcccaaactagctcttaaaaagcggcgcgcccgggcgtccgtacctgagacgtggcggccgtctcctccacctcaaccgccgcctcctacttctccccgcagccgcagctgccgatctccaccgccgaccctgccgccagcaaaagtaggttgatgcggcagccacggcggagcagcagcttcgtgatggtggaggcgtcctctgccagcggcagcgacggcggggtggccaggacgaagagcctcacggaggacgacctggaggagctcaagggctgcctcgacctcggcttcggattcgcgtacagcgagatacccgagctctgcgggacgctgcccgcgctcgaactctgctactccatgacccggaggttcctcgacgagcagaaggcgccggggcaggaggaggagttggagcctgcgtcgccgccgctccccaattggaggatctctggcccgggtgacgatccagaagaagtgaaggcgaggttgaagtattgggctcaagctgttgcatgcactgtcaagctctgcagctaaactaaaggtcggatagaggctgaagaatctggttatatggttttgggatacagggagcggaagggggtgcttctgctctctggcatggaagcgacatgagtgatctcatctgcttctacaaaaaacttgggaagggggaggaaccatgatacggaacagcgacagacctcgattcagaatttgagatccatggtctgagcttctacgaaagggtccggaagccttgccattcctcagggtgggtggtccgcatagtgcagcgtttccaaatgcatgacctgctggttctttttgctgttttcttgtaatgatcaataggtgctctaattgtcgcactcttgtaataatgtactgaatcgaattttgagttttggccttttgggtactgatccaagggttgattagttccaacattggtttattttgtgctactctgatattgccatgtgcattatgctgttctacacgttcgtagaagttaatagcgcgtttggtatcagtaaaaaagtaatctatcaccttcttactcacttttgtttgatttgtaaaattgaataagttgatctatcatcatatcattctcat

SEQ ID NO: 55001 - DNA, 340 bp, Zea mays
  Clone ID: MRT4577_150158C.1
cactcccctaccgccacccctaaaactagccccattcccttaccagcgtccgatcacactgctgggtcccacgcttggatggattccgtcggtacaaatcggcccccgctgcgccccgttgccgccgcagctactcgacgcagcgcgctcctgcgcccccctagccacctcgggctcggcaatcgttttgcggagactaagcttgggatcgcgtcagggtgtggaggaggaggagggtattttggaaaggtacagggatttgatgccttgcggagtaccacgacgaaagttcagagcgggaaggcggggaggagtgtgaccaaggaaatgggacacactt

SEQ ID NO: 55002 - DNA, 270 bp, Zea mays
  Clone ID: MRT4577_150159C.1
attgtctggacaagattattgtattttctcctccatttaaatccacttagatataattgccttgcctagttttgacatccatgcaatggaaaactggggactaatgatatttgatgaatcaggattgttgttggaaccaaaagatcaactgacagaaaaaaagactctgatctcctatgttgtctcccacgagattggacaccagtcatgtggtaaaatgttctttttatttcacttgaaggtattctccaggtgcgctaccaaaatagc

SEQ ID NO: 55003 - DNA, 793 bp, Zea mays
  unsure (1)..(793): unsure at all n locations
  Clone ID: MRT4577_15015C.1
actcctatgggcgattgggttcctcgaggccggccgggccgggacacatttccgtttaattgtttgatacatttgtatctcaataccttatctcttctttcagttctatttcatcctcaaaaaccacattcacaatggctgctcctattacctcaaggacggagactctccagaagtatctcaagcttgatcagaagggtatgatcatggctgagtacgtctgggttgatgctgagggtggcactcgatccaagtcccgaactctccccgagaaggactacaagcccgaggaccttcctgtctggaacttcgacggttcatccacaaaacaggcccctggcgagaactctgatgtctacctccgaccctgcgccgtctaccccgatcccttccgtggatctcccaacatcattgtcctggctgagtgttacgactcagatggcactcccaacaagtacaacttccgtcatgactgtgtgaaggtcatgaagacatacgccgacgaggagccttggttcggtctcgagcaggagtacactcttctcggatctgatgacagaccttatggctggcccgctggtggtttccctgctccccaaggcgagtactactgtggtgttggaactggcaaggtcgtccagcgagatatcgttgaggcccactacnaggcctgcttatacgccggtatccagatttctggaccaatgccgaggtctgcctgcccagtggaagtaccagntgggtcctgcactggcatcgagatggtgaccagctctgggttctcgcttcttcc

SEQ ID NO: 55004 - DNA, 441 bp, Zea mays
  Clone ID: MRT4577_150160C.1
aaaaaaaaaaaaaaaaaaaaaaaaaaaaaaaaaaaaaaaaaaaaaaaaaaaaaaaaaaaaaaggaaagggaaataaaaaagggagggaaattctataaaaaaaaaaaaaaaaaaaaaaaagggggcggccttttaaaaggttccagacttgggaacccttgcttgcaacccttttgcttttttttggggcaccttaaattaaattcatgggccgtgtttttaaaaaggcgggcttggaaaacccctgccttccccaaactaatttgctttgcaaaaaatcccctttttgcaaggtggcataaaacaaaaaaggcccgaccgtttcgcccttccaaacagttgcccatcctaaatggcaaatgggcccccccttataccggccaattaacttggggggggggggggtttacccccagtgggaccctttaatttgcaagcccc

SEQ ID NO: 55005 - DNA, 832 bp, Zea mays
  Clone ID: MRT4577_150161C.1
tcgaattgtcgttcatggaggttccccacttcgcgttacgctgcgagaagattcagcagcacgtcgacgttgctgctctccggggcgaggagcacctagtctccctcgagacaatgaagtcgaaggtcgaggcggggaacaccatggcggcgatggccgcggccgcctcgccactcccgtccctactcgctgtggggaatctgacgccgtcctccgtcgcgcaaccgcatccgcaagctggggcggtggggtcgtccgagtcggagcttgcggcgccttcctccgtccacgacgactctgtcgcgctgatcgccgtctccggcagatgcgactacgcacgcgccaacgagatgaccagcgcccagatcgacgccatggcacaggacgagacagacgagattgccaacaccgtggagcagctgacgggcctgggcgtggagaaggtggtggcaactgcgctacccccgattggctgcacgccatggctatcgaggtccaacaactacggctcctgcagcaccctcgacacccgtggatcaggtggttgccgtgtacaaatttagggacccaaagacctccgaccaggagatgctcgagagcatctgcggcgtgctcatgcccttgaagctccaagctaaggtatccaggcccatggacatcatcatcaattcactctacatcaacaaggatatcatcgtcgctttcgtccatatctactcgttctgatgcctcggagaggacggcaatcctttcccccgtgatctcaacttattggtggaaatgaaggctaccggtctggagctaagttggacaaagagaagagatgctctca

SEQ ID NO: 55006 - DNA, 1743 bp, Zea mays
  Clone ID: MRT4577_150163C.1
ggtagggacctcgagccggccgggactgaccaccttagggtttcagcgtacctaactagttgctacctagcctcgaccaggtggagcaatgggctccacggcggcggcgccctgccacatcgtggccgtgccgtacccgggccgtggtcacgtcaacgcgatgctgaacctatgccgcctcctggcagctcgagacggcgtcaccatcaccatcatcgtgaccgaggagtggctcagcctcctcggcgccccggcggcgctgccggacctcggcctgcgcgttcgctttgaggccattccaaacgtgatcccctccgagcacggccgcgccaacgacatggtcggcttcatggaggccgtgtacaccaagatggcgtcgccgttcgagcagcttctcgacaggctcgcgccgccggcgcccgcggctattgtggccgacatgttcgtgccgtggaccgtaggcgtcggcgagcggaggggcgtgcctgtgtgcatcatgtgcccgattagcgccaccatgttcgcggtgcagtacaacttccacctgctaccacccgcggcggccggcggcggcgcgtctccggaatatcactggttcttgttttgttgaaaactacattcctggcacgaaatcaatcaggttcgccgatcttgcgcctacacacaccgatgcgttacttctagacaaaatccttgaagcccactcctctgtaaagaaagcacaatgtatcgtcttcaccaccttccaagagctcgagagcgacgccatcggcgctatgaggcaaaactgcccagtgtacgcagttgggccctgcgtccccttcatggcactgcaagagcacaaggccagcccagacggtgacgactacatggcgtggctggacgcacagcccgcgggctcggtgatctacgtctcgctcggcagcttcctctcggtgtccgccgcccagttcgacgagatcgccgctggcctggccgagagcaaggccaggtttctgtgggtgctccgcgacgccgacgcatgctcccgcgtgcgaggcctgatccgcgatcccgacgccggcctcatcgtgccatggacgaaccagctgagggtgctgtgccacccttcggtcggggggttcttcacccactgcggcatgaactcgacgctcgaggcggtgtacgccggcgtgcccatgctcaccctgcccatcgcgttcgaccagccgaccaatagccggctcgtcaccgaggtgtggaagaatggcattggcctcagggacatggcccgcgccgacggcgtcatcgggagaggtgagatagcctcggccgtggacaggctgatgcgccctgacgcggcggagttccaggacatgaggaagcgagtgacactgtggaaggacgcggctcggactgcgtctgaagagggtggatcctcgtggaaagatgttacgtctttcatcaacttcgtttcacgttgagatctccgaatgtttacggagtcagctgtagtgaattgtgatcgattctcacggagttagtgtgatatctgaatgttagcagaatctttcggcaacaataaacatgctgctgcatccaattgaaagtagctcttttaattgttcatatcaaaacgcagaagattcggccggacgcgtgggtccaactataatggggtttccaaaaacggtttccgccccaaaaaaaaaaaaaaaaaaaaaaaaaaaaaaaaaaaaaaaaaaaaaaaaaaaaaaaccaaaa

SEQ ID NO: 55007 - DNA, 327 bp, Zea mays
  Clone ID: MRT4577_150164C.1
aggctacgagaggctcgttgcgcagtagcagggagtacacgcactgacgagtcgagcgcgtcacacaggcaacgacgagcacgcgccagctcattgaccatcgcgtggcattaggacgatcgtgcagagacatcggagcacacactggagcgcagcggcatgaagcatcgacgccggggtaagacgacctcgcgctgggagaatggcttcatcgaaggatgcatcgcggcgctctgctgctgctggatatgcgagatgtactgcgactaggcagctcccgcttctctcggtcgacaagctttgaagctattgacaggaacggagaga

SEQ ID NO: 55008 - DNA, 1027 bp, Zea mays
  Clone ID: MRT4577_150165C.1
ggcgtccgggaagcacgagaggtggagggttggcggccaggtggtggagaaggagcgacggcgggtggtggcggagagcgaggccggctcggtctcggccgtggacgtcgccgacgcggcgggcacggcgtaccggctgcacttcatcaccatggaccccggggcgctgttcctgcccgtgcagctgcatgccgacatggtgttctacgttcacagcgggcggggcaaggtgacttccatagaagaagagagcagcgaacagagctccctggaggtggagcgaggagacgtatacaactttgagcaggggagcatcctgtacatccagagctaccccaacgccagtagacagcgtcttcggatctacgctatcttcactagcgaaggcatcaacgccgatgacccctcgaagcccaaggtggaagcttactccagcgtcagcaatctggtcaaagggttcgagacagacgttcttcgcctcggatttggggtccaacccgaggtggtagaagcgatcaagtctgccaagacaccgccaccgatcatagcctacaacccagaggaggagaagggggacaagaaacccggctggaccgaggacatcgtcgacgctctgttgggcctgcgcgatccggaggagttccttaacaagaagaagaagaaggacaagcacaaggacaagaagtccaagagcaaggcgttcaacttctactccggaaagccagacgtccagaactgctacgggtggagccggatgatgactagcaaggacctcgacgcgctgcacggatccagcattggcatgttcatggtgaacctgaccacgggttcgatgatggggcctcactggaaccccaaggcgacggagatcgccatcgtgacagagggttcaggaatcgtgcagacggtgtgcccgagcagcagcagcagcagcagcagcccgtcgggcgggagcagtggagaccaccaccacggtcacaagcggcgcggcgggccgggaggccgcggcgatgagggcgaaggcgaa

SEQ ID NO: 55009 - DNA, 625 bp, Zea mays
  unsure (1)..(625): unsure at all n locations
  Clone ID: MRT4577_150166C.1
accggcccgttttccccgggtttttccaccccgccgtggctcnccgcaggcaggaggaccggggagggcgttaggaagcagcccgcccccacacagagagagggancaagacggcgccgccccggccgcccgccacccccccgccccccgcagaggccaccccagccagggacaccgcccacgangcccgcccgccagaagcgaagganacccagcacccgaacaacagcccggggccccaccagacgccgcaccaccagcagagcccccgccccccggcgccgccgcccgcccaccaccccaaccccgcggagcccgccacgacggcccgcgcaccgccgcccccgccgagcgcacgcccaagacccccccccacccgccccccccgccagacccgagccgcccgcgccccccacaccgccccccccccaaacccaaccaccccccccccccccccccgccgcccggcaccacccccgcccgcccaccaccccccccccgggcccccccaccgccccaccccacaagcgccggcccgggccccaccaccagcccaaccccccccccccaccgaccccccggcccccccccacccccgacgccccccacccacacccccgccccc

SEQ ID NO: 55010 - DNA, 233 bp, Zea mays
  Clone ID: MRT4577_150167C.1
tattattttttttttttattaatatttttatggggaaatttaaaaacaagtgggggaataacccacaacttaagccaagtaatacacgtacaccctttactaaaccaaatggaaacaaattattttcaactaaacaccccataaataacacgcgatggataaatcagagcacacctactcacggccccaacacgccctttaccaacaatgaccgtctaattgaaaccaccttt

SEQ ID NO: 55011 - DNA, 124 bp, Zea mays
  unsure (1)..(124): unsure at all n locations
  Clone ID: MRT4577_150168C.1
tttctgttacacaagacatgcctcgtctattgcaccaacctttctatcgggggcagaattttcagctgnctcacccttatttctaaatatccgtacaacttcccttatcatgtcccttcgtttc

SEQ ID NO: 55012 - DNA, 490 bp, Zea mays
  Clone ID: MRT4577_150169C.1
ggatgacatacaaaaagacaatatttatttcactcaagctttcctataagaagttaaacaaaatgagccctagttgaaggcattaccaaaaatattgttaacattgttttgcgtatcccttcagtgcccagataaaggaaaaacttatctgaatgaaagaataagaatgaccatccttacagtgggtttacttaggtatgtggagaaaaaaaatccatacagtttaggcataacatagcaaatgatcctacgagtttcccacaggggaaggaaattccactgatgtattcagattcccaagagctcccaaagcctgggaatcacttctcagcaattatagaacagccatagcataggtattcacataactcactgcccttttccctcaactatcttgcagcttaaagcaagagaatggaaacaaaatgcaatctccccactcccgggctgtgactgtcaccatctgcagtcccctggctaatcgtaatac

SEQ ID NO: 55013 - DNA, 1711 bp, Zea mays
  Clone ID: MRT4577_15016C.1
ggttcggccgggaccacccatcccgaaagagccccagcccgcagggagtcaagtagtcaaccgttctgcccgctccccctcacacaaaaggcaaaccacccgccaccgtcggcagacggcaactactttcatttcgtcgtcgtcgcccgcccccacccgctcctccactccaccaccaccggacagatacggatgtctccgcccgcacatccacttcacaaacgaaaacccgcagcaaacgctagcagcggcggcgccggcagttggtagcctagctgcgaccgagacacggcgggtgacctgcccccgccgcagtcggggtgtatgtattaccaccgccagaattccaggagacgaggatcgaggaggcaccgatccgtagcggcgatatcgtagagccgctggtctcacgccgcaccgagacaatggcagaccagttagggtcttacactattagatcccatggaatgatattggcaaggttgcacatgtatgactggataatacttctcctccttgctgtcatagacgggctgttgaatataattgaaccatttcaccgttttgttgggaaagacatgatgactgacttgagatatcctatgaagggcaatacagtgccattttgggctgttccactgattggaattatactgccttgggccatctttgttgggatttacttcaaaaagaagaatttttatgatttgcaccatggcatactggggattctatactcagtgctgataactgcagtgattactgatgcaattaaggatggtgttggacggcctcgtccagattttttctggcgctgtttccctaatggaaatgatgtttatgataacattactactggtgttatatgcaatggagtgaagagcgtaatcaaggaaggccacaagagctttcccagtggacacagttcatggtcttttgctggtctaggcttccttgcatggtacttagctgggaaactcacagcctttgaccgcaaagggcatattgcgaagctatgcattgtgttcctgcctctccttactgccgcacttgtggctgtttctcgagtggacgactactggcatcattggcaagatgtatttgcagggggtcttataggtcttacagttgcttcgttttgctacctacagtttttcccatatcctttcgatggcgatgctttgtggcctcacgcatacgcggtccggttagccgaggaggggaacagcagaaatgcgaactcatacagcgtgagaccaaccgagatcgaaacagtcgatattcctgggcacggtgggatcatcaccctaagagatactctaaacgatgtggagtctggcagtgccaggagattgtgagatgggtctgcaggtgtggagattgatgtctcagataccatgggagttgcttgcatatgtgtacaggtagatctattgtagagctgttgactgctgccaccgtgataggggagggttgtttagacgggcctggcagtaaatttacttggtagggtgctgtttcttctgagaacctttggcttttgtttgtatatatgctcttatcaaagtgttgagttcagagttgtggttaaagtttgtttgctgacactctttgtaaccagtttggtcgctgcattcagcaactatgatctgatcagatgttgcccagtctactgttgttcttatattaagcgtgaaattcatttgtcacc

SEQ ID NO: 55014 - DNA, 407 bp, Zea mays
  Clone ID: MRT4577_150170C.1
aacgctaataagttacttgcgttaaaaaaagtgttacaaaatatttaacgtagcaactagcaagcatgcatccaagaaacaagaagaagaagaagaagaaaaactcctaggggtgttgagcgcaaaccgatcgagtccaaggaacaatagaaaacagtacccatagggtgggcgttattactaataatcattgggttttgattggaatgggaccaccgtctctgtgcgaaaaggccgaacgcgggccggcttttgcagagggtcggattcccgcagtgggccaaggaagggccatatgaccaggtttccttcttttttctggatagggttttttttttcctttcaacgcaaggatccttttttacggtgaggttcgagtattgtgttactttttggacatttggttt

SEQ ID NO: 55015 - DNA, 266 bp, Zea mays
  Clone ID: MRT4577_150171C.1
cagggcacagcttgtaggggaggggctcctttccataaatccttgatgattgagaacacccattattccttttgccgaccccaagagttttaggagttgtagttaatcatcaagagaatttggggcttccaagttgttcgggccatggacctgaaacctgaagggttgactttacccatttggtgtttagtgttgagcatctgtcaccctttagatctctgaagccacaaataggatgcttgggaagactcctagctgtccttttt

SEQ ID NO: 55016 - DNA, 396 bp, Zea mays
  unsure (1)..(396): unsure at all n locations
  Clone ID: MRT4577_150172C.1
cggnaccgcgtgggcaagnactnntctatatattgtnnagcaatctttgtaaagncgcgaactaataataataatggtacagcactaatataacagtgatcgcaagcattatcataacgcactagacatgtcgtaggataactagaatcattactataagtagtacacactcaatattgcatattacacatgcgcgcgatcgatattattacaagcagtcctcgacttgtgggaagaactcctgnngtcgttaccccaaactgtacattcgccttcgccagcacactcgcccccttttcgcgtcagctgcgcgggtaatagcgtaaccaggctcccgcagccgactcgccctgtccctaacagtttgctgcagctcttgatatggcgaaatgggaa

SEQ ID NO: 55017 - DNA, 360 bp, Zea mays
  Clone ID: MRT4577_150173C.1
aaaaggaaaaacaaggggaaaggggaaaccccaaaaaaggagtttttatttgggggggaaaaaaatggaaaaaacacgttgggacgggccccggaaattattccatttggggggggaagggacccccaataaaacatgcaaaaaaaaaacaagagctagcttatgggggggtgcctgcttgaaaaaagggggacggacggaggaacatggaaggacccatcggctgggccggtggggaaaaatcaaggggatcttgcacccccaattttcggggaagaaagcggggaatttgtacttgggggcgcccttggccggggaaaaggggacccaatttttggaggggggggggcacttggggag

SEQ ID NO: 55018 - DNA, 286 bp, Zea mays
  Clone ID: MRT4577_150174C.1
attcggctcgaggaagccctaccaaccttgttttcctaatacctactggggctggtaagtgaggtgtaaaccttgctatgtgctaaccgactggtgcttttcgatccaagttgcaaccctgcccaagctttgcaggctcaagacagatcatttccttatggacagacaccctttgtgacaaaaatgtgtcttcttggttcccttataatatgaattgctatatgttatgcggttgtctataaacagcattttttcactttatacaacttaggagaggattaaaggc

SEQ ID NO: 55019 - DNA, 401 bp, Zea mays
  Clone ID: MRT4577_150175C.1
actcatgcggaagaagagggaggagaggggacggtccgcgaatcctgcctagccttcgccgccttcctgcgctcgagcggctcgccgaggtgagcgccgggagctcgccctcagctctcgctctatgctgctctaacttactggagagggggactagaagttcgagcgcctttttttggacttgtacggaagattgcttgcttgcttgcttgttgatgttgctcctagcgatttggtgactgcgcgagggacccccgatcacgcggtacgtagaggaggttttgctccgcgtgatcgttagtttggagcctggaagagccaatctcagactacgggtctcgcggcttgctctggggccgttggagtgggtgggatatcgggtgcgtcttgtgggtgcatgc

SEQ ID NO: 55020 - DNA, 739 bp, Zea mays
  unsure (1)..(739): unsure at all n locations
  Clone ID: MRT4577_150176C.1
ctcgaagcncggcgggagcgcaactcacacaaactccggctcctgtcctgctctcgctcatacgcccccctgccgctcgactccccttggcccctccaatgccgccacccatggcactgctgccgctctcctccacatccgagaccaccacactgccgaccttccgatcctgaccgacacgacagaaagaatgacattacactaaaaaaaaaaaaaaaaaaaaaaaaaaaaaaaaanaaaaaaaaaaaaaaaanananaaaaaaaananaanaannaaaaaaaaaaaaaaaaaaaaaaaaaaanaaaaaaaaaaaaaaaaaaaaaaaaaaaaaaaaaaaaaaaaaaaaaaaannaanaaaaaaaaaaaaaanaaaaaaaaaaaaaannaaaaataaaaaaaaaaaaaaaaaaaaaaaaaaaaaaataataataaaaaataaaaaaaaaaaaaaaaaaaaaaaaaaaaaacaaaaacctaaaataaaaaaaaaaaaaaaaaaaaaaaaaaaaaataaaaaaaaaaaaaaaaaaaaaaaaaaaaaaaaanaaacacaaaaaaaaaaaacataaaaaaaaaaaaaaacaaaaaaaaaaaaaaaacaaaataaaaaaaaaaaaaaataaaaagacaaaaaaaaaaaaaaaaagaaaaaaaaaaaaaaataaaaaaaaaaaaaataaaaaaaaaaaaaaaatatataaaaaaaaaaaaaaaaaaaaaaataaaaancaacacac

SEQ ID NO: 55021 - DNA, 858 bp, Zea mays
  unsure (1)..(858): unsure at all n locations
  Clone ID: MRT4577_150177C.1
agcctcgtagccctctcgtctgaatccccaaattcgaatcagacgatacatgtagctctcttcttcttcccaatccatcccccccgcgcgcctcttcctaccccgcgcgtgctctggcgaatctgtagccccgtatctcggcgggggcggcggcaatggcgaaccccctagccgggctgcaggaccacctcaagcacgcgcgcgactacgcgctcgagggcctctacgacacctccatcatcttcttcgacggcgccatcgcgcagatcaacaagcatctagctaatttagacgacacctttatccgcacaaaatggatgaactgtaagaaagctataagtgaagaggtagagattgtgaggcagctcgatgcccaattgaagtcatttaaagaagcccctgggacaatgcggtcctcgtcgcctcctattcgctctaataataaatcatttctgttccaaccattggacgagtatccaacatcatcgccatcaacctttgacgaccctgatgtgtgggcacctccaagagatacaaatacaccaaaccgaaggtcagcaagaggccaatctagtgcaagaaaatcctcccaagatggagcttgggcacggggtccatcaaagactggaacacctagccgtggtgcaaaacccagcggaagtaaagcaaactctgcggtaagatcatcaactgcttcaagcactggcgggaggaaaggaaaatcaagttcgagcaaggctgattcagcgagcagcgatgctgaagaaggtaagtccaagaaggcacagtatgaaagggaccnggatggngacttagctgccatgccttgaaagagatgttctagactctaccccagga

SEQ ID NO: 55022 - DNA, 119 bp, Zea mays
  Clone ID: MRT4577_150178C.1
cgggaattcctctgtatcaagttccgacactggggcatctccattgtctgcttctcgaatccatggttctctgaagacagaggtgctagcaacagaggcataaattcagcattcagctg

SEQ ID NO: 55023 - DNA, 2279 bp, Zea mays
  Clone ID: MRT4577_150179C.1
gaaagcctctggcaaatcgaaggaaatgatagaaaaagaaatcgtggagcttgttgatgcgcacagtggctttgagaaaaaaaattagcagtggtagggaaaggatagcacggagaagagcaaatgctggtgatgctacagataagcacaccaacgaacccagggagaattctaatgcttcattgcagaaacatcatggaaacaggggtaaatttgctgattcgagtttgtatgaactttcggtaatgtgtgtcaagcagtgccatgctgataactacaacaatgttagtcaacattctagccaaactaaattgaaccagagctccaatttgacatcctttgtactgaaagcctttcttgaattgttgaaatcacttgcatcaaagcacagtagggacttcacaataaagctgcatggagattttaaaaagttaagccagccaataatgcagctagtatggtgttttctgttagacccaattcaagaaaatggtggaagcaagaagaacatgacccaaggaaagaaaaacactgagtgcaaaaaggatcagttatatttggctctgacatgcctaaaaaaattccttgagccaagtgtttcaggagaacactctagtgatatcattgattttctaatatctttggctccacctaatatagaggatacaatgggtactggggatcttgacaataatgataccactatggttgaagatagaagcacaagaaatgtccatgtgattttgaacatactgaagacgttatatgccagacttcttacccaatcagttttacgtgaatctgaggctgtaattgaattgattctgggtatttcaagaaaactgcaacttgaacgaaggcatcttgttggaaaatgggctacagatctatgtagaaagaaaaccatgcaaagtcctagaatggcacgagagatgttaaaactagctatacatcttacaccagctccagatgacatgattcttgtttatgaggtgtctactgagttgatgaatttaatgacctctggagatgatggagattcttctgatacatttcatatcattaactgtaaaacaaagagctcactcgctgctctctctcttcaaatggttgagtcatctcttactgaattggattggggctttggaaagcttaaagcaatgcttacattaggttatgattgtgctaacattgatgaagatcaaccagcagatgaaataatgctaaggttggctttggagaaagcactctactcgagatcaacattagtagttcaagtgctctcttcctttgcacatatgagccctatggatactcaagcagaacattttctgaaattgactgtcaagttctacaagcttttaactcgcatgtcaaagtcccagattgcacctaaaggctacagacaatccattccaagcctcaagtttcagaaactggcagaagtaacttgcaaaatgctcaccgctcccctttatgattttgtgtttcaacagaatcagcaaatacccataaagggaaacctcgccaaaattagaagagaaaccaaatgtatccctgatcttatttttcagattgaggattatgagaagtatttaatacagctaagcaaactaactaaggtaaaccttttgaggcatgccaaacgcagtgtagcaagagacttccagataaaagataaatctgggggacaacaggaagatgatcacattccagacaatgctgcagcatctgataacgaggctgataaggacgcaatgggtccaaacgcaccagttgaatcatgtgctgacgatgctcaaaaatcatacgctgacgaaaatgcatcatgtgaaagtgggcatgatgaggatgcaggaggtccaaacactccagcagaagcagatgctgatgaaatcattaggtctagcattccatatggtagtccagtccaggagtctgaatctgatagagaagaggaagaattattagcacggacgaagagagctaagacaaaacaagttgtgcaggattctgatgaggatgcagatgagtaggtttttaaacattatcaatagttcaattttcgaagcgtctattgtgggcaacatcatgccaaggtgtatatacataagtttttatgggttatcttgctgattatagacgatgaacacatgagatgtaaaatatatggttttgcaaaaattcttgtgggccatcatgttgattatagaccatgcacagaacatatgtaaaatactttattgtaaattataagttattctaattttctttaagtg

SEQ ID NO: 55024 - DNA, 1329 bp, Zea mays
  Clone ID: MRT4577_15017C.1
gggcgacgcgatcaaatgcacttctcggctgcattttccacaccgcgaaaggagcccatcactcggaaaccgtaagccgtgcaaacaacaggcgacgcaccggcgccgcgcgcgcacgcctatttctagctcgatcgtgtcctctcgccgctccggagtcctcaatccacacgcttgggcgagcaagccttgttccggaagcgcgcggacgacatgctgatgctgcacccgaggttggtgtcgtcgagcgccgtggacgacgaggaccactgcgagagctgcgcctgctactgcgccatggtgtcctgcgtctcgctgctgctcttcatcgtgctggctgccgcggtcagcatcccgagggcctgcgccatcgccggcgtcatgctgctcctgctggggctcgtcggctggctcgtgcccacggggaatggagccggtccggcggcgcagcagcagcagcagcagggccaggctgctgccgatcctggggcgcggcggctggtggtgcaccaccggtgcgcgtgcgggctaacggacgccgctatcgccgcgctgccggcggcgttcacgtactacgaggcgcccgcggtgaagaatggagtggggagcgaggacgacaagcagccgcgcggcagctccttgctgtgcgcggtttgcctggacgacgtgcggggcggcgagatggtgcggcagctgccggcgtgccgccacctgtttcacgtcgactgcgtcgacgcctggttgcgcgctcaccggacgtgcccgctctgccgctgccagctctccccgaggaacgacgtcagcacaaagcgggccgccgcggtcgtcggggagtcatccatcgacgcgttgccgccggtgtgagtgttactcactcatcaatcctccgaagctggccggcgcattggtaaactgtattggaccagattcttcatttcttaacaccacataataaagaaaacttcggcacaatttcgagggcgcgcagcagacgtgtgtctctactctctagtctctaggcatgagcatgagcctcaacatcgatcgagtggttccaaccacatcgccagacccgacgcttccagcagtcgcgaaagaagtagcatctcgccgatggggacgggtaccagaccgtacggaccagggagtctacaacttgacacgcttcagttctgccgctaccagacaggcaatcgagtctatcatgtcagtgccagcttttgtactgtatgctccgttgcaccacgagggtctgatgaatgttgctgccagttacattttcgtgagttgtaaaaccagaacaaatacccgtgtttcttaggaaactgt

SEQ ID NO: 55025 - DNA, 738 bp, Zea mays
  unsure (1)..(738): unsure at all n locations
  Clone ID: MRT4577_150180C.1
atctcccccggccggttccgttctcccgtccccttccccaccccagcgtcgtcatgttcgtcgggttgcagggttcntggaaaaactaccacatgtaccaaatacgcatattatcatcagcgcaagggatttaaaccgtctctggtttgtgccgatacattccgagctggtgcttttgatcagttgaagcagaatgcaaccaaggcaaagatacctttttacggaagctacatggagtcagatcctgtgaaaattgctgttgagggtctggaaaggttcaggaaagaaaattctgatctcatcattattgacacaagtggacgccataagcaagaggctgcactcttcgaagaaatgcgtcaagttgcagaagcaacgaaaccagacctggtgatatttgtgatggatggcagtattggtcaggctgcgtttgatcaggcacaagcatttaaacaaagtgcttctgttggtgctgtcatcgtaacgaaattggatggtcatgcaaaaggaggcggtgcacttagcgcggttgcagctacaaaaagtccagtgatatttattggaactggagaacacattgatgaatttgagatttttgatgtgaaaccatttgtcagccgtctgctaggaatgggagacttgtttgacttaatggacaagaacaagatgctatgcctggtggtcaaccagcctgagattcttgaaaagctggatggaggaaccattcctctcaaattt

SEQ ID NO: 55026 - DNA, 296 bp, Zea mays
  Clone ID: MRT4577_150181C.1
tgagtcagactggtttcttgtagttgaaatggcaacgagaatacgtccattcaagaaatcagtttgagttcgtggctactaccattggagtgcttttgtggacttgtgtgcactgccagtatatgtaggtgctttaactgtgacgtgttcacaaagcaaaattggatgttgaactaatgcgtgcatgtagcatgtgtttggcgtttaccttccatcttcatgttttcagttttgtaactgaggagagaagtcactttgaatttctggtcactcgttatgcggtgcatcttgtgtct

SEQ ID NO: 55027 - DNA, 811 bp, Zea mays
  Clone ID: MRT4577_150182C.1
ccgcacccacccgactgcgccgccgccctcgtctcctcccacctctcgcccctccggccggatcggcgaaacctccacccccgcctcgcgccgcctccccgcgccgcccgcccgctcccacctcgccgtcaccaagcaacagcatcagcggtccgcgtccgcgcgcctggctagccccagcctagggcttccgcgcaggaacgtaaattttactacagacttgaagatgtactccgctccaggcaacaactctttggctcttgcagccccacggccaggaatggagctgggcaacgtgcagcaacatcctaaccaggcttttggccttgggcctggtgggaaacaacgctcatccagtctggaggcgccgataatgctactcacaggccaccagagcgctgtctactgcatgaagttcaaccctgctggaactgtgatagcatcgggctcccatgacaaggatatcttcctgtggtatgtccatggtgagtgtaagaactacatggtactgagagggcacaagaatgctatccttgatcttcactggaccactgatgggagccagataatctctgcaagccctgacaagactttgagggcttgggatgttgaaactggcaagcaggttaagaagatggctgagcactcatcctttgtcaactcatgttgcccgtcacgtaagtggccacctcttgttgtgagtggatcggacgacggtacagcaaagctctgggacctgccgtagagaggggctatccaaacactttcagacaaagttccagattactgctgggagcttctcagaggctgc

SEQ ID NO: 55028 - DNA, 701 bp, Zea mays
  Clone ID: MRT4577_150183C.1
ctgcttgtggccgtcctcttggtgggcgtggcctctcgatgctcgggcagtaggggcctgcagggcgatcacgttgctgaacagaagttcggtggcggtggctatggaggtggcggtgggtacggaggctactctggcaccggcacctgcgactactggaagagccacccggacgccatcatctcgtgcatcgggtcgctgggcagcatcctcggctccggacgcgtggggtgcagcgccttcttcgggagcaagctgcagacgctgcaggacgcgctgtgcaacacccgcaccgactgctacggcgacctcctccgcgagggcgccgcggcctacctcaactccatcgccgccgagaagtacgcctacagcacgcagcaggttcaggactgcatcgccgtcgcgcaggccgccatgttcaagaaggccaactacgcctgcagctactagctaggcctcgcgcatcatcagcgtataacgtacgcacgcaatgttcgttatataattccatacgtatatgggtgtgcaaggtccagaccgaccagctgtatgtcttcatcgttgccttcgtttctgcgtcgtcctcccatgcatgtttatgcatgatgccgtgccgtctcgttgtcagctggttcagtagtgatgcttactttcttgtcgttgttgctaatgtaagaaataagacgatgcgttgactgctt

SEQ ID NO: 55029 - DNA, 539 bp, Zea mays
  Clone ID: MRT4577_150184C.1
ctgaaacatagtacagaggaggagaggagaacgagagctaagaagatgaccggcaaggttctccttgtggccgtccttatcttggtgggcgtggcctctcgatgctcgggcagtaggggcctgcagggcgatcacgttgctgaacagaagttcggtggcggtggctatggaggtggcggtgggtacggaggctacggcggcggtggaggaggaggtggtggtgggtatggcgccgccgtcgcgcaggccgccatgttcaagaaggccaactacgcctgcagctactagctaggcctcgcgcatcatcagcgtataacgtacgcacgcaatgttcgttatataattccatacgtatatgggtgtgcaaggtccagaccgaccagctgtatgtcttcatcgttgccttcgtttctgcgtcgtcctcccatgcatgtttatgcatgatgccgtgccgtctcgttgtcagctggttcagtagtgatgcttactttcttgtcgttgttgctaatgtaagaaataagacgatgcgttgactgctt

SEQ ID NO: 55030 - DNA, 1080 bp, Zea mays
  Clone ID: MRT4577_150185C.1
tacggtagcctcggccgggccgggcactcgcttgagcatatagtgtgctcttctcttcctcttccagttggtattctttatctgaaacatagtacagaggaggagaggagaacgagagctaagaagatgaccggcaaggttctccttgtggccgtccttatcttggtgggcgtggcctctcgatgctcgggcagtaggggcctgcagggcgatcacgttgctgaacagaagttcggtggcggtggctatggaggtggcggtgggtacggaggctacggcggcggtggaggaggaggtggtggtgggtatggcggtggcggtggcggcggcggcggtgggtacggaggcggtggcggctacacacccggctactctggcaccggcacctgcgactactggaagagccacccggacgccatcatctcgtgcatcgggtcgctgggcagcatcctcggctccttcggcgacgtgtgcagcgccttcttcgggagcaagctgcagacgctgcaggacgcgctgtgcaacacccgcaccgactgctacggcgacctcctccgcgagggcgccgcggcctacctcaactccatcgccgccgagaagtacgcctacagcacgcagcaggttcaggactgcatcgccgtcgcgctcacttccaaggccgccgccgtcgcgcaggccgccatgttcaagaaggccaactacgcctgcagctactagctaggcctcgcgcatcatcagcgtataacgtacgcacgcaatgttcgttatataattccatacgtatatgggtgtgcaaggtccagaccgaccagctgtatgtcttcatcgttgccttcgtttctgcgtcgtcctcccatgcatgtttatgcatgatgccgtgccgtctcgttgtcagctggttcagtagtgatgcttactttcttgtcgttgttgctaatgtaagaaataagacgatgcgttgactgcttaaaaaaaaaaaaaaaaaaaaaaaaaaaaaaaaaaatgaaaagctcgcgcgcctgggcgcaataccgcaacagagtccttttaaaaaaaaaaaagaaaaaaaaaaaaaaaaaa

SEQ ID NO: 55031 - DNA, 1992 bp, Zea mays
  Clone ID: MRT4577_150186C.1
atggagacagcaggtcagacgacactccaggaaagcgctgtgcacgcccggaggcaggcggcgtgttggtggcctttggacaccacggcatgcagcagcttggacttggacgacgcgagcaccttcagcagcagcagcctcctccttggatgggaatgggatccacagctctgctgctttggtagtccccatgcccgagactctgagctcttcggccccacatcatccatggctgactgcgcccgtgtgataggcatggagtctccggtgtccgaggcgtcagcagcggcggccaccggggagctggacgatgaactactactcatgagcctgtggggcgagtgccacctcttcagttcctgcagcgctctcaaggagaagacggccacctcttcccaacatgatgatcatcattccgatctgccgacatccccggccaagactactccggcgacggcacaagcagcagagccttcgcactgcgacgtggacctacgggccagttacaccggcggcgcccagcagcagcagcagcagcagcaccgaaccactcgtgccgccaacagctcgtcgaagcgctcggcgaccgaaccagaaggtaccgcggccgtccggacctccttctgtcacagtactaaaaccgcagcaacggtttctcagttctctcactgttctcctgtgcatgcccttgtccctctgcacgcagagaaaggagcagaaggcggcaagaggagccgcaaggcgccgggctccaccgcggtggcggcgtacccgttcgccgtggtgaagcccggcggcgcggacggcggggtgacgctcgccgacatcaaccggtggatcctcacgccgccggctcgccccgtccggcaccccgtgggggagttcgcgtgcgccccacgcgtgtcggctgccaaccggccggggccgtcgggcaggacggtggccggcttcaccaggctccgcaccgctggcagaggcacgataaccatcgttgtgcttacccagttggttgttcaaaagacgttgttgtcgaggcctgcttacatgactgataataagtggcgagatattgatgagagagctttgttcgctatacaactcagtttatcttttgatgttcttcgtgaagtaatgcatgaaaaattcgcagcgatattgtggaagaaattggaggagctgtatatgaccaaaagtcttgcaaacaagctacgtctcaaggagcgtctttacactattcatatgtcagaaggtgacggtttaattgttcgggaatctggagatcataaatccaacctttattgtcgttattgcagaaaaagtattcatcgtatttctcagtgccccaaagtgagaaataaagaggagagaaagaaaaaattggataagtcttctgctgaagccagttttgctaaaactttggatagtggagaagctctgtttgttgcctctgttgaaaagtgctcttcttggattctcgattccgcttggacttttcatatttgttcgcatggagattggttttctgattatgttcagtctcatgctggtgaggttgttattggagatggatctacatgtgagattattggaatcagttctatttatatccaagttcatgatgcagtattaagaaacttattgaaagtcgcctagtgaggacaagaggctaattaaattagttgctgtacaagcacgcacacgcacctttggtgactgaaaactagtgactagctagctggttgtattgttcgtgccgagaagagcaaagtagatcgctgcagagggctttttcagaaactgggttgggtagtggttgtggttgtaccagcggacaagaaggctcgtactgagaaattgtacatttgtaccatttgggtagatggttgctgtctttatgcttcaacacctcaaagttcacgcaaccgtgcaagttacggtgctgtagatttgcgctcacaagacgtatagctaggtgctgcaatatgtttttct

SEQ ID NO: 55032 - DNA, 279 bp, Zea mays
  Clone ID: MRT4577_150187C.1
cccacacgttcgcccactcatcctccgcactcgtacaccagaagatactttgatcgctacgagcccttatacgcgcagagctacaccatatatcatacatactatatatatccaacatgcctttacacatacatatctataataataacccccattccttaacacgcctaatccactaacaacacatcctcctccacactactgcttcaccactaactagttatctccaaaaaggcctctccactaatactcacatatccttgctacacgccacacccc

SEQ ID NO: 55033 - DNA, 340 bp, Zea mays
  Clone ID: MRT4577_150188C.1
agagtatgaagggcaccccaaatcatctaaacaggatgctgaggatctgtgagcggtgattgaaattgcattttagtttcttcgcccttgttgtttaaagctcttcaacttattggcatcatgaggaactgtcgtgagacatcaatggtcagagtccgaccataaccacatatatagttttaacaatgtctcaagttttgtgttattacctgttgtctgttgtctgccatatgtaatagtttcctttcagaaggcaaaagcacttccttcccaaaaaaaaaaaaccaaaatactcataaaaacaaaaaagaacaaaaaaaaataataaactactaccacc

SEQ ID NO: 55034 - DNA, 414 bp, Zea mays
  Clone ID: MRT4577_150189C.1
cttatttttttttttttttttttttttttttttgtttttttttttgtttaaaggcaacccaatgttcccttggcaaaaaaaataaccagggttccatgggcaaagggttgatttaccctaccagccccaacggcaaaagggtttaaagaaaccaatgttgcccaaggagagtctcactccagccccatgggccatggcccggcccctatataaaagggctgaccgggagcattaaccggccctgggaaaggaacaggtgctcatgtatgggccccaagagaagggttcacccaaagccagagcaaagcttttggagggccatgtttttgtcgccatccacgcttttaagggcacttttcacctgaccctttgggaagcccatttaaaccagcttttgcacctttttttccatgc

SEQ ID NO: 55035 - DNA, 273 bp, Zea mays
  Clone ID: MRT4577_15018C.1
ggataaaaacttttgggcttaaataaacagactgtcctggtttcctcaaaaaaagcatatacatccttcaattcataaccaccggggggggaccagggggcaaaacaccccccttgcaccaaacgaaagagttgcggccgaaattgaagggtaattgaagcaccttatcgtataaagggattgtctttcccctgaacgcttgggaccattacgcgtgtgcctttttttgggggagtggtcctttttaaccaggacccttttgtgggttctttt

SEQ ID NO: 55036 - DNA, 317 bp, Zea mays
  Clone ID: MRT4577_150190C.1
gtaagctcggaattcggctcgagtccggatctcttattgccccaccaaaaatcattctccgggcgagggtagctttggtggagaggggggcggagtgccgggacgaggtggcgcaggcggggtacatgaagctggcgctgtacgcactgaagcacccggcgaccggcggcaacggcctcctcgttagtcgcctcgtctagccttcgttctcaccggccggcgtgtccgtcattgacgccatgccgctttatcaccacccggaccatctgacggtgcttcccacgctcgagctatagctcactctcgtcgaggaccac

SEQ ID NO: 55037 - DNA, 418 bp, Zea mays
  Clone ID: MRT4577_150191C.1
caatttgccaggaaggatatatgggctggtgggctgggacttagggtcttgtccttctttggtttcctttgtgctgttgctttaaagtttcttataatcatatggcatcttcttgcctcgctttatgatcacctaggaactgccttgccttggtgcctgagtaatctcgaatatatcgtatagatctttggtcttcagtactctaatgaaaataagacaaattctcttgaaaatacaaatcttgtgatagtgaaatgaaattcattttgtttgtatggcatgatgagctacgtgatgctgtgctgcttgttttcgccaacaagcatgatcttcctaatgccatgaatgctgctgagatcacttgacagcttggattacactccctgcggcagcgacactggtacattcaaagcacttg

SEQ ID NO: 55038 - DNA, 753 bp, Zea mays
  Clone ID: MRT4577_150192C.1
gggtttatgttttacgctaaattgtggagtaacactatatgagttgttagcaaagaatttgtgaaatattaaggttgatgataatatatattgttatttcatgtaatcattgtgtattaatattttatgtatatcgaataatttgtgtactgtcgcaacgtacgggcactatactagtagtgtgatgatgacggcgtagggtacggtctcgtctcatccggcgccttagactattcttcttactccccttgctccaagacaatttcacaaacccagtgagagattctaatcccctcaacctcttttatatattactatccttgcttccaaacaagttcttattgttctaccctagcttgtgggcgccctatctaggagcaccctactttagtacattctgagttctctcctccaagccaatttccactgtttgtgttagtccatgcataaacaagttcttattgttctaccctagcctgtgggcgccctatctaggagcaccctactttagtacattctgagttctctcctccgagccaatttccactgtttgtgttagtccatgcataagacattgtggaaacaagagactttgcactgtacttgctctgcgaaagtacttttgctgctgccatccactttgctcgtctccactccacacgtagacgtagcctcaccacttcttcttcctcctcctccagtgtgatctcatcacgtcaggactcaacgaaggtccataaccttcaacgaatc

SEQ ID NO: 55039 - DNA, 281 bp, Zea mays
  Clone ID: MRT4577_150193C.1
acgtctgaaaacagaaggaacattatgaggtagagcgggggaatcaccatcacccaccgtcaaactagaccaaaaacacggagcatgtacagtcacctccaaatatgatgtgcactagcttggtacctccaacgcttcttattgagccaggtacatcacaccccattcctggggcagctgcagtaacactgaagcccgtttctgagcttcttggcccaacaaagggccaggtagggtccccccgtcctacatggcgaacctctggttccaggcccttcttg

SEQ ID NO: 55040 - DNA, 195 bp, Zea mays
  Clone ID: MRT4577_150194C.1
atagcttgctagttcaattggagttctacagaaatttagcctctcggtagggcaaattcgaatcaaccctccatttcagaatacaggatttaatcccccataaaaaattagctatgaatacgtacgccatgtataaaccctagtccagtactatacctcggggtagcaggcagcgagcgagtcacgagtactttg

SEQ ID NO: 55041 - DNA, 1169 bp, Zea mays
  Clone ID: MRT4577_150195C.1
cttgcgcagctagagaattactagacgatgacaatgagtggtatcgcacatatcaaggagcaactaattgggcaacatcatttcaactacgcaatctatttgtcataatgctaacatattgccaaataaaagatgaaaaagaatttttcaacaccacatggcacacaatggtcgatgacattcacaaacatcttatccaaaaataccacccctatcaaatatacaccctctgaattagagttgcaacattgtttacttgaagaactcgaagagctattctctaagaatgggcaggagataaataactacaatttacccaggcgacaacacacaaaacaagttgataacgtaaatagactaatccaagaagaaatgagttacgatataaattacttagaaaaagaagcaaacaaattatatatacaactaaacaaagaccaaaagaatgcttttcataccatagttagttctgtgctcagcaacgatccaaacttctattttgtctcaggacatggaggaactgggaaaacatttctatggaatgccattgtatcataccttagagctataagaaagattgtccttacagttgcatcatcaggagttgcttctttgctacttccaaatggacgtacagctcactcaagattccgtataccaatagatttagatcaattatcaatgtgtgatataaaaagaggaacaaatcttgcaaaacttcttattgacacagatcttattatatgggatgaagctctaatgacaaataaacaatgctttgaagcctcgtgtagaattcttagagatatagtaggagaaacatatgaaaaagctcttgacattccttttggtggtaaagtggttgtgctaggtggcgatccaaaacaaatattacctgttatagaaaatggaacaaaagaccaaataataaatgcttgtatcattgcttcatacctttggaaccatgtcaacattatattcctttctgaaaacatgcgactacgacaaagtaatatatcaaatgaagagtatgaagacttgttatcattcaataattggatccttgccattggaaatggggtatataacaacaacgataatttttcctcggactcaacactcattgaaataccaaaagaatttttaattgaaacaacagaggataaaat

SEQ ID NO: 55042 - DNA, 157 bp, Zea mays
  Clone ID: MRT4577_150196C.1
tctagctaccattcacaacacaagtaatatgtaccaccatcatttccatggcgaggtggacatcctccgcttcctgtcccctccgacgaccgcttccttcgctgccgcgcaccaccagcacatgaacatgcccttgcagcctccggcatactactta

SEQ ID NO: 55043 - DNA, 693 bp, Zea mays
  unsure (1)..(693): unsure at all n locations
  Clone ID: MRT4577_150197C.1
gcacaatggcccactcgctgcacgcgcacgcagacgtatcaatagatgccgcactcgccgcatcacgagatgtcgccgccggctgccaacacagtggatcgtccgccgctgaagatgagggaggtatcacggcgcgtcacgcctacacctcggcccactcgctgtcgtcggctgcctacacagggagcccccgccgccgaagaggagggaggtcttgcggcacgggactcggcgacggcgccccctaacacatcgactgggaggtctgcctcactgctgccacactcatcgccagacctctatgctgggttgaacatatgtcgttggacaatgaaactggattagacaaacctggaataagggtcaggttcgtgatcaaactttgagcagaataaagagcaatattgaactcatagtagcgacaaatggtggaaatgggnggtgggtgatcccacctcatgggggtcctctattttctgcattttacgaaatgggtcgaagcacctcctcccgtggggggcagtggtggtccgaactggtgtgagaaccatattaaagctgtaatgaatattggaggatctttcttaggagttcctaaggctgttgctgggcttttctcatctgaagccaaagatgttgccggtgctaggtaatttaaatagagtttgcaagttttagtaagtattttcatgc

SEQ ID NO: 55044 - DNA, 395 bp, Zea mays
  Clone ID: MRT4577_150198C.1
ctcggacggacggtccgccgggcggcggcgccgctaggtaagtaggtagctagagcgctgcgccaaccacgacgtagcacatgcaatggcactcgcggccgtggcgctgccgtcgtcctcgatcgtcggcctggtgtctagctgcacggaaccgcagccatgcagacgatctcgaccgtacgccgtgtgtagccggccccggccaccgcccactgctgccaactgcccagtgatgacgacccggccatgtccgccgtacgcacggtcctgcctctcgatcgtacgccgtgagcaacaggagttctgtccggcgctggaggtcggtccttgtcctggctagagctagcccgcccgccggtcacacggatcggatctctccatccactcccagctgt

SEQ ID NO: 55045 - DNA, 625 bp, Zea mays
  Clone ID: MRT4577_150199C.1
aatcatccccgtcgactcgttcccgatctgaaatactatggatgccgccggcgtcgaccggctgagcgacctgacggactgcctgctccacaccatcctctcccgcctggaggcccggcaggtcgtgcaaacctgcgtgctgtcgtcgaggtggcgccgcctctggctggccgtcccgtgcctcgacatcgacggcggggaggaccaagagggggaagatgaggaggagcggcacaagaagctggacgatttcgtcgacaacctcttgcttcgccgtagcacctgcgcctcctcgccgctgcacaccctgcgggtgagcgtcgcctcgccgcggcctctgtggaggcgggcccaccacgaccgccgttcttccatctgcgccgcccacaccagatgggttagccgtggcctcgagtgctccccggcggtgctcgaagtacgcggcatcaagctgccttcctttgcctcaggcacccaccgcctcactaagctgctccttcaggacgtgattctccacaaggatttcgagaagcatctcttcgcttggctcagagtcctcccaagacttggagatcagaagctcagacatgtccaatctctcaaggatcgagtccaacacgctcaa

SEQ ID NO: 55046 - DNA, 238 bp, Zea mays
  unsure (1)..(238): unsure at all n locations
  Clone ID: MRT4577_15019C.1
cttgtatcctctacaccctccgccctacatactttttcactcctatacccagccaacacacgctctcaatcggttcatttgtcattttttaatcctgcacacccaaacaaccgcccctaanaaccatcattactccacttttacccacacaaactcataatgttcatccatcatcaccaacattcctaacttaatcatttctaactcactcaccaaatcttcaataaacacccacctt

SEQ ID NO: 55047 - DNA, 495 bp, Zea mays
  Clone ID: MRT4577_1501C.1
tcgctgcttcttctcaatcacaatcacaatcttccgctggtggttcgtcgagttcgatcgcatctgcttcggccattctgtcgtccaatttcggactcaagcgaccgactcctgctcctccgaccaagtacacgtacgaatcgtcggtctttcctccgtccggtccacctcggagagtgggcgtgttcaacaatcgtccttctatcttctcgtcgtctgccaccgcttcattgagcaatcttctcaattccattctatctgctccacttccggcgtctccatcggctccggccttcacactgaccaccgcaccgtctgcaattcgaaacccgttgcttgccttgatcggtgccgaatcgtttcaacatctttgggctgccattcaaacattcggtcttttcggagttcttcgttcgttgctcttcactttgttcgttgttttcatgccgccgatttctttggctgctgcatttgcggctcttctttaacttccga

SEQ ID NO: 55048 - DNA, 1388 bp, Zea mays
  Clone ID: MRT4577_150200C.1
cagggttgaacttcgatattttttccccattggctatcctttagaaacctcgggtatcattggttttatgcttcttagctttacattcaaggccatcttctggagaccaatccagatttccccaaattgtatcaccacctttaggaagcattgacattgttgaatcccatgttcgggtcatgcgcatcaaatggcgcaaagtttgaagtccaagaaaatcagagtccagaacatcaggagcgatagctctagcaacggcaacatctttggcttcagatgagaaaagcccagcaacagccttgggaactcctaataaaggtcctccaatattcattacagctttaatatgcttctcacaccagttcggaccaccaccgccccccatgggaggaggtgcttcgacccatttcataaaatgcagaaaatagaggacccccatggagtgtgggatcaccaccaccctatttccaccatttgttgctaccatgagttcaatattgctctttattctgctcaaagtttgatcacgaacctcagtgttctggaaagataacctccaatcatatgcagccatgtacatggtcttttcttcatatccaatacgagctaaattggcaattaagacagcccaaacaaaatatccagggacgaaatagtctgctgcaacaaggcctgtgactgacctgacccttattccaggtttgtctaatccagtttcattgtccaatgacatatgttcaacccagcatagaggtctcttgtatacgtcaccaaatgtgccgccccatagccgcttgcggaagagaccctcggcgcattggtgtccctcccatagctcgaggcccccggtgacgatgccggggacaaagacgacggggtgcttagctcgcagcccctccttctgcagcttgaccccgggcgggtccgggagcggccccgtgatggcctcggtgacatactgcgggaacgaagctggcatcgcgttgtagagaaagagcagcaaccaccaggcggagcacacgcacccgaccagccagcagcagctgtccacgcacgaccacttggccttggtccgcctcgtgggctccttggacggcggcgcggaggacgaggacggcttcttccccttgtcgttgtcgtcgtggtcggacccgtcgccgtccgagggcggcagctgctgctgcttccgccgccgcaggagcgacatggcgcgcggcggcggtggatccaaaagcggctaactgcgcgggcccacctgcatccccggccgcggctgcggcggcggcgccccgtagaaaaccctaggcgtcggtggaagcgggcaggtcgaggggcagtcgcggctggcaggggcagcttcgcggggttcgcgcatgtctcccggccgg

SEQ ID NO: 55049 - DNA, 2700 bp, Zea mays
  Clone ID: MRT4577_150201C.1
ccggccgggagcctcttctctccctctcgcgcgacctcacaagcgcgaaccccacgaagccggagccaagccacgacgggtcgaccggtcgacggcccctcgacctgcccgcctcgcttcctccgacgcctagggttttctaccggacgccgccgccgccgcagcagcggcccgggatgcaggtgtgcccgcgcagttagccgccgtcggacccaccgccgccgcgcgccatgtcattcttgcggcggcgaaagccgctgccgccttctgacggtgacgagtccgaccacgacgacaacgacaaggggaagaagccgtcctcatcctccgggtcgccgtccaaggagcccacgaagcggaccaaggccaagtggtcgtgcgtggacagctgctgctggctggtcgggtgcgtgtgctccgcctggtggctgctgctctttctatacaacgcgatgccggcctcgttcccgcagtatgtcaccgaggccatcacggggccgctcccggacccgcccggggtcaagctgcagaaggaggggctgcgagttaagcaccccgtcgtcttcgtcccgggcatcgtcaccgggggcctggagttatgggaggggcaccactgcgccgaggggctcttccgcaagcggctatggggcggcacatttggtgacgtatacaagagacctctatgctgggtcgaacatatgtcattggacaatgaaactggattagacaaacctggaataagggtcaggccggtcacaggcctggttgcagcagactattttgtccctggatattttgtttgggctgtcttaattgccaatttagcacgtattggatatgaagaaaagaccatgtacatggctgcatatgattggaggttatctttccagaacactgaggtccgtgatcaaactttgagcagaataaagagcaacattgaactcatagtagcaacaaatggtggaaatagggtggtggtgatcccacactccatgggggtcctctattttttgcattttatgaaatgggtcgaagcacctcctcccatggggggtggcggtggtccagactggtgtgagaagcatattaaagctgtaatgaatattggaggacctttcttaggagttcctaaggctgttgctggccttttctcatctgaagccaaagatgttgccgttgctagagctatcgctcctgatgtcttggactctgatttccttgggcttcaaactttgcgccatttgatgcgtatgacccgaacatgggattcaacaatttcaatgattcctaaaggtggtgatacaatttggggaaatctggattggtctccagaagatggcattgaatgtaaagctaagaagcacaaagccaatgatactggggtttctaaggatagcaatgggggaaatatcgaggttcaacctgaacctattaactatggaaggctggtatcttttggtaaagatgtagcagaagcaccttcttcagagagtgagcagatagaatttcgtgatgctgttaaaggtaataatatcgcccattcaaatacgtcatgccgggagatctggacagagtatcacgaattaggatggggtggaataaaggcagtcgcagactacaaagtttacactgctagttctgttatagaccttcttcattttgttgctccaaggatgatgcagcgtggaaatgttcacttttcatatggaattgctgataacttggatgatccgaaataccaacattacaaatattggtcaaaccccttggaaacgaagttaccgaatgctcctgacatggaaatattttccatgtacggagtaggcattcctactgaaagggcatatgtctataagttggccccacaggcagaatgttatatacctttccgaattgacacctcggctgaaggcggggaggaaaatagctgcttgaaagggggtgtttacttagccgatggtgatgaaactgttccagttcttagtgcgggctacatgtgtgcaaaaggatggcgtggcaaaactcgtttcaaccctgccggcagcaagacttacgtgagagaatacagccattcaccaccctctactctcctggaaggcaggggcacccagagcggtgcacatgttgatataatggggaactttgctctaattgaggacgtcatcagaatagctgctggggcaaccggtgaggaaattggtggcgatcaggtttattcagatatattcaagtggtcagagaaaatcaaattgaaattgtaacctatgggaagttaaagaagtgccgacccgtttattgcgttccaaagtgtcctgcctgagtgcaactctggattttgcttaaatattgtaatttttcacgcttcattcgtccctttgtcaaatttacatttgacaggacgccaatgcgatacgatgttgtaccgctattttcagcattgtatattaaactgtacaggtgtaagttgcatttgccagctgaaattattgcagtagcttgccttttcttttgagcacggaagtgtgctctccattacgtgataacctgtgccaaatctttgacaatcatatcctgaatataagatggaacattatttcgttgtgtgaccatattacaagagcggggaatgtaattgactatccttgacacaaaaaaaaaaaaaaaaaaaaaaaaaaaaaaactcgcggcacgagctcgtgc

SEQ ID NO: 55050 - DNA, 224 bp, Zea mays
  Clone ID: MRT4577_150202C.1
tctctctctattgtgatattgtcgcccccccttttgccgcattaatagcgcctcgtgtgtgggttttccacaccgtgttaccgtcacatttgccaacccctcataacccccgctcctttccgttatttttcccttccttttctcccccactttcgccccgtttcccccacaaactactaaatataggggcctttcctttattggatccctaattaattgcttta

SEQ ID NO: 55051 - DNA, 408 bp, Zea mays
  Clone ID: MRT4577_150203C.1
ggacttatcttgagtaaagctttaaaagagcagaaggatgctgaggacgaaagtactcggatagccttcggcaatctacggttagaggttatagacctacggcatcaggctgtagagaaagataccattttgatttatgtagtcaacaaactaaaggagagccaggctgaattggcgaagttttccgaaggggtctcaagaattttaaagctggaagaagaaaagaaagctgatgcgaagctcattgctgatattgaatttgcattgtcaacgcaagtggagctacacaagtttgaggtgctaaaattagaggaaaaacttgatgaagtgagcgaaaattttgaagttgaaaaagaaaaacgtgagattgccgaaaccgagcgtgacagagtccaaagaagcgactga

SEQ ID NO: 55052 - DNA, 210 bp, Zea mays
  Clone ID: MRT4577_150204C.1
atgaccggttcaagggataactctgacgtctcccccagcaatatcatcgagccgacttggaaaaccttgccggctgaagaacaactccagttcgaggagcacaaggagcagctgatcctggaagcaaaagcaaaattcctggccaacttcaaggtggacaggaacaacaaagtggttcaacaacgggcgacagatctggctacgctctga

SEQ ID NO: 55053 - DNA, 332 bp, Zea mays
  Clone ID: MRT4577_150205C.1
ggagccccccagccaactgtttttttttattcaaaaaaatccgagggggggggacaaaaaacaacctctgttgttcctcgaagcaaggaggcccttaaccacaaaggggggcccccaaacttggggcgggctccttcttccccatagaggcccggccggaaaaaaaggtgttgtaaaccaaccccaagagggccggccccaacataggccccccccaaaacacccattggggtctccaggggggggaacccacaaaggggggcacaaaaccccccgccagatttaataagggcccctcaaacccccccaaaggcaaaaccttgggcccccca

SEQ ID NO: 55054 - DNA, 184 bp, Zea mays
  Clone ID: MRT4577_150206C.1
acaaatgttttcactacatttttctttctcccaccactccattggtggttgagggatcatattacctttctaagatacagatgttaatgcgtaatcaccatcaaacctatcccatggaaacgtatttcggtctacccctagtatgatttttctttcaaaatacccatctcacggcccagcacac

SEQ ID NO: 55055 - DNA, 332 bp, Zea mays
  Clone ID: MRT4577_150207C.1
gtagagtgcgactgaccagcggggccaggtcatggagcaggagtctgagcactcgatcgtccatgtgagcaaggtcagcgggcctgcacctaacaaggtttgcaagatcaatggggcgcgcacctgtatcgtgcgcgtgctcacagtgatctcctataatcagatgtccactttgacgcaggcgaacaaaacgaagaacctgctttcgatcggactcagctgtaagaagaccaagcgccattaccgccactgtgaccaagcagcacgttcttctgaagaccgagcgggactagaagtgcttgaagtactccctcatgtggaagcatgctatc

SEQ ID NO: 55056 - DNA, 456 bp, Zea mays
  Clone ID: MRT4577_150208C.1
ttttttttttttttttgagagtaacactataataataataagctcaagactttttgctaccattacaaagtcaacggccatgctctgtttttttcccaatctgctctgtttcgttaatagaagcagcagtaacctttgtgcagttaccaaattgtggcacaggacacgacgagaacgagaaaaggtaaaaaccgaaagttcagcgaccactagtcctagcctagtagctccagagcggcaattcggaagccacgccgtcgtcgcataacgcggggacaatgggcggtggctccacgagcatcgcctgcgccaagttcgcgtagtacaggtcccagctcatgccaccgaacatgtccagctcgaacggcgagtcgtcgtcggtggtggtggccgaggaggactcgtcgccgtccttgttgttgggcgacgtccaggacgcggtcgagagcgcgttcc

SEQ ID NO: 55057 - DNA, 408 bp, Zea mays
  unsure (1)..(408): unsure at all n locations
  Clone ID: MRT4577_150209C.1
tttaatttgtacagcagcagnataactgacatgcttctcactcctccccctacccagtggcggaatcaaggaggagtgatgcgtgtgagtccgatcgatctgaaggctgctgtaaggaagacagacgtaggggaaggagtgagcagcntgtcaggagcatacgcggcggtgcaggttactctgagctcttcctcgaaggcgggctgcccgggaactccggcccggcccccgctggcgtaccagctctgcctcatgcgggtgcggatcccgncccttggggaaccctccgccttggtgcggcctcctgggtcttcaccctctctgctccgggtgttcagggtgcanagtcccccctccttgggtgttggggggncagggagtgggcccgccaggtggccgccgggatgc

SEQ ID NO: 55058 - DNA, 458 bp, Zea mays
  unsure (1)..(458): unsure at all n locations
  Clone ID: MRT4577_15020C.1
ccgttttcgcgcnccgnccgcgggcagagcccgccaccccaaccgancngccggcccgcagcanggcggcgggggcgggggcgagggcgaaggcagcgggagcccnggcgcnggcgcncgngcncgcgccagcgggggccaacnccgagggcgacgcgcncncggcgcngcgccgcagggggggggaccccggcggcgngccgcagagcngggaccccacgcncgncaaccccngcaccnggnnccacgncaccngcgaccgcgacaaccgcgncacccgccnagancnnggnaannngaacccancnggncancnggngccngagcnngggaaannggagcancngcagnaccnggaaccccacaagaacagcanncaaggaacaancccnncngagcnnggnaannngaagaancnaanaagcnnggacnngnacaagaacaacannacggggaca

SEQ ID NO: 55059 - DNA, 259 bp, Zea mays
  Clone ID: MRT4577_150210C.1
cccacgcgtccgcccacgcgtccgcggacgcgtgggtgctgcatctgatgaggaacctgaaattcctgatgacttacatcatcctgaggctcttcatgagtatgcatccctaacaaccgttgatgcagggaatgaggaagttctgtacgttctgacatgggtctagcttgttgttttcacatggaccaatgtgtttcggtggtacctcgtgctggcctactcagacgtagaactgcgtttgagctgtgcaaaggccgtg

SEQ ID NO: 55060 - DNA, 229 bp, Zea mays
  unsure (1)..(229): unsure at all n locations
  Clone ID: MRT4577_150211C.1
aaagcctggaggtaattaaactgttgcgtgtatttttggtattctagtattcatcttaatccacatgtatcgagctggactgaagtcagagaaagaagtcaattgaatacccttctaccctgtctcattcanatgtcttaactagggaatcatatcgtgcgttcagcatgtctcccgtgtttgctgggnttccaatgttcatgttggccctggctggtccttttgcttt

SEQ ID NO: 55061 - DNA, 992 bp, Zea mays
  Clone ID: MRT4577_150212C.1
cattgggacctcgagccggccgggaaacagactcggcaagtggggacacgaggacggtgaccaagcagagtgacgacgacgcgacaatcaagtccgtagctccggcggtagactttgatatggctttagctcgtctgtgcctcaacagggccatcgctggccgcgcgcaggcgctggcgaggccggcgctcgccgcagccccggcgacagatccgaaacttcactcgcttctctcaacctcggcagccgactctgccgcctcaggcgaggcaaaccgccgagatgtcgccgtgtcggagcgctccgcccccaatcgccgctgggcatggcgagacctccgcgacttcaccccgttcagcctcgtggacggtctcgggagcgcgctgtcgcaggtggcggagaccctgggccgcccgctggagcgcctggcgccgtcgcggctgctgtccgggaaggtgcgcgaggacgaggcgcggtaccggctgcgtttcgaggtgccgggcctcggcaagggcgacgtgcgcgtggccgtggaggacggggtgctggtcatcgagggcgagaagcgtgagcacggggaggagggcgacggcggcgagtggtggtcgaccagcgggtaccacgccagcctgctgctcccggacgacgcgcgcgccgaggggatcaccgccgaggtgaaggacggcgtgctgtacgtcaccgtgccgcgcaccggggagcgcaagcggaacgtcaccgaggtgaaggtgcagtgatgcgtgtcgtgtcactcaactcttgtgagtgcttcttgtttgtgagcccgtgactgttgtgtattttctccggaaataaaatacgtatcgtgtacagaaaaaaaaaaaaaaaaaaaaaaaaaaaaaaaaaaaaaaaaaaaaaaaaaaaaaaaaaaaaaaaaaaaaaaaaaactcgagggggggggggggggggggggggggggggggggaaaaactcgaggggggggcccgtgtacc

SEQ ID NO: 55062 - DNA, 409 bp, Zea mays
  Clone ID: MRT4577_150213C.1
cccacgcgttcggcaggggcgctagcagacgagcagagcaggctagcatcactggagcggtaccgcagcggcgcagtgcagtccgcagccgtccagcctcatcccgcatgcaggggctgttggcgctcctcgctcttagcctttttgttctacctcgtttgttatattgctcgcgtgtcttgcgcctatttgttgtgtgtcctcaaatgttttttgtatttatttttttttgctgggtttgtcctttcttttttagtgctttcagtttttcattttgtttctaaattctttttttgttttatccctccgttgttttatatgttctatcctttattattatttcttttaatttcttttttatttttttgtgtcgtgtttttttatttttttttttatttttttttttttt

SEQ ID NO: 55063 - DNA, 173 bp, Zea mays
  Clone ID: MRT4577_150214C.1
tagagaaaacatcgccggcaagtgctattcattggtattatcactgctgttgggactagctagcataatctttcagacggaatcggctgctcgtctcggatctgtcaagcgtcttgatgtggtcctgaacttggctgcggctattgcctaacataacataccagagggggtgc

SEQ ID NO: 55064 - DNA, 234 bp, Zea mays
  unsure (1)..(234): unsure at all n locations
  Clone ID: MRT4577_150215C.1
tcgcgatctataactatactnnattttttaanattttcttacacaccaaaagccccactcctgaggccacaggcaaaaaatacaagagcgccaataaaaacccaccccactgcaccaccggacacagttggacaaccgcatcctactccaagaacatcaagccaacaagccgaggtgaactcacactgatatccaacagaaccacacaccgaatccacccccagaaaccgccga

SEQ ID NO: 55065 - DNA, 206 bp, Zea mays
  unsure (1)..(206): unsure at all n locations
  Clone ID: MRT4577_150216C.1
gcctctacactgacgtctgccacgcgtccgcccacgcgtccggcggggctccctccagtccccggagttggtggccccaaggatngaggtcccggtgccgctgccgacgcgggagcgcggcatgacgctggccgagcagctcgccgcgtcgtgcaacctccgcgacctactcaagctccgggacgacggcgtcagtggcagtgaag

SEQ ID NO: 55066 - DNA, 752 bp, Zea mays
  unsure (1)..(752): unsure at all n locations
  Clone ID: MRT4577_150217C.1
actatctcagtccccatcttccctgcctccagcaaactcacacatctcaccaccggagctcccaatcccacccgaagcggcagccatggcccccaaggcagacaagaagcccgtcgccgagaacaaggtggagaaggcggcggagaaaacccccgccggcaagaagcccaaggccgagaagcggctgccggcgggcaagacggcgtccaaggaggccggcggcgaggccaagacgaggggccggaagaagggcagcaaggccaagaagagcgtcgagacgtacaagatctacatcttcaaggtgctgaagcaggtccaccccgacatcggcatctcctccaaggccatgtccatcatgaactccttcatcaacgacatcttcgagaagctcgccggcgagtccgccaagctcgcgaggtacaacaagaagcccaccatcacctcccgggagatccagacctccgtccgcctcgtcctccccggcgagctcgccaagcacgccgtctccgagggcaccaaggccgtcaccaagttcacctcctcctagactgaagatgcgccgcttgttgtgccagatgtggctgtctgatgtatctctgctgttgactctgcttacctgcaagtagaagtagtggtagtagttcgtgtggtagaagattgccaacgctttgttggcttcttggttgtgagaactgaacgtgttgcttttgcaaaatgaaatctatctaaaaaatggttgcggntgtggtaac

SEQ ID NO: 55067 - DNA, 251 bp, Zea mays
  Clone ID: MRT4577_150218C.1
agggggtaaacacccattgtattaccaggttccaacaacttaaactttggttcacaaaagcaacaaacagaaaagggttggtggtgatagggaccaccgaaggaacaagacctaataacgaccacttggggaattcactttatcctcatcggttgaggtgagacactggggattaaacaagttaagggcaggaccaaattattctgaaacgagcttggtaggaaccggatcaagacctgaccgggatgcca

SEQ ID NO: 55068 - DNA, 325 bp, Zea mays
  Clone ID: MRT4577_150219C.1
tcggcaggagacaacttcggcaccttcacccttgaattgtttcccaccattgggtcgcaaggattcttcgttttttccgcactttagcagggccccgaggaacccattctttgagagaccgcgggcttcaacaaagataccaaccccgtggaaaggaaactttggggtggggccttaccgaaccaaggaagggaaccccttatgctttaaccgggtcagggcgcccaaccaaattttgatcaataatccggaccggtgaaaggggtacctaccaataaccgggttggttgaattaaataagctggcgcctaaacttttttttggg

SEQ ID NO: 55069 - DNA, 356 bp, Zea mays
  Clone ID: MRT4577_15021C.1
gcgtacgtcagcttagagccgccgcaagcgccgcgcctagcgcgcgcatggtttttacctgtatctgaagagaggtcactttttccccggcctactccaggagggccggagtgggtagttacccgcaggccgggacgaggaataccagcacgccgagccattcctgcatcttaccctggttaacccatagaggcgccgactctagcttggttcaaccctgtcccaaaaaaaacagggatgctccgccgggggattttgttcaaccgtcttgactaggacgcggcagaacatgtagaccgcgcccgccagcaggatggcgcccctccaccccgtcatggtcgacccggacctcacca

SEQ ID NO: 55070 - DNA, 265 bp, Zea mays
  unsure (1)..(265): unsure at all n locations
  Clone ID: MRT4577_150220C.1
taaattgggtagcttattttactaactagtttctatctaaaaatataataagattcattatagnnnaaggttacatagtgggacgtatttgactggacacaacatgaaccacgttaagggtacgggttggggggggaataaatggggctcgaagagccggggggtgctcaatacacaggattgagacaactgttatgacacaattactgggcacagaaatggggaaggaacctacctggaggcaagcttaaggagcgtagcttga

SEQ ID NO: 55071 - DNA, 128 bp, Zea mays
  Clone ID: MRT4577_150221C.1
ccgggtacgtacccacgcgtccgctcgcctacggcgcgcctacaccagtatcccaagcggcagaacgaagtgcgcagacgatggacacgggcataccctacagcggaggcggaggttactaccagacg

SEQ ID NO: 55072 - DNA, 423 bp, Zea mays
  Clone ID: MRT4577_150222C.1
cgggccgatgcgagcctccagccggtctcgcgtccgcccacgcgtccgcgcgagcagccaacgatccctcgatgggcgccatggctcgttccgtctccctcgtcgtggcgccgcctctcctcgtctctgtcctcgtctcagccgctgccagtgcgcggaccgtgggggacaccgtgcaggacgcgtgcagcaatcacccagttccccaagatgtgcgtggacagcctcgccgccaagccggagaggcacacggcgacgccgcgcacgctggcggcgctgttcgtggcgatcccggccgagaagggatgcgggatggggatcttcgtgcaccggcacgtgcagcgacagggaggacagggacatagtcaggtgccacgacagcggcgcctgacacgtggaggaggccgtcggccaggtgagcgg

SEQ ID NO: 55073 - DNA, 307 bp, Zea mays
  Clone ID: MRT4577_150223C.1
agtcgtaccatctgtagggaattagcaccggccgaggatattactaagtgcttagtttaagtactggcccgtggcgtgaaacttcaccaggtccgcgactgcgcatggccaacggccttcctgatcctcgctgcgtcgtcctcatcgctgacacagcccgctctgtcgtcgaatctgtcgacactgtcgtcttccactgagatgatgtcacgtgggcagggtatccgcgcaggtcacggtcatcgacctcgcccggctgtgccagccgggcggcggcgccgacgaggcctcgaagcaaatgactcta

SEQ ID NO: 55074 - DNA, 1109 bp, Zea mays
  unsure (1)..(1109): unsure at all n locations
  Clone ID: MRT4577_150224C.1
accttcgcgaactcatagccaacctaaacctaaagcacgtccctcctcctgctcgctcctcctgcccgatccgccgccttcccccagcctgcccaccgacactccttcttccgtgctgctgctcctccaccagatctggcaatggcagcccccgacacaccttcttcgcgcgcgcccaagatcggcaggcaggcggcatcgatctcccgtgttgcctgctccgcccgcgcgccccggatctggcgagcggcatgacggcgggtccctcaacagcgacgacgccatggctgcggcgtcctcaacggcagcatctctacacggcgacgacgccatggctgcggcgccctcaacggcgacaaagcagccgctgctggacagggccgaggttcgggtaggcgccgggttcgtcgtcgctggcggcggccggtgtcctcgccgcgttctacaccttgctgctcgtcctttccctagtcaacagaggcggcggagagggcgaggccctggaggcggtgttcctggcgctgcactgtgcggcgcacctggccgccgcgaccgtcgtcgcgcacgagaagcgggctcgggccggcacgggccattaaatgggccatgctatttgggccggcccggcacggtcgggcctacaccgtgccgtgctcgggaagggttatgggcccgtcgggcggcacggcacgacacgattaagtggtcgggcttaaccgtgccgggctcaaacgggccgggccaagtcgggctcgggctgggccgggccgtgccgctcgtttggacatatatagggcccgtttggattgatgcctaacttgccccactttgcctaacttttctgcctaaagttagttattcaattcgagcgaccttaggcaaagtgaggcacagttagccacaaaccaaacatgcccgatacgccatagatacgccagtgcgtagcgcacccgtttccttaccattgtactagacagtcctcacgccaaaccgcaggtacaggcatttcccctagtaagtactagtaagatatggtcccggtctattgatatgattatccatanagggaagcgagcggcgagcgttactggtgcgtggtggcccaaagc

SEQ ID NO: 55075 - DNA, 247 bp, Zea mays
  Clone ID: MRT4577_150225C.1
cggacgcgtggcggacgcgtgggcggacgcgtgggcggcctaggggcctttgtaattaggggttgacatgtcttgtctctcctatgttcttattttcttcttaatttaatgacacgcagctctcctgcgtttgttcaaaaaaaaaaaaaaagaagctgaccactactagataaaaaataaaagccactttcttaaaaactgaattgcttttgcttccaaacatgacctaagattagttagctgctgt

SEQ ID NO: 55076 - DNA, 517 bp, Zea mays
  Clone ID: MRT4577_150226C.1
tgggaccctcgaggccggccggggagatatcacgctatcgtcttctgcattgcgagcgcgtgactgcatcttccgttctcatgagttcaaagtattctctgctcgtttccgacgacgacctgtcgtaccgcgaacgcagcccgcgacgtccgtctcctgctgctgtgctctttctgcgccgccaccccacgttgcctgagaccctcctaatgactgatagtacgggcacaccgtgtccctctgaccagaccactgccgagcactgagccccattttcaaggagcgcgtcacagggacgaatcagcccccaatcgacatctccccggcccaggcggtctccaaccccgcgctccagccgctccacgccgactacaccgtgggcgacgccaccgtcgtccacgacgtccccgacgtcgcgtgctgtcttcgtctgcttttgttagtctgtttcgttttattactaacacaatgatgcggcacgcatcgaattggatgattgtaagactgacgcgcccga

SEQ ID NO: 55077 - DNA, 282 bp, Zea mays
  Clone ID: MRT4577_150227C.1
gggggagctcgccagggaatttctttttatttataatgtatggggaatatttggaacttgggaggtcttaaaactttaccaacactggttaacatgacatgggcattaaatatggggtgctggggcaaattttacagcacagtggcggaccgtgttccaggtttaaaaatttgcaaaatctaaggatggcatggagaagggtttaaattttctggggggaggcttcaccgaagcaaccggaatcaaggccggatcgcgttccttcagggggggcagaaaatt

SEQ ID NO: 55078 - DNA, 1140 bp, Zea mays
  Clone ID: MRT4577_150228C.1
cctggccggggtctcccggtccttctggacgcgacagcacaccacctctacgaagcatctcgaactctcggtgccgctcaatttgtacccccaatccccttccacacaccgcctcgcctcatcgcagagccagagcaagggaagacgacgcagatctcgccacgcgaacacagttagatcgagggagtaagtgagagtgagagccatgacggagctgttcgacacggccgtgaccagcctcctccacctgccggaggtgctggaccgcctcgccgccgcagacggcgaccggcggtcggccggcaaccacgcggcgcacgggcacggccacggacgcgtccacgggctcggcggcggcggcggagcgccggtggacatcgtggagagcccccgcgagtacgccttcgtgctcgacgtgcccggcctctccaagtccgacatccaggtaccgcacctgcggcgcgcggtcccttaactccgttggatccagagcgccagcaactgaccccaaccgcatccgcttgtgtttcaggtgacgctggaggaggaccgggtgctggtgatgaagggcggcagcgggaagcggaagcgcgatgaggaggaggacatgaacggcgaagggtgccgatacatccggttggagcgcggcgcggcgccgcggtcgttcgtgcgcaagttccggctgccggaggacgcggacacgggcggcgttgcggcgcgctgcgagaacggtgtgctcaccgtcaccgtcaagaagctgccgccgccggagaagaaggccaagaccgtgcaggtcaccatcgcctagaagtcggcagtcggcagagtagcagcagtagaatcgtagcgcgtacgtagtggcatgtcgtgttgggtgaatgggtggagtgctcttttgtttacgtttgtgctgctgatgaactggtgggtgggtgtgaccgaccgtgcttcttttctgaacaagaattattcaatcgtgtcggtgaagctgtgcatttgtgcaaggagtttgtttggcctgtcagtgtgtgtttattacagtgcttcttttacaaataaattacatgcccaggaatctctgggggtgtaacagaccgtgcttcttttccgggcaagaattattcaatcgtgtctctggtg

SEQ ID NO: 55079 - DNA, 279 bp, Zea mays
  Clone ID: MRT4577_150229C.1
caggactaccacctgcatcaaatgaatcgcactactcgcgactaaacactacgacccgcgagcataccacagccgctaagcactaatcaactacagagccatgcctctccaagaccaacacacaagaagccacaccaccaccgacgccgcctcagcaagcacaccaagaacaagtccgtcactgagactgatacccaggacgcatacagctgagctacaagctacgactccaacgagaacgccgatcccaaccacgagccacaggacgacgtcaagata

SEQ ID NO: 55080 - DNA, 879 bp, Zea mays
  Clone ID: MRT4577_15022C.1
ttatgttgaggacatgagcttttctccatctatattggtggaagaacaaagcatcttttgcagcgtgcaatctggaatgacacgtctttcctcacttcggtgaatgttatggactattctctacctgtgggagtggacaaagagaagcatgaacttgtgtttggcatcattgattatctgaggcaatatacttaggacaaacaactggagacatgggtgaagacttctctggtagtacccaaaaatgttttaccaactgtaatttcccccaaggaatacaaaaaaaggtttaggaagttcatggcgaagtactttctgtcagttccagacacatggagtcttgataatccgtctaagccatgcaaatcccttggtcagagcaatcgcaagttggcggaagtccagattggtgataacctgtcagagcacccaaatgaagttgaggggtgtgcctaatcatgtgcaagatttcctggcaattttgttgaaccctatcatgttgttgtttggctatatttcactttgtaaaatggtgtacataggaggaccttgcggtttttaggcaaattgttgggcaagtgaggtccacatgacgtgtacctatacaaatgttcattgttgatttcacaattattatagtgaaattaagaattcatatgatcatttttttggacctaccacttgtgagactgaagcagtctattcttcacttatgactaactgtccaagaccaagataggcatttcctacctctattgaaattaggtcaatttgagtattatgttgtactgtgtacccccccattgtattgatgggatatgtaaaaggtttcgtataaatgtctgctcccctgaccttgtttgttgcacgcaacacaat

SEQ ID NO: 55081 - DNA, 174 bp, Zea mays
  Clone ID: MRT4577_150230C.1
tcgatctcggtaccacctactccgggggcggggtctacaacaacaggcctctttacatacatctctattaccaaggcgaccccattacaaccttctgggtttcctttacccatagacagagggtcattagtgagggtttcacaaaccatgcagcctccaacccttagaggacca

SEQ ID NO: 55082 - DNA, 1010 bp, Zea mays
  Clone ID: MRT4577_150231C.1
ccggggcgttagcaccgggagccaaatcattcgccactccccaaccgtcccaggacccaggctcagcactagcagccatgccgcacctcgtcctgcttctcttcctcggcctcggcgggctcctgcccgcggcgtcggccgccgacgagcagttcgtgttcgacggcttcaagggcgcgaacctcagcctcgacgggatggccacggtcacgccggacgggctgctcatgctcaccaacggcaccagccagctcaagggccacgccttctacccggcgccgctgcggttccacggggcgcccgacggcacggcggcagcgatggagtccttctccacggccttcgtcatcggcatcatcggcgcgttcgaggacctcagcagccacggcatggcgttcgtggtcgccaagagcaccaacttcacctccgcgctgccgggccagttcatgggcctcgtcagctccgccaccaacggcaacgccaccaaccacctcttcgccgtcgagttcgacaccatcctcaactccgagttcgacgacatgagcggcaaccacgtcgggatcgacgtcgacggcctcaactccgtcgacgccgacaacgccggctactacgacgacgccaccggcggcgcgttcaggaacatgagcctggtgagccgcaagccgatgcaggtgtgggtggacttcgacggccggaccatgcaggtcaacgtcaccatggcgcccctggaggctgcccgccggcccaggaggcccctgctctccaccaccgtcaacctctcctccgtcatcgacgacggcaccgcctacgtcggcttctcgtcggccaccggcatcctcttctgccgccactacgtgctgggctggagcttcaggatgaacggcgccgccccgccgctcaacgtctcctccctgcccaccctcccggtcacggcacccaggccgaggtccagggcgctggagatcgtgctgccgatagcgtccgcggcgctcgtcttcgcggcggccctc

SEQ ID NO: 55083 - DNA, 371 bp, Zea mays
  Clone ID: MRT4577_150232C.1
ctattgagtcctgacaataagttgtattgaatttgagatgttggagcaaaacaatgtagtttgtttccagattgtcataaattaagtccccaaattattaagaggtcttaacttgataaagttgaagctagggctgcacgattttccatggatttttgacgtatgctgctgcatgttctttattatggtgctagttgtcacaatatactgagttgtagcaattgttacatttagtttattgtactggaggacggatcaatatggatatctatcgatgacgctatgtctccttgaactgctaaatatgaatcatatgatagtgacattgtttctacttcaccaacattagcagaaccaaaccttaagtcatg

SEQ ID NO: 55084 - DNA, 120 bp, Zea mays
  Clone ID: MRT4577_150233C.1
tgccacttaccgtctctctattccgcaatacattgtgccagttacaccgtcgtagcacatgtctacatggtcggggcaaatgacttgggtcccagattgcactatgattcacattcacta

SEQ ID NO: 55085 - DNA, 214 bp, Zea mays
  unsure (1)..(214): unsure at all n locations
  Clone ID: MRT4577_150234C.1
tgcagccgccgncgncaaaccacaccgggctcctntntggcggatagcggattgtgattttgatcggccgnccttanaccnnagnccagcccggcccgcgaaggagaagacaaagctgccgctgccgctaccgctacccctggtgcacggcgagcgtntgtgggcgcggccggggcggcggctgaagacggccgcggtcacccgccggacaaac

SEQ ID NO: 55086 - DNA, 433 bp, Zea mays
  Clone ID: MRT4577_150235C.1
tggtctggacctttgggctgatttatgtgcttgtttatgtgcttgttaagccgcagccgtctcttcttgagaatttctgttgttgttgtttattggagtcttggcccgtagcctcctgtcgaaggttacggattatgataggtttccatacggcgaccggcgacggcggcgaccgaattccgccatccgccagtaatcggtaccgaacctgttgagtatgctggtcaccctgtcggaggcgacgggttattagtcatacaccctataggacttaaatcttaagtattacgggattatggctcgggacgtactaacggcgcccgctaagcccccggaaaagaacagtagaaaaggctgtccccgcttgcttaaatcaaaaggaaagagagcgaccgaaccgggagtcggtcgtggctcactcgggcctggaacg

SEQ ID NO: 55087 - DNA, 535 bp, Zea mays
  Clone ID: MRT4577_150236C.1
cgttgctgtcggcagccccagcccgctcgaccctccactccatagcgccgtcgtgcccctgcctaagcgccgtccaaattcctgcagcaagtctcacccagcaacgcccagtggcggcatggtgcttcgcctcgcgcttgcgtgctcgacggatcgcagcagcgagccacgcccttcaactttgtttcggtctcccatgtgcgacgacgcattcgtcttcacgccacatgtgcagcaaccgcgacggagatttgatatggtgagccgatgtattattttgttgttggattggatatatatgtggctgcaatagttcttttgtgcgtcgtagagattggttcgcggatgtattaattatttgctaaagcacttcgtcgtaaagtagtgtgtgagatgtggtaaatttaataaagcgtaaagcatacttggtggtttccgcagtcggctaatgagttggtctaggataattatatttatgtattcatcgttggtgtaggttaaattaggtgaaaatgtaaattacgtgacatttaat

SEQ ID NO: 55088 - DNA, 324 bp, Zea mays
  Clone ID: MRT4577_150237C.1
aaatccttggggaggaaaaaaaaccattcaatcccaaaggttttgcaaagggttaattaataccccaagggctctatggggttccaaaattattcccaacctaattggttcatttattgacccaaaataggctttgaaatttaatcaaattgggggaccaaaagttcaccccccttggctcaaaaggagaggggcccagtggcctaaagttggaaacggtaaacatttccaagaaccccagggcgggggtcctccttttccccgaggataagctaaggggctccccccaaaattaaaaaaagcccctttcccgggccttcctta

SEQ ID NO: 55089 - DNA, 464 bp, Zea mays
  Clone ID: MRT4577_150238C.1
tgacactatacaatagctatgacctctcatgcacgcgtccctcagcctggatcctcgtatgaccggccagcctttcttcttttttttttttttttttttttttttttttttttttttttttttttgctggggagagtttaatttaaaaaaaaaaggcctttcccccttatatttcaaaacaatcctttatcccagaatttcagggccacatattcttcaacaccaaaaaacccaccttacctcaacccctattttaacaaccccctgttgttccttttaaaaaaagaaggattttttcaaataccaaatttcttccctaacttataaaggatcgaagttttttattgactcgaaagggcccatattttggggggggggagttgcccactttttaaaaccaaggcttaaaaaaaggcggaggtcacctaataataaacccctttttcccccatttttaaccaaaa

SEQ ID NO: 55090 - DNA, 304 bp, Zea mays
  Clone ID: MRT4577_150239C.1
gctgatttgtttcctcccatccaagctgatagccgctggttctacattattgacattcactttcacctcttgcctaccaaaaagcctctgcaccctactactgtcatgtccaccattaccaaaattgctacaccaactacatgcacaagctgtttctctataaatcgcatgtatttcgtgtatgccactgacgcgcaccaatttcttctatttctgccaaaatgatctatccacgtccagatctacctatccacaccctctatactgtacatcttgcacgtcaactttatgctactgagactgc

SEQ ID NO: 55091 - DNA, 620 bp, Zea mays
  Clone ID: MRT4577_15023C.1
tttcccccaaggaatccaaaaaaaggtttaggaagttcatggcaaagtacttcctgtcagttccagacacatggagctctgataattcatttaatccaggcaaatcctttggtcagagcaatcccaagttagcggaagtccccaatggtgatagcctgcttcagcccccaaatgaagctgaggggtgtgtttaatcacgtgcaggacttcctggcattttttaagcctatcccattgttgtttggcttttccctttgtaaaatggtgtacattggaggccccccctgttgatctatccaaaagtttgtggtttttaggcaaattgttgggcaagtggggtccccaggacatgtacctatgttcattgttaatttcccaattattatagtgaaattaagaattcgtatgatcatttttttggacctaccacttgtgtgactgaagcagtctattcttcacttatgactaactgtccaagaccaagatagacatttcctacctctattgaaattaggtcaatttgagtattatgttgtactgtgtacccccactgtactgctcgcctatgtaaaaggttccgtataaaaaaaaaaaaaaaaaaaaaaaaaaaaagggcggcc

SEQ ID NO: 55092 - DNA, 255 bp, Zea mays
  Clone ID: MRT4577_150240C.1
gggaggctcttcttatctttaaccactggactggatctggctttcaaggtgacttcgggaggtgaaaagggtcaatcatttttggccggggggaaagcacctggcacctaaagaagggccttatgggtcttaagccaatggaaaaccaggacctggtggttggggaaatgggggccctttggccagaaaagaagccttggcctggtcttcttcggttgaaacctaatttttggggagacacgggttcccaaaggg

SEQ ID NO: 55093 - DNA, 452 bp, Zea mays
  Clone ID: MRT4577_150241C.1
ctcacaaacgcccctcgagctccttgtatttactgccattacgctaggtctggtgtacattggttcctgcaatgaagaagatcgctcaagccattattcatgctttaatggtgcgcagcgacaacgaaatgggggaaccactttctcgcctgctgcctgtagcccttggccttctgtaccttggaaagcaggaaagtgtcgaggcttcggcagaggtttctaagaccttcaacgagaaaatccagaaatactgtgacatcacacttctatccttggcctatgctggaacaggaaatgtcctcaaggtccaaaaacttctgggatactgttctcaacatcttgagaaaggtgaaacccaccagggatctgcagtgctcggaataggccttgtggctatgtcagaggagctaggcattgatatggcaattcggtctctttgacatttgttacag

SEQ ID NO: 55094 - DNA, 439 bp, Zea mays
  Clone ID: MRT4577_150242C.1
gacgcgggggagaggcaccagcggcacagtttacccaagattagcggcgagaggccaccggggcgccggacgggcccgcaggcggggctcgcctcgctctgcccgcaaaccgccccgcacggactgcaccgtacctatataaacacctacatactacgacgcgcacccgtactacgacgagctgctgaaccacactaaatactagtgcgcagctgctcccttgccaactggctggcaccagccactccgctcctgtgcacgaaccatcgacagcacggggcgcgtagggccacggccggtcggcacgaggggagcgcccacaccactggaaagctcctcgggtgggtacaccctgcatgccaaacggagcggacgtgcactaagagcggatcggagcaccccggcgcacgactgaccaccccctctgccacgtaagaac

SEQ ID NO: 55095 - DNA, 320 bp, Zea mays
  Clone ID: MRT4577_150243C.1
acggacgggtgcaatatgacgacagatggtgaagataaatataatgattctgatggggattatgggtgataatcttagatgaaggcgagagattatcacctgacaaatgcgattatgattcatgtgatcaggatacataccactgatgatgacacaggatgaaacatgaactcctaaaaagccacatgctggcttgaagagaggtgctgaaaatgctctaaaaacgcctctttatgataagaaagcaaacgttgacacaccgacaacctagaaaacacttggcaagataggttccacccatgtggcatctacacactcag

SEQ ID NO: 55096 - DNA, 321 bp, Zea mays
  unsure (1)..(321): unsure at all n locations
  Clone ID: MRT4577_150244C.1
cgcgtccggaggaaccgtgtattacacaattggtcatcgcgcttgggtgaaaanccatgggggcgggggcgtaccggggggggggggtgacttaacgcctctaantcagaatccaagctagcaaccggcgcctctgctcggcggccggcccggcccacggtagggcgttcgcgccccaagggcccgggccattggctcagcccggccgggcgactcgccggggggggccgcctcgaagctccctttccaacggggggggtgctgaatcctttggagacgacttaaaacgcgacggggcattgtaagggggagaggggcgct

SEQ ID NO: 55097 - DNA, 234 bp, Zea mays
  Clone ID: MRT4577_150245C.1
ttttatttgttggctcacgcgtggtactgcttcagccacatcagcagcacgcggcggaggaattgcttctagagcgggcggagggactcgaccacatgcaggagtatgtgaaacattctggttggtccttgaaggctcaatagcaagagcatcatcgcgagtttaagcggaggctagattgcttttgcaggcgtagaagtataattaatactgggacagaaggatacatggtta

SEQ ID NO: 55098 - DNA, 701 bp, Zea mays
  unsure (1)..(701): unsure at all n locations
  Clone ID: MRT4577_150246C.1
ggccgcttttttttttttttttttcttttttttttttttttttttttttttttttttttttttttttttaccaagagggaaaatttattgggggccaccaagccacagtttaaacggcagtttgcaaaagctttttgccaggggtcatcaaaccacaattggaataggtttgcaacaaaactttaaaggggggggcatttagcttaaaggacatactagggccacaaggggggcaatatccagcatgaaacaaccgggccttaacacatacaaaaaccccaccgggggggaccaacccaacagcaggggtttacttatctcccccatcaaagggggcaaagggaaaaggtgatactttgggggaacactttggggccccattgaataagtatgggccttcaggggatgcagcccctatccccacaccagttccaagggcaactgatccccaacgggtattagggctacggaagagggggaggcccccaaaggccccccccggggaggagaaggccacccggcggatggaaaggtccaggccccccccccacttggggtccaggtccgcccccggggggacccccccctttggggggggggaacaaaaccccccgcccggggggggcttttgtggggccccccccctctcgcgcccccccctttgggggggggttccgcgcnctcccggctcgccccccccc

SEQ ID NO: 55099 - DNA, 863 bp, Zea mays
  unsure (1)..(863): unsure at all n locations
  Clone ID: MRT4577_150247C.1
cctcgaggccggccgggtaacatatcttatgtctccttttttagattgaattagatcctttattctttatttatttattaggctttggtaaccagattcatatcattgtctttatcaattgatgcacagatacacaaaacatggaaataagaaataaagagatatatgacaaaccacaaaaaatagtttactgatctctatagttcatttatcatatgaagcatttgaaaaagaaaaggatgaaaagaagaaacttcataactcctaaattgttgtgttgttgcctatgacaatgtgcccttatttgtttgtcgctaagcattagagtcggcagtcctgcaccctgaagccatccagatcaggatgcatggcagctggcttctggtgggcacttcctgttggtgcttgggcgcttggcccttccgcatgagcagaacaagcgcctctctgaccgtctgaaatggttggattggatatgaacaagcacaagccacaagcaaatggaatgctgggtcttgggagttgctgcattttctttggtcagtcaaacagagtaatttggccatggaatatagtgggtcactggtgcgacactgcttgttgtggatgatcgttttttgccttttctttttggttgacacaaatttagaaatgaactccccggatcgaagtgctcagctaaaatggctatccttgaataatgataaggaccagtnatgcatactangcggtgtactcccccaccctctttgttttttatttaagatgacatctttgnggcagtaaaagccattttttgtttgtagatcatttcagcttatgctatgctgntttctttcatttcaagatcttttcttcgacga

SEQ ID NO: 55100 - DNA, 2110 bp, Zea mays
  Clone ID: MRT4577_150248C.1
tgggaccctcgggccgggaaaaaaaaatccgtgccaccgaactcctctcctccactcgcctcttccacgccacgcggatggcgtgcgcgcacgcaaggtccaaagaagcaggccatccgggacggcgcgagcgcgtcctgcgttccattccaccctcctcctccgtctccgatcctcgccttcaactccactccctcgctctctcgggccttcttccctagcggcgacgacggggtgatcactgattcactgccgcccgcgccaggtcggccagaactagtgggcgccaaacatcatagcgatcatggaggtggtctcttgcagccactcctgctcggcattacatcaaacaccagcaagcacatggaggcttcggggcagtgctcttggccttggtcttgggcatgccaggccttcccggaccagaagatacacagttgcgtgtgtaggaaccacgagtggagcttcgaatccgggtggttccggcaaggtccatgcagcccagggattccatgtaagcgacgtggatgcagccctgcagggcattccttccatgaaagccggggaggccgagagggtgatgattcaaggccttccggaaggccctgacagctccccgatcagtactgggttctgggagtggaagccgaagctgactgtgtactacgagaggtccggcatgaagaacagcaaggcacctgcggtgctcttcctgccggggttcggagtcgggacgttccatttcgagaagcagctgagggatcttggtcgcgatcatcgggtgtggacgatggattttctcgggcaggggatgtcgctgcctggtgaagatcctgctcctagtagcatagcgagcgaagaggcgttttggggctttggacaagattcgcagccttgggcagaggagctggtgtattctgtggatttatggcaaaaccaagttcagcatttcattgaggaggttatccgtgaaccagtttatattgtggggaactctcttggaggttttgttgctctgtattttgctgcatccagtccacaccttgtaaaaggtgtcacactgcttaatgcaacaccgttttggggattctttcccaaccctgctacatctccccgattgtcaaagattttcccatgggctgggacatttccgcttccatcatttgtgaggaaaattactgaagcagtttggcaaaagataagtgacccaaaaagtattcaggacatactcaaacaagtatacgctgaccattcaacaaatgtggacaaagtattctctcgtattgtggagataacacaacacccagcagctgctgcatcgtttgcctccattatgtttgctccaaggggtcagatatccttccaagaggccatctctaggtgccaagaccaaggcattcctatatctctcatgtatggaagagaagatccttggattagacctatttggggccttaaagttaaacagcaagtgcccgaagcaccttattatgaaattagccccgctggtcattgtcctcatgatgaggtccctgaggttataaactacttgctccgtgggtggctgaagaacctcgagtctgagggctcagtcgacctgccgtttctagaagaacgcagctatgctgagcgtggtgtatccagggagctggagtttgtcagagaaggatcaaggaagtcagttagtgtgcggctctatggtaccaagatttccctatggagccagctaagctcattcttgaacacacgtgtccccaagtcacggatagtcttgagataatccatcctcaactccaatagatctcaatcttagaagctttgattcagatattgtatttattactttattaaattggtcagcagacagtgtttccagaattcctagtgcatgtaaatattggcactgcagtggtagtttcgaatttatcatgattcatatcatgtcaagatatgcttgaagttctgttcatagctacaagggaacatttcatctatgtatacgtactcagcaaaatgatacaaattgagcgtggataggcgtcagattctacgagacgaccttatattgcttcctgtcatcatcctttgaaaaaaaaaaaaaaaagcggcc

SEQ ID NO: 55101 - DNA, 974 bp, Zea mays
  Clone ID: MRT4577_150249C.1
agtggtcagcccagcctgagaacacatcggagaccggggcactcatttccgcgaggcccattaccgtcacgatgcgaacagatgaaggtgcaaatgctgccgtagcagtctataacttgcttggcaagctgcaactaagctttctttatctcataggggtgatagtcatggggtttgagcacatcaggaacattgtaaggataatgaagccagcaagggttgcaccaattgactcgtgaggaccaaaatacgtgtaaattattctttgagaccttgttgtgggagtcgagatgatactttttcacttctcccccatacctggagatgatgattttagagtagcatctccaacacatgtgaaactcttcggaggaaaggcctgctcatagtggcagaataatccgacacggataacactgaacaaacagtgcccgcctggacagaagtgtctgggccacggttggtgtatgcacatgtacctgtataaagagtatctgtaacttgctgcttctatttcacggccacatgctgcgctggtgctgtccaccatgcttctgtaccatactgaaatttcaaaaccattctttgttgctcatttccgtgtggcttgctccgctgtctgttttctgcaggtgcaggggcagtgcgtcggcgtcgatgatgatggctccatttgcctcgccggcggcagcgcaaacacgaaccgttgccctgctcggcagactggtcggtcggcggcaagtccttagtctgtcttggcaaaatcagggtggacggctgcgctgccgcttgccgatgcctggcgtccggcgacgatccacgggccacggtgtagggtaagcacttgcgacacgcgaggggaagccggcgaggaggaagaagtgcctcttctcttctacgcgcgccgagcgagagagaataggtaggtgaagagaggagaggaggagaagggtggccgcgcgtgcggtccaaac

SEQ ID NO: 55102 - DNA, 214 bp, Zea mays
  Clone ID: MRT4577_15024C.1
cggactcttggggagcaattagagccgtggacggttgctggcatgcatttcttcccgccctggacagtgtggccgtgctgatggtgtcatacttgctggtaaagagcttgagttctacatgaagaagctacataggaagaatggcaagagcgctgttacttagatcattctaatggattgttttgcaccgaaatgtgtgtactgatgagtacac

SEQ ID NO: 55103 - DNA, 156 bp, Zea mays
  Clone ID: MRT4577_150250C.1
cgcgggtacatagcattactgagcacatgtcatgacacacagaagcgttttataagatcatgtgggatgcctgtaagtccacattgtgcaccgtgtatcctctactaggagaaccgttggttccactatatttggggtctgtgaccggtcatggtt

SEQ ID NO: 55104 - DNA, 1822 bp, Zea mays
  Clone ID: MRT4577_150251C.1
tgtctgtctgcaagcttctcctgagaaatttatgctttctaatgctcaacttttgtctggccgcttttttttttttttttttcgagaaaaatctactgcacttttgtcatatatatattgagcgaactaagatgacatcagacattgcagttatctgaaagcatcattgatcacccaaccaaatattacttttggagatagttgttccccattactaggtctagcagagaataacggaattatacggcacaataggttactaaaagtcgtatttggaatcaagttgactcaagtatctaggcatgtggcttagcacgcactcagcacaatactttctggtgtttggttctctcgcttgttcagtcttatcatgaaaagcacagtaggaactcatgtaaccttctatgaattgcaggtgaacaatgcacttatggatctgataaaggccaccggatctgtgatgaaacctgaagagtggtcagcccagcctgagaacacatcgggtaagcttaagaagactaaacacctccgatttctcttcaaggctaactgttccggatcaaatctcttacgctgcatcctcatcagagactggggcactcatttccgcgaggcccattaccgtcacgatgcgaacagatgaaggtgcaaatgctgccgtagcagtctataacttgcttggcaagctgcaactaagctttctttatctcataggggtgatagtcatggggtttgagcacatcaggaacattgtaaggataatgaagccagcaagggttgcaccaattgactcgtgaggactaaacagcgtccccccagcgtccgaaaaggatacacatactgctccctcgattgcaataccagcgaaacaaattattatctgccttgtggcttcgcacctactgaacttcctctgattctgcaggaccaaaatacgtgtaaattattctttgagaccttgttgtgggagtcgagatgatactttttcacttctcccccatacctggagatgatgattttagagtagcatctccaacacatgtgaaactcttcggaggaaaggcctgctcatagtggcagaataatccgacacggataacactgaacaaacagtgcccgcctggacagaagtgtctgggccacggttggtgtatgcacatgtacctgtataaagagtatctgtaacttgctgcttctatttcacggccacatgctgcgctggtgctgtccaccatgcttctgtaccatactgaaatttcaaaaccattctttgttgctcatttccgtgtggcttgctccgctgtctgttttctgcagtagcagatgtaggtgctctgagtctgttttccgatcgagctgacatcatcatctttcttgcaaagacatacactgcgcttaagcggccgaaacgctgcaagcgtgaagatgctgcaggtgcaggggcagtgcgtcggcgtcgatgatgatggctccatttgcctcgccggcggcagcgcaaacacgaaccgttgccctgctcggcatactggtcggtcggcggcaagtccttagtctgtcttggcaaaatcagggtggacggctgcgctgccgcttgccgatgcctggcgtccggcgacgatccacgggccacggtgtagggtaagcacttgcgacacgcgaggggaagccggcgaggaggaagaagtgcctcttctcttctacgcgcgccgagcgagagagaataggtaggtgaagagaggagaggaggagaagggtggccgcgcgtgcggtccaaaccccggcccccacgcgtcatcacgggcggccgtcgactagtgagcta

SEQ ID NO: 55105 - DNA, 285 bp, Zea mays
  unsure (1)..(285): unsure at all n locations
  Clone ID: MRT4577_150252C.1
cgtagatcagtttgtgagaccccaacttgttttcttaatcattcatccccaatattcagaattatattctttcttgttagtanctatnccttcaattctcattctttaattaaccctcgtggctaaaacaatcacacagcccacggccgataaccagtagttaaatggtactgccatcactcaacatctagtccacataattagaatccggatcattaactgacatcttcaccaaatcaatagtcatcttcacctgacagaacatcaaacacccctttcctatca

SEQ ID NO: 55106 - DNA, 523 bp, Zea mays
  Clone ID: MRT4577_150253C.1
gaactgttcaaaccacgcatattgaatactagtaactttgctggcgggaaggaagctgacaaacctgcaagggcgagggttgctccctgtagtcaccagggggggaaaaagaaacgatggggggagccaatcttgttagtcccacttaatgacacagactagcacaccatctcgaccgggtgcgccctcctcatgagtatagaggttcaatttgatggactgaacaacaactcccaatttgcctgaatgatacggctactgaacccacggaactagacgacccctccaacaggtcctacaggtccatgggaacacaagacttaatagccgatgccaagtcttctaaaaggaacttgccagctcaaagttcatgtttaagcaatgctctgaaactatcatatccatgcaggcgtacttgcttatcttctggtatcggccaccattaccaacctggaatgtcctctggcctattagagataattagggctcccttaagtacatcctgtaaagcggggctatcaac

SEQ ID NO: 55107 - DNA, 532 bp, Zea mays
  Clone ID: MRT4577_150254C.1
aaattgggcacccggcaaatagacagggaaagtggaaacattatgaacacgggaggcttatgtttgcacgattcatgcaggttcgtgacccagacagctttaaccacggtgaaacaattttcattgagatgccaacactaggatcaaacaaatgacatggaggaccgactaccatataggtaagcaggcggggtacctaactatattaagtagaaccatctggaggtcactgtaggctcacaggaatgccaactggaactaacgacgcaaaccgttggagattggcaaaggatgaaaccccattatacaggaccttggccatatggtcagaaaatcgaacaaggatgctttgttccactaactgaacaaggaagagaaataaaaccatcctggggacctcgatgaaggcctgaacaagaaaccgtgaccatatctggccatcaaaaagccacatccggcctttgaggaccgcaagaccaattccacgtatgtttgcagttatctccaaaaagagcccttgttcctcgcaaag

SEQ ID NO: 55108 - DNA, 1594 bp, Zea mays
  Clone ID: MRT4577_150255C.1
ggtggccacacttgctgctgttgttggtagccaagctgttatttcagcaacattctccattgtgaaacaatgccatgctttgggatgtttcccgcgagtgaaggttgtccacacatcgaggtggatctatgggcagatatatattccagaaataaattggattcttatggttctttgcgtcgctgtcactattgcatttcgtgatactactcttattggcaatgcctacggtattgcatgcatgactgttatgcttgttactacattcttgatggcattaatagtcatctttgtttggcaaaggaacataatattttccctagttttcctggttttctttggatccattgaagctgtatatctttcgtcatctctcatgaaggttcctcagggaggatgggtgcctcttgtgcttgcattcatattcatgtcagtcatgtacatctggcactatgggtcaaggaggaagtaccagtttgacctacagaacaaagtatcaatgagatccatcctatctctcggtccaagccttggcatagttcgggttcctggtgttggattgatttacacagagctggtcactggtgtaccctccatcttctcccattttgtcacgaatctccctgccttccatgaagttctagtctttctctgtgtgaagtcagtgccagtgccatatgtttcaccagatgagcgataccttgtgggtaggattggacctaaagaatatcggatgtaccgttgcattgttagatatggttacaaagatgtgcagagagatgatgacaattttgagaacatgttagttatgagcatcgcaaagtttattatgatggaagcagaagatgcttcttcagcaagttatgatatcgctaacgaaggaaggatggcggtcataacaaccactgatgcctctggcagcccattggccatgagggatttcgacggcctagctgactccatgtctacgaggagcagcaaatcagaaagccttcgaagtttgcaatcctcctacgagcaagaatccccgagtgtaagccggcgccgccgtgttcgctttgaggtcccagaggaggatggcatgggccggcaagtgaaagaagaactcatggcgctggtggaagcgaaacatgctggggtggcatacatcatgggccattcttatatcaaagctaggaggagctcaagtttcctgaagaagtttgctattgatgttggctactctttcctccggaagaactgcagaggtccatcagttacgctgcacattccacacattagtctgatagaagtgggcatgatctactatgtttagcctaatgcccatggccaaagttgacatgtggatacccggctgggacaattctgttttcccttcagtcctatctggcagcttgtgctttctgggccaaggatcctcgtgcgcttaagtttcagcttgtagagaagaaggcagactttccttgttaatattaatttttagcctaaataaacaagcagaatgttgccggttatgtttctcatttggtatatttgcatgcatgctctgtattttttctgcgggctatgtgatggaaatatatgcactccttat

SEQ ID NO: 55109 - DNA, 2604 bp, Zea mays
  Clone ID: MRT4577_150256C.1
ccgggaaaaagatcgttctctggaaagcttggattctaccaagacgaggagatagtgttcggcgtactttcgctcatcttttggaccttcactctgattcctttgcttaagtatgtcatcatcgtcttgagtgctgatgataacggcgaaggtggaccagatgagctctattcgctcctttgcaggcatccaaaacaatatttgctgtaaaatcaacaagcagctgatgaggacaaagattcatagagaggaaatgggtattcggctcgcaatggatctatgccttggtcaagaaggtttctggagaagcacaaaaaaatgaggactctgtttctttgcatagttctctgtggcacgagcatggtgattggcgatggtgtccttaccccagcaatctcagtactctcgtctatgtctggattacaagttcgagctactggtctaaaacatagttctgtagttctcctttcgtgcattgtgttggttggtctatttgcattgcaacaccgaggtactcagaaggttgcattcatgtttgcaccaattgtcatcatctggctgctttccattggaggaattggtttatacaacattcttcattggaacccaaatgtatatcaagctctctctccatattatatggttaagttctttagaaagacaggtaaagatggatggattgctttaggagggatccttctttctatgacaggcagtgaggcaatgtttgctgaccttggtcactttacgagtgcatctgtcagggttgcttttattaccgtcatatacccatgccttatgctacaatatatgggtcatgctgcatttctgtcgaagaacacatttcacatgccgacaggtttttatgatactatcccagaaccagtgttttggcctgtctttgtggtggccacacttgctgctgttgttggtagccaagctgttatttcagcaacattctccattgtgaaacaatgccatgctttgggatgtttcccgcgagtgaaggttgtccacacatcgaggtggatctatgggcagatatatattccagaaataaattggattcttatggttctttgcgtcgctgtcactattgcatttcgtgatactactcttattggcaatgcctacggtattgcatgcatgactgttatgcttgttactacattcttgatggcattaatagtcatctttgtttggcaaaggaacataatattttccctagttttcctggttttctttggatccattgaagctgtatatctttcgtcatctctcatgaaggttcctcagggaggatgggtgcctcttgtgcttgcattcatattcatgtcagtcatgtacatctggcactatgggtcaaggaggaagtaccagtttgacctacagaacaaagtatcaatgagatccatcctatctctcggtccaagccttggcatagttcgagtttttttttttttttttttgctgcctgacaatagtgttgtattaccaaaatcaaattgatttacacggagctggtcactggtgtaccctccatcttctcccattttgtcactaatctccctgccttccatgaagttctagtctttctctgtgtgaagtcagtgccagtgccatatgtttcaccagatgagcgataccttgtgggtaggattggacctaaagaatatcggatgtaccgttgcattgttagatatggttacaaagatgtgcagagagatgatgacaattttgagaacatgttagttatgagcatcgcaaagtttattatgatggaagcagaagatgcttcttcagcaagttatgatatcgctaacgaaggaaggatggcggtcataacaaccactgatgcctctggcagcccattggccatgagggatttcgacggcctagctgactccatgtctacgaggagcagtaaatcagaaagccttcgaagtttgcaatcctcctacgagcaagaatccccgagtgtaaaccggcgccgccgtgtccgctttgaggtcccagaggaggatggcatgggtcagcaagtgaaagaagaactcacggcactagttgaagcgaaacatgctgggatcgcatacatcatggggcattcttatatcaaagccaggaggaactcaaatttcctgaagaagtttgctattgatgttggttactctttcctccggaagaactgcagaggcccatcagtcacgctgcacattccacacattagtctgatagaagtcggcatgatctactatgtttagcttaaggcccattgccgaagctcacatgtggatacccggtcggggcaatgcttgtgctgtctgcggattgtggtgtggaaggagttcaggcttgttcgttctgggccaagtttcagcttgtagagaagaaggcagacttctttgttaatattatttttagcctaaataaaccagcacaatgttagacggtgatgtttctcatttggcatatttgcatgcatgctctgtaattttttctgcgagctatgtgatggaaatatatgcatcatctttataaactggtcagggttctactccttccgtttcaaaataatagttgttttacctcttgatttttatgtct

SEQ ID NO: 55110 - DNA, 1564 bp, Zea mays
  Clone ID: MRT4577_150257C.1
cacgcgtcagccatcgcgtccgcgacctgctccccgccgcggagcacgagctcgccgacgacgtgtcggacctcctggcgctcgcgtcgcggcagtgccgccgcgcggcggccccggagctggagctgaaggcgggcgtgctcgcgctgatccaggaggtggagcgggagatcgtgccggagcgggagaggcttgagggtatcctggaggacgtgggcatcaacgaccccgccagctgcagcgacgagatcgagaccctggagcgggagatcggcgaccgcgtcgccgagaggtggacgtcgtcgatgatcgccctcgtcggcctcctccgctacgccaagtgcgtcctcttcagtgccgccacgccgcggcccgtggactccaaggtggatctcgacgacgcggagccaccgtcgccgccgccggacttccggtgccccatctccctcgagctgatgggcgaccccgtcgtggcttctagcggtcagacgtacgaccgtgactccatcacgcggtggttcggctctggcaaatccacgtgccccaagaccgggcaagtgctgctgaatctggaactcgtgcccaacaaggcgctcaagaacttgatatcgcggtggtgccgggagaacggcatccccatggagagcagcgagtccgggaaagccgagccggcggcggtggtaggcgcgaacaaggccgcgctgaaggcggcgcgcatgaccgcgtcgttcctcgtgaagaagctgtcggcctctttctcccccgaggcgacgaagcgcgtggtccaagagatccggcagctggccaagtccgggtccgacaatcgcgcgttcatcggggaggccggcgccgcggggctcctcgtgccgctgctcctgtccgaggactcggctctccagctcaacgccgtcacggcgctgctcaacctctccatcctggaggccaacaagaagcgcatcatgcacgcggagggcgccgtggacgcgctctgccacgtcatgggctcgggcgccacgtggcgcgccaaggagaacgccgcggccaccgtgctcagcctggcggccgtccacgcgtaccgccgccggctcgggcggaacccacgcgtcgtcgagagcgtcgtgcggctcgcgcgcacgggcccctccagcaccaagaaggacgcgctcgcggcgctcctgtgcctgtccgccgagcgggagaacgtgccgaggatcgtcgaggccggcggcgcggaggcggcgctggccgcggtcggcgaggccgaggccgaggccgccgcggcggtgctggcgtcgctggcgaagcgcggcggcgcggaggcgatcgtcgcgctggacggcgccgtggcgcggctggtgaacgagatgcggcgcggcacggagtggtcgcgggagtgcgcggcggccgcgctggtgctgctgtgcaggcgcgccggcgccgccgcggcgtcgcaggtggtggcggtccagggcgtggagtgggccatctgggagctgctgggcaccggcacggagcgcgcgcgccgcaaggccgcgtcgctcggcagggcgtgccggcggtgggc

SEQ ID NO: 55111 - DNA, 142 bp, Zea mays
  Clone ID: MRT4577_150258C.1
agttaccctctaatagtttagggcaggtcatcgtttccatcaattcagggtttttatcgtatcacaggctctggattccactatgcaaatcaataaaaaggttcatggatacgatgaaaaacagggaatatgaacctacaca

SEQ ID NO: 55112 - DNA, 508 bp, Zea mays
  Clone ID: MRT4577_150259C.1
aagggggacatttattaaaaagaaccccaacaggggccgggcaggcaaggggacacaaagctaaactgcattactatagcagaagaaacaagcatgcattattggacgggaaaaaaaactaagggttggttaaacaacctaactcgccagatatatacccaaaaaaccccacctagctggtgcagggcaaaacggccctgcccccacaggcatgactcaggagccataaatgaaaacacaggaggagcccccactggggggggggacccccaggggggggcgaaacaaaaacttggttaacaaaaacattaacccccgaaaaaggccggggggccaaaaccatcccggggccggggttaaaaaaggggcccccgttgcgaaacacccagggctcgcaaaaaaaaccacccccggcgcaaagtttcaccgccacacccccggtgggatcagcagccaggccctgccattgaaggaggaaccacccgggcgggcgtacggaacccccggg

SEQ ID NO: 55113 - DNA, 370 bp, Zea mays
  Clone ID: MRT4577_15025C.1
gaccaaaggcatttttttttggtgtgtggggggggtaacaaccctccctaaactcctttttaataacccaggggcactggggggctgctataaccaaaaagttatacaagctggggggactggaaacacaatggggtcaggagtttccaacgaaccggacaaagaccgaatgaggaaacttttaattgttatgagcatgatcatctttcttacccttattgaacatggaaccccccttttcgtatactttttcgaggggtgccaaatccttacgggccttagaaaaattgggctttcaattgcctctccgaatatcaaaggtcaaaggtcctcctaggggacatgaggttcaactttggggccgtggggg

SEQ ID NO: 55114 - DNA, 874 bp, Zea mays
  unsure (1)..(874): unsure at all n locations
  Clone ID: MRT4577_150260C.1
attgggacctcgaggcggcctttgtttttgctaatgtgctatgtatccatcaagctctaagaaatgaaaattggcaaatcaattgtgtgcttgaggatttggcactagcaatggattctaagttcgataaatactgggagaagggcaagtataatatggcacttgtcatagccactatacttgacccgtcaaagaagatggattttttggactttttttatgagaagacgtgtcaacagtttatcgacatccagataaacatgtccttggccaaacaatggttcactaaattttttggtgaatatgcaaaaattgttcaaaaagatactacagtctcacctattgttgctacaaatactagtactttgggctcaccgattcttggaaaaagaaggttggataaagaattttctcagtggtcccaaacaagaggaagacgtcttgcaaagtctgagcttgacgcatacttagaagaagaatttgtgagaacagatgaaagatttgaaattctaagttggtggaggacaaatacaaacaaatacccagtgctttcagctatggcgcgtgatttattagcaatacctttgagcactgttccttcggagtctgcttttagcgccggtggtcgcattcttgctgataatcgaagctcaatgacaccagaaacacttgaataccttgtatgctgcaaggattggttgtatgagtacccaaatattcaagtttatcccagttggtgtttggacccagctagcagcaacactcatcctacccgtggaaaatggggagatttatgcgtcgtccgatgggcttctgtggctatctagatgtcccctttcattgttgctagcttncagcttgatcacagactctt

SEQ ID NO: 55115 - DNA, 373 bp, Zea mays
  Clone ID: MRT4577_150261C.1
ggcgaagggggcaccctcggagcccgccgggacagcctatcttattgagaccaagtagacagatagaaagcacactctccaaccaacaaaggcagccaaaatatatagagtaattatacctcttggtctttcctgaagtgctgcatttgctaccatcttcacgaaatgctcgcaagcttctatagcttctcttcctaccccgaacatactacaagcgagcgtcttagtcttgtgaaaacccaactatgcaacctctacagcattcaagcaggcagacacagtatgacatctacagcatcataacccaaggcccgctaacagtcatcactccctattacaacatgtcacctctaggagcatttatatgccacac

SEQ ID NO: 55116 - DNA, 301 bp, Zea mays
  Clone ID: MRT4577_150262C.1
tcttcatgtcatgatcctttacctttctcattcaaccacaatacttacctttctgccaacgtctcttttttaacgctgacaccctcttacaacttcaacaataacttccattcaaccaacttgcttttacaaacccatcaccttctaccaacaacccatcattaatagtaaccctttttatatttaatataaattataaatcaataataaaattttttgtctgataaaaaaagcttcccacaaataacaaagtacatttctaaaaaaaaaaaactaaatacccgacgatctacattatcca

SEQ ID NO: 55117 - DNA, 643 bp, Zea mays
  unsure (1)..(643): unsure at all n locations
  Clone ID: MRT4577_150263C.1
ctcgtcttctctggcgcgggggttcgcncgaagctcatcngtccgatcggacgccgccgnggggaggcgccgacgccgagtttttgctccgtcccgcatccaccgccagaatgtttctcacgaggacggcgctcgaccgcggggttaacaccttctcgccgggggggggggggggccaggtcgcgtccgccctcgcggccagcgcgtggggctccactgcgatcggggtcggctgcatagggtggggttgggcttgctgtcgcgaccgtgcgacctggcctctgctgggtccgggccgtgcggccaggctcatggccttcggtgagcccatgcgctgggccctgagtgggcttattgctgcggctggcgcgctgccctagcgcgctcgggctgaaactcagactcctgggttctcatgcggggggccgttggccgtggactcttcggctcaagctatctgcgacttagctctgggctttggcgactgcgtcgtgcaggcaatggcgcggccgtgggggggctgtctgctctttgctgggcgcggtgggggccgggccgancctgggctgcgccggcccgtgggncgccctctggggttggggcgcccgcgggcgctccgtctcgcgctgctggggacggcccg

SEQ ID NO: 55118 - DNA, 393 bp, Zea mays
  unsure (1)..(393): unsure at all n locations
  Clone ID: MRT4577_150264C.1
acagcaacgaccgncccgaagnaagccggaaaaaagggcaggaaancgccaccgcccgcaccnannngagcagccgcnngnnnccnnccgcaanccgcgnccccgcngcnccncaanncgangggcnccgngncgacccccaggnngagaaggaaagcancgcgagnncgccaaacgggagggnnccaaagcgccnnncngcncacgccccncnngcngcncgccgcggcccgnggaccngcngcacangccaacgangcngncnngaaggaacanannncnncaaccaagaaaccngcccgncncaagaggggcagcggaccangcncggcccgngaaaacnncacgagcgaagccgncacnaaacncggcnaggaacagacacaggacagg

SEQ ID NO: 55119 - DNA, 182 bp, Zea mays
  unsure (1)..(182): unsure at all n locations
  Clone ID: MRT4577_150266C.1
tcgcccacgcgtccgccaccatccgacagtaagcgagtacaaaactgggtgtggaagtccaggacgactgttctcaacgggcctcttcagcagtccgggggcagaacancgcaagtaaacaggctcgactcatccangcaaagggcgcagtacccgagtcgctcacaagtaccccgcgcgct

SEQ ID NO: 55120 - DNA, 350 bp, Zea mays
  Clone ID: MRT4577_150267C.1
aaaaaaaaatgacatcaaacatcgattgaaaaactttgtaactttgacaccatatgatgaaatgaaagcattcgtccatgcttgacaaaaaacagcgttacaaaaacattatttaatcctcgtttccacattcacgggcttatttacacccttattaaaaaaacacttgatgatgccggcgccaaacctgcggcctgggcgcaaatccgcgtcctccggcccgccttttactacttggccatgccggcctcgtcctcctccaaaatcctcatttttttgacggcctgcgcaaagtctttcctgggggagctgggggggacctggaacaagaagtccaacttaatccccgt

SEQ ID NO: 55121 - DNA, 137 bp, Zea mays
  Clone ID: MRT4577_150268C.1
gattaatttcggccgaggggacgatgggactgtaggcaccctacgaggacctgcaggaggccgagcgccaatgcctcgtggacgaacacgcacacgctgacaatgctgctgatcggcgaacccaccagcactactgc

SEQ ID NO: 55122 - DNA, 586 bp, Zea mays
  Clone ID: MRT4577_150269C.1
ggtaccggcgcccctcttcgagttttttttttttttttttttttttttttttttttttttttttttttttttttttttgccattccgaacaaagacacggagattttttggccgttgtgccaaatgatttgagcaagtgcgtaatcctgctgtcacacgttcttttctgtcatgggaaaaggagatcttccaagggatactttggccggcgtcatgccaaaaccacatggcaaagggtatggcgggaacttttttttttccttaaacttgaacttctgatacattggggcattttgcttaaaatcgggggaaatatattccacaatatggacgagggaaatcttttacggccgttttttcccacggggaatttttcccaaaacggttacaatcaaaaccatatacttgtgcttgatggacacccctttcttttttgctagatggaccccatttttcactttccattgaacccccttattacaactgggccataaaacccacgtggaccacagcaacccccaccttgtttctccaatgaacgtgcgcaagaatgaagattctttgcgcgcccaattaaaccgaggta

SEQ ID NO: 55123 - DNA, 250 bp, Zea mays
  Clone ID: MRT4577_15026C.1
tactttcctccgaggagccagaggtagcgagcgggggttgatgaagcgtgtgctcctgttgccgcgacggaagcgcgctcggggaagatgacagagggggtcgaggtcgtggccctcatggacactgagccatcaaaagggctgaacgaggaagtgagagcgactacggcgcccatcacgcgcactgcaccatgatgatagatagagaagtccaagcagcagaggcactgaacaatgcccacagatcact

SEQ ID NO: 55124 - DNA, 584 bp, Zea mays
  Clone ID: MRT4577_150270C.1
gtacccgggtccccccctcgagttttttttttttttttttttttttttttttttttttttttttttttttttttttttttttttccaaacaccctgccaaaaatttttttcccaaagcccaacccaagcccggtcaagggaccaaaaaacatttttttttaagaaaagaaaaaaaaagggggcaccccaaccaacccccggcccggctttaaaaacctacccccagttaaacccatttaaaaacccccccccttttaataaggcgaacaatagggtttttttggaaaggccaaccaaccccaaaaaatttttcctgggtttttatgggggcaaaacctttcaattgggaggtaattgggctggaaagggggaaaaggcttccccccccccaaaaaaggaagtttaaccccttttggtggggccccccccaccctttgttttgggggaataaacccctaaaaaagccccctttccttttattggaaagggcccgggtctaaaaaaacctttgggggtaccctatgcaaaaaaaggttgaaaaaaaaaagggcaatttgcccaaagaaaaaattcccttaacccct

SEQ ID NO: 55125 - DNA, 277 bp, Zea mays
  Clone ID: MRT4577_150271C.1
tgcgacttgcgagccttcctgcatctagttttcacttctaatcgtcgccaagagagaaggccttcggggtccttttcaaccggcgccgccgactctcgtgttcctccccgcgtcctcgttctccttgctgctggacccgctcgtggggatcgacctgatttctcctgtgctggcttccaaggtagaaacgaagtcttttgttacatcatggccttaccaactgcagcgcctattttgcttgaccagaaccaacagctcaatataggcaacagggcca

SEQ ID NO: 55126 - DNA, 368 bp, Zea mays
  Clone ID: MRT4577_150272C.1
ctcctccaacaaagcttatgtcatttggccatttgggacataacatccttattgctgtgtatcaatacttttgttggagaaaggaagaaaaataaattaaaacgcttacagatacaagtgttcgagggagaaagaaacaaatccaagagaacacaaacatttcagcaacagctaacaaagcttggaacacgatggcatgattaaatcttcacttgggagtttgctagggggcaaggtccctcgatcagcaacaacgggtccagtctatcacgcgttcaaattctcacatatcgttctgtcacatatgctgctttaatcacccgttagatcttcaaaatatccataacccatgaagaaatgatttcgtt

SEQ ID NO: 55127 - DNA, 513 bp, Zea mays
  unsure (1)..(513): unsure at all n locations
  Clone ID: MRT4577_150273C.1
agcagtnggaacaacgcagagtacttttttttttttttttttttttttttttggctttttttttttcttttttttctttcttttttttttgttttcttttcctgtttttgtgtttacctataaactattaagccatcgaggtatatacataggacttccgggagaccacaaagaaagcaaggcccccccacaacagaagaggaacaccccgggaacggcggcccccccagcaagaaggcagcggggggggaaaaagcaaagggcccccccacaaaaacaggacaggagggcggcaaccccccaaggcaggagaaaaaggggcaaacaggagggcccgaagaaaccgggggggcacccaatggggccgggccccccaacgaggggggggcagggggggcccccccccccccacgcgggggccaaaacgccaaaaacgggggcccacggaaaccccgaggccctaaggttttggctcgaaaaaaccggggccccgccccccgctttcccccccga

SEQ ID NO: 55128 - DNA, 327 bp, Zea mays
  Clone ID: MRT4577_150274C.1
ttgttggagtgacgaaacacgagaacaccggcgcaacacggcattttgtcacagtgtggtccacacgactacagcacaagagacggtaacaggcttattaggtccccctgccatgcatagaaccactactactttactttgcaggagtagctatatatatgtgagcacgcacgctcacacaaggaaaaacactacaccgccggcctcgtcagtggacactatttgcagaccaggccagtggtggccttgccgatgccgcagggcgcgtaggtcggtttctccacggcgacaccccccacggacccgtggttctcgccagagaaccgc

SEQ ID NO: 55129 - DNA, 505 bp, Zea mays
  Clone ID: MRT4577_150275C.1
cctgcggttccgggccggacttcgggtcgaccagcgtccgccgacgcgtgggctccgctttcgcatcaatgaacaacgtacgcaaatgctataccttgtgtgaattgaagaatgcagcaaaccatcataccttttgaacgcatgttgagcccgaagacttatggcggagggcacgtctgtctgggcgtcacgccaaaagacactgggaacaccctcctggggggcgagggacgtgacagttggacacccgcgccgcacggcgaggtgggccgaatctggggctgcgcggcgaaccgcgcaggtggcacgaagtggggggtgacatcaaaccgttgctctcgcagcacgttgcgggcgagctgacggtcattctgtcctaacgacccatcgagcgaccgaccttgatctgggactgaggacccatgtaacgagcgacttcgcgctgaatctaagcatataaataagcggaggatacgaaacttattaggatttctctattaacggc

SEQ ID NO: 55130 - DNA, 373 bp, Zea mays
  Clone ID: MRT4577_150276C.1
gcctccagctcggacgccagcgaggtgcgcgctgagcgcgagtttggatggtatgggtggcggggacgcggagtttatgaagaggatcgaggagctcgcggcggcggctgggttgcagttgcagccggcgggcgcggtgggctgcggctggcccgcgagcgtggagcggagcgcgagcaacgtcgggctgccgctgtcgctgcgaatgatgaagcggaaaaggcagcaacagctggtggcggcggcgcggcatccgcgctgggacgaggggctgctggtctccgccgccggggagtcggtgggccgcgccttctcctcgatggtgctcattgtggcgggaagctgcaaaagcttcgcgcttgcagcaaaatac

SEQ ID NO: 55131 - DNA, 148 bp, Zea mays
  Clone ID: MRT4577_150277C.1
attaaatgggttaggatgggcacaaaaacagtgttgcaaagatcgagcaagctccagactacaccccatgtagctataggaactgagcatcggcaaacacaagatggttggccgcttactcaattccccccgggcgcgacaaataaca

SEQ ID NO: 55132 - DNA, 987 bp, Zea mays
  unsure (1)..(987): unsure at all n locations
  Clone ID: MRT4577_150278C.1
ctaccaagccatcagctcgcggggccaccacacctacatgctgcagactgccgagctggtgcacgagtcgtcgacggacgcggcggcgtcgctgctggtgacggcgctgaacgaggggcgggacgtgatcctggacggcaccctgtcgtgggagccgttcgtgcggcagaccatcgcgatggcgcggtccgtgcaccggcagcgctaccgcatgggggtcggctacaaggtcgcgcccgacggcacgaccacggagaagtactgggagcccgtggaggaggacggcgagcagcaggcaggaagggcaggcaggacgaggaagccgtaccgcgtcgagctcgtcggcatcatctgcgacgcctacctcgccgtcgtcaggggcatcaggcgagctatcatatccgggagagccgtgcgggtgaactcgcagctcaagtcgcacaagcgcttcgccggcgcgttccgcaagtactgcgacctcgtggacaacgccaggctctacagcaccaataccatcgccggcgcaaagctgatcgggtggaaggacaaggacagccggctactggtggacgtggacgagatcgggctgctggaccgggtgagccggatcaatgatgacgccaactgcgtgcacgagctgtacccggacgggcaccccacgggcggcgccggctctgtgtgggatgagctgatggcgtcgcccgtgagggcttccatacagcgggagctcaaggaggccatcttggacagcgaggcgtgcttcccctccccgtagtagccacacgccgagacctgatttcctggactactagttgtgtaattaagctagttatataatctcttttggatctacccaagttttgaaccggaataagctagctaagagttatatactgatcgcgacccttaaataaacaatctttttaaaggcaggttttcgcccnnnnnnnnnnnnnnnnnnnnnnnnnnnnnnnnnnnnnnnnnnnn

SEQ ID NO: 55133 - DNA, 171 bp, Zea mays
  Clone ID: MRT4577_150279C.1
ggccgctcgagccggcgggcgggatttcatactacgctcatagtcaggatttcagtaacaatccacatgtgtaaaggtagcagcagggaactagtgccagatttggaaccgagagcctgacatcatcgccacagctacttccgttaataggtgattgtttcatgtgttgca

SEQ ID NO: 55134 - DNA, 153 bp, Zea mays
  Clone ID: MRT4577_15027C.1
aaaacattaagcgaagggatggaatttaagaaaggctgggctgatacataaaactaataattcattcatacactgaaacgtaggcctattccttgaatgagccattacaaccatataaataccgattactaatcactacttaaattaataagt

SEQ ID NO: 55135 - DNA, 391 bp, Zea mays
  unsure (1)..(391): unsure at all n locations
  Clone ID: MRT4577_150280C.1
gcagtgctgtacggacattcccacagctaagctctatgtcccttttcccgtccttcacacgtgtttggttgtgaaacccaatcttaacctcggaccacagcaacgcactggctcttacttatacctgtctccacaacatacctatacagcagtccttgggctttatggcacaaacataggccacactacaacactggctagcaaactgtgcctctctcacacacagttttccttcaaccaatanctgatgaacttcttttattgcacacacactaccatcaccacttctgctgcctaccccacatttttccttcaaccatgacacatgaactctcctgttattacagacaacaactactaccatcaccactactggtgtgagccctgctac

SEQ ID NO: 55136 - DNA, 350 bp, Zea mays
  Clone ID: MRT4577_150281C.1
aaaaaaaaaaaaataaaaaaataaaaaataacaaacagatatacaatatacgggcttacgtgcgcaagcgtaaataaaaaaaaaataatatatattgtgtctccttattgtgtttcaatgttctgtcttggaaaacgttgtgattacggtgttttctgtggcttgctacacatattgctttgggcagctggccccatttctttgtttgtgtaatcgctcgactttcctaactttttgcgcattctgaacagttattgggtcggaacctgtagtggttcactaactgttgctgctgtggaggtttcgcgcttttggaccgttcctcttgtcagaaagggtacccccccttg

SEQ ID NO: 55137 - DNA, 135 bp, Zea mays
  Clone ID: MRT4577_150282C.1
gctgctcaccagccccatctgggtgcccgtcgccgtcgtgatctccgccatggggggcgtcgcgctctacgtctgcgccttagtctacgtctcgctccctgaggccaccttaatgtaccgtttctttacggtccg

SEQ ID NO: 55138 - DNA, 569 bp, Zea mays
  Clone ID: MRT4577_150283C.1
aattcggcacgaggcaatcgcgccttgaaccctagctcccgccgccaccccacgcctgcagccatgccgcccaagctcgacccgtcgcaggtggtggaggtgttcgtccgtgtgaccggcggcgaggtaggcgcggcgtcttcgttggcccccaagatcggtccgctcggtctttctcccaagaagatcggagaggacattgccaaggagacggccaaggactggaagggcctccgcgtcaccgttaagctcactgtccagaaccgacaggccaaggtctccgtcgttccctctgccgcggcgctcgtcatcaaggcgctcaaggagcccgagagggaccgcaagaaggtcaagaacatcgagattctcggcacctgcgtcagcgtcggctgcaccgtcgacggcaaggaccccaaggacctccagcaggagattgacgacggcgaggtggagatcccgtccgcttaagaagagggtatcatgagcaaatttctgttgttcggttgtaatattgatgaaccatttcgctttgtcgtttggagctgctgtagccgatacaggtaatggat

SEQ ID NO: 55139 - DNA, 613 bp, Zea mays
  Clone ID: MRT4577_150284C.1
gagtatcctcagccatgaggagcagttataggaggaaatcagaaggaagaacgcggcaatggtccccagcgctcacaaacctgatttatcatcaccatccaagaaccagacgatgccaaccgtcaatgacggatacggcaccttctttgggccatcaaagccagtgcttgctcgccgagtcatcgaagaagggtgttcatcatcgatgatgaaagatctacagaatataccgtcgtccaaaagagatgtttccttggcttcgaagatgcgaccaggtgcggttcagaatgtgcagaaacagaagtttgttagcgaggagaaaagaaaggttgacacactccgaaagaatcgagattactcgtgtctgttctcagatgatgctgatactcaccccactactgaaggtcatcctagtagtagggcctctcttgctctcaaatctgaggctcaagatggtgggccggtgaatgccaggaaaggcacagctcaacctgccacattatctctcggaaagaaagctcatgcagaaagaaaaggcactatagctttctggtagaaacagcctgcctaataacttgaagaagaaatctccaggtttgctatcatcctcgaa

SEQ ID NO: 55140 - DNA, 780 bp, Zea mays
  unsure (1)..(780): unsure at all n locations
  Clone ID: MRT4577_150285C.1
tgtgcggacgctcgaggccggcacgggtcgggaaactaatttacaccatcatctaaatatccattcgatcgaagcaatcgcgccttgaaccctagctcccgccgccaccccacgcctgcagccatgccgcccaagctcgacccgtcgcaggtggtggaggtgttcgtccgtgtgaccggcggcgaggtaggcgcggcgtcttcgttggcccccaagatcggtccgctcggtctttctcccaagaagatcggagaggacattgccaaggagacggccaaggactggaagggcctccgcgtcaccgttaagctcactgtccagaaccgacaggccaaggtctccgtcgttccctctgccgcggcgctcgtcatcaaggcgctcaaggagcccgagagggaccgcaagaaggtcaagaacatcaagcacagcggcaacatcagtctcgacgacgtcatcgagattgccaggaccatgaggcccaggtccatggccaaggaaatgtccggctgcgtcaaggagattctcggcacctgcgtcagcgtcggctgcaccgtcgacggcaaggaccccaaggacctccagcaggagattgacgacggcgaggattggagtctaggagggttgtctgtctactgaagtaattctctctagctagatttgtctgttgaagtaattntctctagctagatttttagttaaatgtatctctgctacccattgctatggntttctggtggatgcgtgctttttactatatatagctaggaacagtgtctttca

SEQ ID NO: 55141 - DNA, 922 bp, Zea mays
  Clone ID: MRT4577_150286C.1
aaaaaaaaaaaaaaaaaaaaaaaaaaaaaaaaaaaaaaaaaaaaaaaaaaaaaaaaaattcgatcgaagcaatcgcgccttgaaccctagctcccgccgccaccccacgcctgcagccatgccgcccaagctcgacccgtcgcaggtggtggaggtgttcgtccgtgtgaccggcggcgaggtaggcgcggcgtcttcgttggcccccaagatcggtccgctcggtctttctcccaagaagatcggagaggacattgccaaggagacggccaaggactggaagggcctccgcgtcaccgttaagctcactgtccagaaccgacaggccaaggtctccgtcgttccctctgccgcggcgctcgtcatcaaggcgctcaaggagcccgagagggaccgcaagaaggtcaagaacatcaagcacagcggcaacatcagtctcgacgacgtcatcgagattgccaggaccatgaggcccaggtccatggccaaggaaatgtccggctgcgtcaaggagattctcggcacctgcgtcagcgtcggctgcaccgtcgacggcaaggaccccaaggacctccagcaggagattgacgacggcgaggtggagatcccgtccgcttaagaagagggattggagtctaggagggttgtctgtctactgaagtaattctctctagctagatttgtctgttgaagtaattttctctagctagatttttgctaaaatgtatctctgctacccattgctatggttttctggtggatgcgtgctttttactatagatagctaggggcgagtgtctttcattagctccactgcacaaggctgcatgatggatggggacaacgatgaaattttcccagctccacccaccatcacaaaacaagaaaaacaataaataaacaaaaacaaagaccagtggcc

SEQ ID NO: 55142 - DNA, 2228 bp, Zea mays
  Clone ID: MRT4577_150287C.1
catttcgcccaacaacatgtgagagcgagcgagaggattattttgagggagggagttccctttctctgctctggcctccatataacttgctcagcaggcctagttctcgcagtcggatcctctcatactgcaagaaccccccctctctctctttttctctcaacacatacacacacacacacaaaagaaagaagggagcctccaagcacacccctgttgcttcctcagcatgcgcgaatccttaactgaggactaggccaacaatacatcgcaatgaagtacatgaagctcggttcaaaacctgatacgttctataccgaagaagcagtcaggtcagtcgtatcagacatacccgccgatctcattatccatgtaaataacaccaagtatcagctacacaaggtgttgtttacctgtagttccccctgctcctcaagtgcggcctcctgcagcgcctctgctccgacaccgacgacggcgatgaggagccggtgcccgtggcgctgcacgacatccctggcggcgagcaggcctttgagctgtgcgccaagttctgctacggcatctccatcagcatcagcgccgggaacctggtgcccgcgatgctggcggcgcgcttcctccggatgacggaggccgtcgccaagggcaacctggtggccaagctcgagaccttcttcgactcctgcgtcctgcagggctggaaggactcggtcgccgcgctgcaggccgcgtggcggatctccggctggaacgagagccgcatcgtacagccctgcatcgactccatcgtcgagaagatcctcctgccaccgtccaaggtcacgtggtcctacacgtacacgaggccagggtacaacagcacgaggaaaccccaccagtccgtccccagggactggtggacggaggacatctccgacctggacatcgaggtcttccgctccgtcatctccaccgtgcgcgcgtcgcggctgctcccaccgccgctcatcggcgaggcgctgcacgtctacgcgtgcaagcacctcgtcgacccgctccacgttgccagcgacgcaggactgaccgccaacggcgtcctccaccagccgccgcagagctcagacgacggcgaggagaagctggtggccatgcagcgccgcgtgctcgagtccatcgtcaccatggtcccgggcgagccggggtcggtcaccggccgcttcctactaaggctgctgcgggtggccaactacgtcagcgcgtcgtcgtccacgcgcgcgcagctgatccggcaggccggctcccagctcgacgaggccagggcggcggacctgctcatcccgctgccatcggacccgcacgcgtacgacgtcggcacggcggaggccgtgctcgagcacttcctggcccagttccagcggcccgcgccgaccgacgagcggcgtcggatgagcgccgccatggagaaggtcgccaggatcttcgacgagtacctgcggaccatcgcgctggaccgcagcttccctgtcggcaagttcgttgacctcgtcgaatgcttgccggacatcgcccgcagtgaccacgacggcctctactacgccatcgacatctatctcaaggagcacccggagctgagcaaggcggataagaagcggttgtgccggctgatagactgcaggaagctgtcgccagacgtgcgggcgcaggcgatagccaacgaccggatgccactgcgcaccattgtacagcttctcttcgtcgagcaggagcggaccatcggtgcagccgccggcagccatgctgcttccggtggcgccgcagatcgggcctccgtcggtgttatctcccagctcgcggcgggaaccaaagatgaagaaccagcctcgtctgctggccacaagtcagacgtgcacagaccacgccgggaccatgcccgggtagccgatggagcctctgccatggcgaggtcgctgtcggcgtcaaccaagactccaccggcagcgaggaaggagaggacgccggaggagacggggagcaggatgaggaacaagcagtgaagcccagtgcacaatttgttcatacttgtgattcttgattatattttttttatttcagtgcatcccatttttggtgggagatgtaagaggtagatttttgtaattaaaatggataaggagttaataagtggctacgtgcagtcatgctcatataatctagggtagctccccgatgaacaaaggttcgtgttt

SEQ ID NO: 55143 - DNA, 884 bp, Zea mays
  Clone ID: MRT4577_150288C.1
ccggccggggcatcgccccttgaaccctagctcccgcaactgccgccgccactcccacgcccgcagccatgccgcccaagctcgacccgtcgcaggtggtggaggtgttcgtccgtgtgaccggcggcgaggtcggcgcagcgtcttcgctggcccccaagatcggcccgctcggtctttcccccaagaagatcggagaggacatcgccaaggagacggccaaggactggaagggcctccgcgtcaccgtcaagctcaccgtccagaaccggcaggccaaggtctccgtcgtcccctccgccgcggcgctcgtcatcaaggcgctcaaggagccagagagggaccgcaagaaggtcaagaacatcaagcacagcggcaacatcagcctcgacgacgtcatcgagatcgccaggaccatgaggcacaggtccatggccaaggaattggctggcaccgtcaaggagatcctcggtacctgcgtcagcgtcgggtgcaccgtcgacggcaaggaccccaaggacctgcagcaggagattgacgacggcgaggtggagatcccgtccgcttaagaaggattggtgtccaggactgtgttatctttgctgctgaagccattctctctgcctagattttctcatatttatttgaggtgggggtggacgtggacgtggaactatggaagttatcacagcggagttttgcttagaaactttgtcatgctttaagtctgagacaatttctgtcaaattttatgaacattcctaggtacaatcgaagttaccagtgcctgagttttgtggaatttttcatgcgaggtttaaaatttgactatattgcatggccaaaaaaaaaaaaaaaaaaaaaaaagaaaaaaaaaaaaaaaa

SEQ ID NO: 55144 - DNA, 229 bp, Zea mays
  Clone ID: MRT4577_150289C.1
tgtccacgcgtccgcccacgcgtccggatgcccatcatcggcctcgccctcaccggagcaccgaactggtactccttgctcgcgggggaaaagttctcatctttctccccgagctcaccttggcattcccgacggtctgggtcgccacagccaacttcttcactagctggccgacctccaccccttccttcgccttttccagcgtgaggcgcacgaagttgtcaagggt

SEQ ID NO: 55145 - DNA, 1899 bp, Zea mays
  Clone ID: MRT4577_15028C.1
gaccctcgagttcggccgggtggccaggactgctgacgatgatgacgacatggccaccatcgctgccctcagattcggatatgaggccttggaattgaggaatggtggatctgattattttggcaaaggtgttcttaagctctttcaaatcaattcgcgatatgtccaggtggtaatattttgtgcataatggaagatgagatatccagcataatagcttatgctcttgccatatctgatgagcgccaccatttgatagatttaaaatttgagaacggaatggattattccaagggagagtatgctaaagcaatagagaaatcttttagttttctgtctgaaagttctttcagctcatcaccatggtcatctacaagttctgaagcaagcttatcgtctctgtcttcattttcatctgatgacttttctggttatgatagctcatctttattgtccccaatgcatccagaaatgactgtgaatgggaaagtaactctcaaagacaaatattcagttactgttgtatatgacaatcaattctttgcactccgaaaaaagtgttgcccatccgagcttgcatatattacttctttaagccgctgcaagaagtggaatgctcaaggtggaaagagcaaggcctattttgcaaagacaacagatgacaggttcatcataaagcaaatcaataaaacagagttcgattcatttattaaatttgcacctgattactttaggcatgtttaccattctctggacactggaagccaaacttgccttgccaagatattaggaatatatcaggttaagcagattagacatggcaaagaggtaaagatcgacttgatggtgatggaaaatcttctctttggccacaatatttcacgaatttatgatctcaaaggtgttactttttcgcgacgcgtcactgactcaaatgatcacgatactgtttacctggaccaaaattatgttgaggacatgggtttttctccaatctatattggtggaagaacaaagcatcttttgcagcgtgcaatctggaatgacacgtctttcctcacttcggtgaatgtcatggactattctctacttgtcggagtggacaaagagaagcatgaacttgtgtttggcatcattgattatctgaggcaatatacttgggacaaacaattggagacatgggtgaagacttctctggtagtacccaagaatgtttcaccaactgtaatttcccccaaggaatacaaaaaaaggtttaggaagttcatggcaaagtacttcctgtcagttccagacacatggagctctgataattcatctaatccatgcaaatcctttggtcagagcaatcacaagttagcggaagtccacaatggtgatagcctgcttcagcacccaaatgaagctgaggggtgtgtctaatcatgtgcaggacttcctggcattttttaagcctatcccattgttgtttggcttttcactttgtaaaatggtgtacattggaggacctcactgttgatctatccaaaagtttgtgttttttaggcaaattgttggacaagtggggtccacaggacatgtacctatacaaatgttcattgttaatttcacaattattatagtgaaattaagaatttgtatgatcattttttggacctaaaaaaaaaaaaaaaaaagctgactattcttcacttccgggttcccgacctaccacttgtgagactgaagcagtctatttttcacttatgactaactgtccaagcccaaatagacatttcctacctctattgaaattaggtcaatttgagtattatgttgtactgtgtacccccactgtactgctgggatatgtaaaaggttccgtataaatgtctgctcccctgaccttgtttgttgcac

SEQ ID NO: 55146 - DNA, 878 bp, Zea mays
  unsure (1)..(878): unsure at all n locations
  Clone ID: MRT4577_150290C.1
ttgggtacctcgaggccggccgggaaaccctatgctcccgcaactgccgccgccaccccacgcctgcagccatgccgcccaagctcgacccgtcgcaggtggtggaggtgttcgtccgtgtgaccggcggcgaggtaggcgcggcgtcttcgctggcccccaagatcggtccgctcggtctttctcccaagaagatcggagaggacatcgccaaggagacggccaaggactggaagggcctccgcgtcaccgtcaagctcactgtccagaaccgacaggccaaggtctccgtcgttccctctgccgcggccctcgtcatcaaggcgctcaaggagcccgagagggaccgcaagaaggtcaagaacatcaagcacagcggcaacatcagtctcgacgatgtcatcgagattgccaggaccatgaggcccaggtccatggccaaggaaatgtccggcagcgtcaaggagattctcggcacctgcgtcagcgtcggctgcaccgtcgacggcaaggaccccaaggacctgcagcaggagattgacgacggcgaggtggagatcccgtccgcttaagaagggattggagcctaggagggttgtcttggtctctgaagtaattctctctagctagatttgtctgttgaagtaattttctctagctagatttttgttaaaatgtatctctgctacccattgctatggttttctggtggatgcgtgctttttccttttatatatatatatatatatatatatataaaaggaacagtgtctttcattaactccactgcacaaggctcatgctggatggggcagcgatgagattttcccagctccanactcatgccatatgcagctaaacaatgtgctgaacaactt

SEQ ID NO: 55147 - DNA, 712 bp, Zea mays
  unsure (1)..(712): unsure at all n locations
  Clone ID: MRT4577_150291C.1
ccggccgggaaactgccgccgccactcccacgctcgcagccatgccgcccaagctcgacccgtcgcaggtggtggaggtgttcgtccgtgtgaccggcggcgaggtcggcgcagcgtcttcgctggcccccaagatcggcccgctcggtctttcccccaagaagatcggagaggacatcgccaaggagacggccaaggactggaagggcctccgcgtcaccgtcaagctcaccgtccagaaccggcaggccaaggtctccgtcgtcccctccgccgcggcgctcgtcatcaaggcgctcaaggagccagagagggaccgcaagaaggtcaagaacatcaagcacagcggcaacatcagcnctcgacgacgtcatcgagatcgccaggaccatgaggcccaggtccatggccaaggaaatgtccggctgcgtcaaggagattctcggcacctgcgtcagcgtcggctgcaccgtcgacggcaaggaccccaaggacctccagcaggagattgacgacgngcgaggtggagatcccgtccgcttaagaagagggattggagtctaagaagggttgtctgtctactgaagtaattctctctagctagatttgtctgttgaagtaattttctctagctagatttttgttanaatgtatctctgctacccattgtatggttttctggtggacaaaaaaaaaaaaaaaacccgcggcc

SEQ ID NO: 55148 - DNA, 788 bp, Zea mays
  unsure (1)..(788): unsure at all n locations
  Clone ID: MRT4577_150292C.1
ccggccggatcgccccgcgaaccctagctcccgcaactgccgccgccactcccacgctcgcagccatgccgcccaagctcgacccgtcgcaggtggtggaggtgttcgtccgtgtgaccggcggcgaggtcggcgcagcgtcttcgctggcccccaagatcggcccgctcggtctttcccccaagaagatcggagaggacatcgccaaggagacggccaaggactggaagggcctccgcgtcaccgtcaagctcaccgtccagaaccggcaggccaaggtctccgtcgtcccctccgccgcggcgctcgtcatcaaggcgctcaaggagccagagagggaccgcaagaaggtcaagaacatcaagcacagcggcaacatcagcctcgacgacgtcatcgagatcgccaggaccatgaggcacaggtccatggccaaggaattggccggcaccgtcaaggagatcctcggtacctgcgtcagcgtcgggtgcaccgtcgacggcaaggaccccaaggacctgcagcaggagattgacgacggcgaggtggagatcccgtccgcttaagaaggtattgtgagcaagtttctgttattttactgtaataatattgatgacccattttgcattgaagttagccaatacagtttatgctatgctttattcacgttcacgtcacgttcccttcagcttatgtaagtatgaactctgggaattgcctncatttaagcgatgctccaccgatccttttgntcatgaattgatagaatgtgattaaacattgctatc

SEQ ID NO: 55149 - DNA, 763 bp, Zea mays
  Clone ID: MRT4577_150293C.1
tactgcccttccgaagcctctcccaaccctcctgccgccgccgccgccgccgccgccgccgcccgccaccgaacagcagccatgccgcccaagctagacccgtcgcaggtggtggaggtctacgtccgggtgaccggaggcgaggtcggcgcggcttcgtcgctcgcccccaagatcgggcccctcggcctctcccccaagaagatcggtgaggacatcgccaaggagacggccaaggactggaagggcctccgcgtcaccgtcaagctcaccgtccagaaccgtcaggccaaggtctccgtcgtcccttcggccgcggcgctcgtcatcaagtccctcaaggagcccgagagggacaggaagaaggtgaagaacatcaagcacaacggcaacatcagcctcgatgacgtcatcgagatcgccaagatcatgaagcccaggtccatggccaaggagatggccgggactgtcaaggagatcctcggcacctgcgtcagcgtcggctgcaccgtcgacgggaaggaccccaaggacctgcagacggagatcgacgacggcgaggtcgagatcccctccgcttaaaggcctgatgtcgaggtgattatcatctgatgatatggaagtcataccctgttgcttatgtaccttccaaacgatgtgatccctcctctttttgtcatgttttagcagtaatcctgtgagacctcattgttactactgcatatttggtctttgcaatgtagtctgtgcacttgggttaacc

SEQ ID NO: 55150 - DNA, 412 bp, Zea mays
  Clone ID: MRT4577_150294C.1
tctattcgattgtgttgtggtcgcaggaagatgatcgggatggagtaccttctgagcgaagtgatggagtcgcacctgtttttgatccggaagcaaaagcgggagagcctcgagaaatcaagccccatgctcgcctactacatccttgatggctatatctaccaggcaccacagctctgcaacgtcttcgcctcacgcatagtgtatcctctccttttttttcttatgttttgcagtgggattctaggttgcaccatttttctgattggtaatgcagtgaaaatggtctacacacattttttgttgttggattagcctttcattctttggacattttaattagactatactatcggaaataataatgtgtctaggtgtaagcaagagtctagattcataacatttactctag

SEQ ID NO: 55151 - DNA, 833 bp, Zea mays
  Clone ID: MRT4577_150295C.1
tgggggtacccccgaggtcggccgggaatcttgaaccctatctcccgcaactgccgccgccaccccacgcctgcagccatgccgcccaagctcgacccgtcgcaggtggtggaggtgttcgtccgtgtgaccggcggcgaggtaggcgcggcgtcttcgctggcccccaagatcggtccgctcggtctttctcccaagaagatcggagaggacatcgccaaggagacggccaaggactggaagggcctccgcgtcaccgtcaagctcactgtccagaaccgacaggccaaggtctccgtcgttccctctgccgcggccctcgtcatcaaggcgctcaaggagcccgagagggaccgcaagaaggtcaagaacatcaagcacagcggcaacatcagtctcgacgatgtcatcgagattgccaggaccatgaggcccaggtccatggccaaggaaatgtccggcagcgtcaaggagattctcggcacctgcgtcagcgtcggctgcaccgtcgacggcaaggaccccaaggacctgcagcaggagattgacgacggcgaggtggagatcccgtccgcttaagaagggtataatgagcaaatttctgttgttcggttgtaatattgatgaactatttcgctttgtcgtttggagcctgctgtagccaatacagttaatggatgtactttgttcgtgttcacgttccctccatttaaacgatgctccggtgatcctttttcttcatgaattgctagaatgcgatcagcatagctaataagtgtggttccattgtgttagttgctgttcaatcttcaaaaacgaaggaattagtgttt

SEQ ID NO: 55152 - DNA, 377 bp, Zea mays
  Clone ID: MRT4577_150296C.1
ggagattgttgccaacgtcgctcctcgtcttagccattgtttggagcccgcggtgtggacaagggcgttcgcacgaaagcatcgatcgagtacaaggaaccgtcgggcgcatggtcaatcagagtgccaagaattcctcaccggcgtgaatcaccgccaccgaatccgccttgcgccgcggctatgcatctctacacctccatctttgttctgccaggaattgtggaggaagtccctgcgtatactatccgtggaaattgcccccacttgattcgtggggcctgtaacgtggtgtagcactgatcagtcgcggatttggggcgccgggtcgccgggatgtcgcacgtcagcgagcatcgtcgacgcctaggtgaaaa

SEQ ID NO: 55153 - DNA, 837 bp, Zea mays
  unsure (1)..(837): unsure at all n locations
  Clone ID: MRT4577_150297C.1
cctcgaggccggccgggttcacccagccgaacggctcctttagcgcgcgctctgcctctcccaagcaccctgctcgcatgaccgcgcctgcttcctccagccggctgcgtgcccagccgttcctcctcctgcttcggcgcccagccagaactcccctgtgtgcctcagtcgccccagctccctttgcttcccttgctcggattactctcggtcgaatcccctggagctcctgcgcgtccctggtttctgcctcaattcggaccgcgtcctgctcagagttcctccatggccgaactccccgcagtgcgttcctccctgtttctgggttccggctcgccgacgtttctctctgtttcctgcatcgtgctctgacacagcccggattccagcaccatggaactccctgcgtcgttcctctaccagccgctgttgctaggcttcgatgttgcgtgcgatttggaggccatgtcccttcgtcagtggtcttctcgtcgcgtgcactaattgtcttgtgtgctcggtcgcgggcgcagtcgtgccttcgcatcctgcgtcctcgactcattcacatcatcgccgtagagttaccatctcaccgtgacgccacactcgctgccctccacgacatcgcgccgctcgccctcagctgtggacatcctgcgctttatctcagcgtcacccgttcgtgtcggatattanacctccgcatgccccagctgtgtcgtcgccacgttcatgcgttgccatttcatggttttatgtttatggccggcaaaagaatcccaaaacagtgtggaaaacaagtccctgatcgatgccccaagtgctcggcgaaag

SEQ ID NO: 55154 - DNA, 247 bp, Zea mays
  Clone ID: MRT4577_150298C.1
aatggattcaaacaagcggcgtgttattaaatgattcacagcccaatccctctctcatgggaagaacattatcgtcatccatcaattccttaaattaatgagaaagatggaacaaataaaaatatgacaaatggtctgtcaaatcaaaaaacatgcccacccatctgaatgcgcccagccatgtcactctctctccccttcgattcttcctcgtcctccggacgccccactcggcttctcttaatgt

SEQ ID NO: 55155 - DNA, 628 bp, Zea mays
  Clone ID: MRT4577_150299C.1
gggtaccccctcgagggcccggccgaaacaaaaaaaaaaaaaaaaaaaaaaaaaaaaaaaaaaaaaaaaaaaaaaaaaaaaaaaaattcggcacgaggcagattttgacatttccgcagcgtttcaccgagagccacaagcccgcaagcaacaaatccgcgctccctgattcgccatcctcttcaccaagttaggcgacgactggcgcccatcgtcgattccccgttctccgtttccgtctcgcgtgtttggtgctttcgatctccccaaggcggcaggcggcagcgccgtacgcgttgcgggaagattttggttggtggattgttggtggcggctccactccgtcccagtgcactggtccaatccaaatggcggccaataatagcgacccgatccaggatcagctgggggaaggaggggcgggcgtgaggcacgaggctgaggaggaggaggtgggggaggagacgtcttctgccgcggcgcaggcgaccgcgacgacgatgctgccccggtcgagctcgcgggcggcggttggcctctggggtggggggatccacgggacgctggaggaccgtaaccctaccatccttttgcccaaccaatctcgacgacatctctcacgtcgcct

SEQ ID NO: 55156 - DNA, 1488 bp, Zea mays
  Clone ID: MRT4577_15029C.1
tctcgaggccggccgggagaagaaaagaaaaggaacagagatatcgtcaacgttttccggccttcaccgagagacacgccgaagtctgcaaatcccctctcagtcaactccaagggccaagaccccaatttcccctagaggttgggattttgtgggttcagtcatgctcgagcggcaccgcgttcatcgcgacgccgacggcgatctccccgccgccgtgaccgccccccttctcgcgcacccaccgtcgccggctgagccttggcctgcgaactttggttcatcggagataaccgacgaggagatcgacgccgcctccgccgcctgctgccgcatctgcctcgaatccgagtccgagcctggtgatgtgctaatatctccatgtatgtgcaaggggacacagcagttcgtgcatcgctcctgccttgaccactggaggtctgttaaggaaggaactgccttttcacactgcacaacatgcaaggcgcgattccatctacgggttgaatttctggaggatgacatttgtcgtagaatgaagtttcggatgttcgttgcaagagatgttatcattatattccttcttatacaagccaccatcgcagctataggtggtatggcatattttttggacaaagacggaaacttcagaaacaaattttctgatgattgggaacggtttctgtcaaagcatccagtgcccttttactactgtgttggtgtggttgtgttctttgtaatggttggatttttcgggctaatactacacctctcctcttacaacaacaacgatccgtgcctggttggctcccgtgattgttgctttgggtgtggtctggtggacttaccggcttcaatggaagcttgtttcgctttcgctgtcatatttgttattatgttggccatccttggagttgcctacgggtttcttgcggcgactgtggccatccagaggatctggcagcggcactatcacatacttaccaagaaggagctcacgaaggaatatgtggtggaggacctccctgggggttacacgccgccgaagatggatccagagcatgagcagcggttgaaggtgttgcagctcatgtagcttgcactttcgcaggtgatggacatgaagtatcgcatcttttttgttgcattgcatgtatgtacttttgcatgctgtgagtgttattagttggggtaaacatgtattctagtgacggaagtccatgtgcttataatgtacaaatatagaaccacggttaccagtcccaggtggggaatcacatacaggctaggaacaatgcaagttaaattgatcgactgtttcgctacacatactgcattactgccgagagacaatggtaatgctcactgtatcgaaacgttagtttccttttttttcactgctttggcgcctcggtgtttcgtccctttgtatctggatatgttgtacttcacctggaccaatcagaatcactctactaccaaccaacc

SEQ ID NO: 55157 - DNA, 514 bp, Zea mays
  Clone ID: MRT4577_1502C.1
tgctattggggatcgtcgcggcggggttcgtgagttacaacggggagcaggtggccggaggtggcagcggcattcaggagcatgttggcggcgccatcgctcttggagtcgtcaacagctttgaaatgaagatcgttctggccggggtgacttggtccatcatcggcgcagccattgccggtgtgattcaggtactcggaagaagggaagaggacatttggaaatgaagatacttctcgaatccgtgtgtgtatatacacagaaaattgtgtacatatgtaatgtaatcctgcacaaatatgggtggctggctgttttatagaatcacttggggtagctcatgcgccggcctagaaaaggtagaaaaagccggaactccttgtcgccctacatcccaaaagaatttgcagttctaacataataatttgcggtgctaaatgacacagcatagagataaaaaaaaaataaaaaaaaaaaaaaaaaaaagtaaaaaaaaaaaaaaaaaaggccccta

SEQ ID NO: 55158 - DNA, 864 bp, Zea mays
  Clone ID: MRT4577_150300C.1
atgcgggccaaggtgattgaatttgagaaatttacactcgtagttttggttggctgcattacttggagaagatgtggcgtgtccacatgtggtgaagccatgcccaggccaagtgtagctccctcgttgcagttgcaggcccgtccgtgcccgaggtggccgcgccggaagcactgcccaccgtcctccgtggcaagccggagggttgcttgctcggcctcggcggccgacgccgacgtggtcgacctcttcgacgccgctaagctaactgtggacaagttcgtgacgagcggcatggtggtggggctcggctccggccctgcgtccgccctggccatccagtacctcggcacgcgcctccggcggggctctctcgcgggcatcaccgcagtgacctcgtccgtgctcagtgcgagcgaggcagacaaggcagggatacgggctaacagctaccaggaaggcacccagattgattttgctttcactgatgctgaagcgatcgaggagggcacgctggccgcagtcatcgggcggcggaagaccgagagcggagagccctctttcatggcggagaaggcgatggctaaatcagctcacaagcttgccttcatcactggaaacgacaagtacgtgacgacgggcgtcgagggttctattccggtcctgattaaaagtgtttggaggaggccgtcgtttggaactgctggtccacttgggggtgaccacccactggttaccaaggagggccatcacgtgctcgatgttatcttcacaacaccaatccaagatcttggtcaggttgcagagaagttggacaaagttgatggcgttgtggatcacgggattatttgcagcaaccagtaa

SEQ ID NO: 55159 - DNA, 1486 bp, Zea mays
  Clone ID: MRT4577_150301C.1
cattgggtacctcgaggccggccggggattttcaactgaactcatcaattccttcatcatccatggaggccatgcccaggccaagtgtagctccctcgttgcagttgcagctccgcccgtgcccgaggtggccgcgccggaagcactgcccaccgtcctccgtgccaagccggagggttgcttgctcggcctcggcggccgacgccgacgtggtcgacctcttcgacgccgctaagctcactgtggacaagttcgtgacgagcggcatggtggtggggctcggctccggccctgcgtccgccctggccatccagtacctcggcacgcgcctccgccggggctctctcacgggcatcaccgcagtgacctcctagcttcctgggattgaccagccaggtccgtgctcagtgcgagcgaggcagacaaggcagggatacgggctaacagctaccaggaaggcacccagattgattttgctttcactgatgctgaagcgatcgaggagggcacgctggccgcagtcatcgggcggcggaagaccgagagcggagagccctctttcatggcggagaaggcgatggctaaatcagctcacaagcttgccttcatcactggaaacgacaagtacgtgacgacgggcgtcgagggttctattccggtcctgattaaaagtgccattttcaggggaactggatagacactgctgaagagatcgacgatttgtttctaggagacgcagaggtttggaggaggccgtcgtttggaactgctggtccacttgggggtgaccacccactggttaccaaggagggccatcacgtgctcgatgttatcttcacaacaccaatccaagatcttggtcaggttgcagagaagttggacaaagttgatggcgttgtggatcacgggattatttgcagcaaccaaccatacgctgtcattgcatccaagggggaagtgcaggtcctggacgagaaatcttcggtgatacagtagcggtgaaacctttttggctgctctgcagattgttgcgcttttcggaacaggagtctactaccagctagctggaaaaaaaatgccatgagttaatcatgtacaaccagagctcttgttcaccactggacaattcagccggcatcagttgaagtctgtgtttcgcataaacttttttgaactggtactcagttaaccagattcgatgaatgtgaggcagagctacagcttcaactactcttctagtgtttcaggagttcgtctcttttcatatgattggttgcccgcggcatctcatctcctatatgtttggttgcttgtgtttggcgggtgattaaattagcacatgccttcataacgtttattagtgtttggaaagataaaagtaaccgcgcataggcgctggaatatatggattagatgaaaaaaaaaaaaaaaaacaaaaaaaaataaaaaataaaaaaaaaaaaaaaaagaataataaaaaataaat

SEQ ID NO: 55160 - DNA, 338 bp, Zea mays
  Clone ID: MRT4577_150302C.1
tcttttagcgcacacacacacaaacagatttgggcctaattcacccggcggggggtcccttttaagacacagatctttctgtaaaccctgacccgcaagactatcaccctggaggtggagtcttctgacattattgacaatgttaaggataaaatcctggacaaggtgggcattccgccataccatcagcgggtcaacttttatgtcaaacagcttgtggacggtcgcactcttgctgactacaacatccatatatgagagcacccttcatcttgtgcttcggcttaggggtgtgttgcatatcttacttaaaaccctttcctgcatgattatcactc

SEQ ID NO: 55161 - DNA, 1788 bp, Zea mays
  Clone ID: MRT4577_150303C.1
gtgatgcccattccccctgcatctctgcccccgaagccgcccaagcgctcgtccaaaaagaaggggaaggagaagcttaaagcggcgcaccatcaacacacagagtcggcgccactggtcacgctggtcaccggtggtaaggcggggaagttagtcaccgccgagatgccgcgtgtggacctcctccgtgtgcttgcagaaatcgacgagaggttcttgaaggcgtcagagagcgcaggtgaggtatctaaggcgctggaggccaacaggatgcattaccactccaatttcgccgacaaccgagggcatattgatcattctgcaagggtcatgaaaataattacatggaatagatcctttaaaggaatgcaaaatggcgatgatgggaaagatgacttcgaaaatgatgaattggagaccttggcaactgtagttgataaaatcttagcatgggagaaaaagctctatgatgaagtgaaggctggtgagattatgaagcttgagtatcagaggaaggttgctttgttaaatagacaaaagaaacacaatgctgccattgaggttcttgagaaaacgaaagctgcggtaacccacttacatactagatacatagttgatatgcaatcaatggattcaactgtgtcagaaattcagtatctccgtgataaccaactgtacccaagactattggatcttactgaccggatggcaaaaatgtgggaggacatgaagatacatcacgcaaatcagctgaaaattgtcctaaatctgaagtctgttgatattcctgattccaatattgaaacaagtgattatcaccacagccacacacggcagctgcgtgatattgtagataagtggatcacaaattttactgacttcatgaactgtcaaaaggaatacataaatgctctctatggctggttgaagttgaaccttatacccatagagagcagcctgaaggagaaagtagcatcgccacctaggatgcagcaacctcctatcaaagcctttctttatgcctggcatgagcacctagccaagctgcctgatgatcttgccaagacagccattgtcacttttcgagcagtcttggataccatattgggtgttcaagatgaggagttgaaacagaaggagatctgtgagcagactcgtagggaatacatacgtaaggcccgggcttttgaggattggtgccacaagcatccacagcccagagcgatcgacgtcgatccagatagcggtgaggggacaggacataaggatgtagtcaccgagaagagattcgcagtggagagcttgaagagcaagcttgacgatgaaattgaatcccataataagctatcaaagcaggtcagggagaagtccctctcgatcctgaaggcacatctcccagagctgttccgtgctctgaccgacttctccgacgcctccttcgaaatgtactcgaagctgaggctgatgtcgttgatgcaggatcagggaaacaactagatggacagtatgttcagaagttaggatcagtaatatccctcccccaagtgttgtaatgcatgtgttctacccctttctgtggtatgtgtaaaaggctagtagctcattggatgaggattcttgtttaatttattggcttgatgaaaccatcgggtactttgtagtgtggacatatgctggatagttagcatgtgatgaactgattacaatctgtgggggtaaaagccgtcgtctatgtaaatgataaattttgttgagattcccagccgtccagttttttgaggcaaaaaa

SEQ ID NO: 55162 - DNA, 158 bp, Zea mays
  Clone ID: MRT4577_150304C.1
tctccagtccacccattccattccactacccacgcgcagaatttacgcgaacgctcacgcacccacacgacacattcagatgatgcttagggttttcccgtccccggccgtcgtggcgccaacccagctcttcggtgcgcccgtgacccctgcttcct

SEQ ID NO: 55163 - DNA, 274 bp, Zea mays
  unsure (1)..(274): unsure at all n locations
  Clone ID: MRT4577_150305C.1
ctctaaccccggggtggtgggttttttaaaaaaaatatctggggggtgtgatatccaaaaggttgtggccacccaacctatagcacctttatacaaagccactctacaccatggaggcatgcaattgcttcatcttttcttnantnncancaaatcctttgggggggggggggggaccactatanncccanattncctttatatacanntaaaaaataaaaatattncccccaacctcttccnttccacaatatnacccctcttntnntctaaa

SEQ ID NO: 55164 - DNA, 311 bp, Zea mays
  Clone ID: MRT4577_150306C.1
gggaaaaaattttttttattagggatttgccctcgaatggtttaaacggggcatcttaccagtttcccttcccaaaaaaggtcggtgggccttttaggggggggggaacccggtgatccccttaaaaggttaggggccccccgggtttttactaaaaaatttttggggccggtgggggttttactaaaaaaatagtatccatggggttggcctgaaattatgcttattgagccttggttttttttaacaataaatgaatggggggcccgccccctttgttggcaacaaaaggtgccacctctgggtttctt

SEQ ID NO: 55165 - DNA, 378 bp, Zea mays
  Clone ID: MRT4577_150307C.1
tcccacgcgtccgaaaaaaaaaaaaattaattaaaaaaaaaacaaaaaatataaaaagagtacgattttataaacacatacatacaacaaaaataaaaattatctattctcactcctgctcaattctctgtccctccttctacaacgtctttactttaaaatccttccccctacccaccttaatcggtttcccttccatccccctttaacctgctgcaatattctcaaataactactcacttacctcccttcccatcagtttttcaccctctttcccaattggtactcgccctgtaccatttcatttacctctaactctctaatgcctactcgcatcttgacatttccattttcctatgccctacttccctctccttt

SEQ ID NO: 55166 - DNA, 702 bp, Zea mays
  Clone ID: MRT4577_150308C.1
ggcggccgcgggttttttttttttttttttgacaatttaatttctcttctgactcgtttccagcaagaggctacaagtagtggtgtatattcacaggaagaaagaaagagcaagcatgttgctgtaaagaatcaaataatccagtgtttccaattctgctcaaccaatatgtctacaagattccatccaatatagtactacttaattacatagtaacagacccatttataacccataaggaccagatgaacaacctgcaactgcaagctgcccagaagtggcggccatttcaatcctcgcgggcagctttgcggtgcgacgacgtcgcggcgggcgacaacgatggagaggcgtcgtcggtgccgacggggacgtcggagagcggcgccagcacgcgcctgacgctcatggagcgcatggggcggaagctgagggacctgagccggccgtccttggagaagacgtcggaggagctgcggaggatgaggtagaccagcccctggacgagcacgaacacggccaccttggcgagcgcgtcgcggagctccggcgacagcgacgggaacgccgacccgtccatggcgtacgtggagagacgctggcaaggtggagaactggagactggagagggagatgcgtgtggattcgcggcgtatgggtgtgtgtgatcgatgagatgatggcggccggcggcgggccggc

SEQ ID NO: 55167 - DNA, 453 bp, Zea mays
  Clone ID: MRT4577_150309C.1
ggggagaaaaaaaaacctggcccgggttaaacttggaacttgggggggggggtttgggctttttggggggggggggggaaaattttagtgggaacatgggtgggcgttgagaagtcacccaaaggaaaaggcctaatgttttttttttaaaaaaggaaggatgcccctcacatggggggggggatcaggcatcaatgggatttgccttgctcaagttgggtgggggataatgggggagaaataaaaaaatttgaactgggtgtacctatgcttgggcgggggggtcacgaattggctcacaagcttgctctttaacgtaacgagctcaaatgctagtgtaagctggcttttttttttaacgagccaagtcgagtcgggctaatttgaccacaagtcgagcaagatagggaaccatgagtttttttgccatcccttcttgccacatgtttacat

SEQ ID NO: 55168 - DNA, 246 bp, Zea mays
  Clone ID: MRT4577_15030C.1
tagctgcgaccaacttgtaacagctgacagccgaactgaacgaagctcgaagaggaataactgtagcggcacctagcaagcatgcagtcacctcgtccgtagtaatttccgagtaccatagctatagtagactactcctcccggatgcactggcagaacgcgccgacgactacctcaggatctccacattcgctagggccttttgcagcgtgatgaaggatctgaagtatgctgactctcatgaat

SEQ ID NO: 55169 - DNA, 651 bp, Zea mays
  unsure (1)..(651): unsure at all n locations
  Clone ID: MRT4577_150310C.1
gtcgacccagcgtccggccgcctccacttcgctgntataccagaccaagcagctggagcagaccaagacgtcgctcgaggaggccaagctggaatggccacgctgctgctgcagcaggcgagcaagagcctcgcgtccgcccggcgcggcggcgtgctggagcagaggagcgtcagggacctcatgttcggcggcgcggacgaggagatcatggtcctgcacgcggagctccgggcggcggtgcagggcgaggagaggagccgcaaggcgctggacgacatctccgccgcgctctcggacgtgaccacggaggccaggctggtcaaggcctggctatccgaggcacaggttgagctggaggccaccaacgccgaggccatccggctgcgcgcggcgctgcgcgccgcgtccgacgagcgcgactgctacaggctcgaggttgacgagtgcgcggcagcctggggcgacaaggagcgcgtgctcctcgactgtgtgcgcgtgtccgagggcgacgcgagccgggcgcggcaggagaacaccaggctggtcgagtcgaagcgcgtcgtccgcgacgagaacacgtgcctgcgggacatcctcaagtangtcgtggcccgagccagcggcgccagggactcgctcgagctcgca

SEQ ID NO: 55170 - DNA, 291 bp, Zea mays
  unsure (1)..(291): unsure at all n locations
  Clone ID: MRT4577_150311C.1
cgccgctctctctctcctagncccctcctagggggggagcgaggagcgacagacgctgccgccctacggcaggtgcccaggacttcttcggtcccttcgccgtcgacgagcactaccaggaacttgatcttatagaacaaacttcaatatgttctgtgctccaggcaacgattctatgggtcttgtaggggggggggagggatggagctggctaatattcaacatgatgcaaatgaggctggtgggcctggaggaaaacagcgcacatgtaggctggagggacggatgatg

SEQ ID NO: 55171 - DNA, 302 bp, Zea mays
  unsure (1)..(302): unsure at all n locations
  Clone ID: MRT4577_150312C.1
ccacgaaaagaaataattttttttagattacgcataaaatttgagtgaagagnattaggttagcacattggccgtgtaggaataggatacaagcatgacaaaagaattttgacttttgatttcaganagngggttaggcggggggggcttgtttttttttttanatanatgcnttggngcgggggggggtggtttttaggtctttgggaagtgcgacgngggggaggggggggggggggggggggggggaggcgggggcggggggggggggggggggggggggagagggggggggggggggg

SEQ ID NO: 55172 - DNA, 281 bp, Zea mays
  Clone ID: MRT4577_150313C.1
ttttttttttttttaaaaagaagcaagagaacttgttacaactagcaaaaatgcaaaatgtgtgcaaattcagaagggaagcagggtctataaagttccatgcttcaccaccgccgtcaatggaatattgtgagcatttgagtattccagaatccagatacatgcttgggttcaatggaaatgcatgtgcataatttccaccaatttcatgtacatagtaatatagtatcaatgattatagacaattaaagaatgataatatgctagtgacatgatttttc

SEQ ID NO: 55173 - DNA, 496 bp, Zea mays
  Clone ID: MRT4577_150314C.1
tttttctcctttttttctcttttttttttttttttttgttttttttgggtatttttttacaaaaataaccaaaaaatcccaaaaaaaaacataataaaaaaataaacaccaaattcctcaaatacattaaaaaaaactcaaccaaaaaaaaaacaaaacacaaaaaaaaatacaacactaaaaaaaaacaatacttaaaaaacaaccataaaaaaaaaataaagtatcaaaacgcaataacaaaaaaactaaaggatacaaaccaccatcttgttacaaaaaacaatgattatccaaacacccaggggggaaaagggataaaaaaaaaactaaaccttacaatcggacaaccctttctaagtacccccaggggaaaaattttctcaaaattaaaatttaaaaaaaagtggaattaaaacccaaaaaaaacaaatcccacacttaacatcctcttcggaagcttccccctgctcccaaaacatttaacactatttat

SEQ ID NO: 55174 - DNA, 438 bp, Zea mays
  Clone ID: MRT4577_150315C.1
atggccgaccaccgccgcgacaaggagaaggcctgcaaccgttcgccgcaagcgcgagcggaagcggtcccggtcctggtctctgtcgtcagatcgggaccgctcccaccaccgccgctctcagtcgcgtcgaggccttcggcggtgggttacgacgatgtgaatgcggaagaaccggagatgatgaatatgatgagcattcccgtcgagttggactccacagaggtaccgaacgagctggtggtgtcgacgaagacagggctcctgttcgagcgacaactcatcgaacgctacatcgagatggcgatcgtgctctactgggtgtacgccgacggctaccagctgatccttcaccgctggctgcttgagcggtacaggctccacacactagacgaggaggaggacaacgtcgttgtcacacccggttttagaaggtaa

SEQ ID NO: 55175 - DNA, 502 bp, Zea mays
  Clone ID: MRT4577_150316C.1
aaatcccatcatccaatccagtcgcctctttcagaagggaaagcagagagaaagaaaggagctagaaggcctcgagtgaagtgagcaagccatgggctcggcaacagtcctggaggtgatcctcgccatcatcctgcctcccgtcggcgtcttcctgcgctacaaactcggcgtggagttctggatctgtctcttgctgaccatactggggtacataccggggatcatctacgcggtgtacgtgctggtagtttaagcaacagcctctgctgcagggtccaggcttggacgagcgagtcgctgtgcaagagcaactgatgctgtctgtgttaagatagcatgtctttgtgtatgcttgtatgtattgaatattgcggatttcatttatttggggagctcggtattgtcgatcctgtgatgtcacgagtgtacgtagctcggggactttagggcattcgtcggctgtagtgtttgtgatcttaaatttaaagtattggatgtc

SEQ ID NO: 55176 - DNA, 194 bp, Zea mays
  Clone ID: MRT4577_150317C.1
gattcatccgatctctccacctccctcccccgctctctggcgttcaagaagcccgtggcggaggtactccacgccagaacccggtcccgcttccagcgccgctgccggctcgtatcgcgctcgctccaccggatgcgtgcttgggcgggaatggtcgacccgttggaccactactggccctacccctggtacca

SEQ ID NO: 55177 - DNA, 305 bp, Zea mays
  Clone ID: MRT4577_150318C.1
gatactagtaatcaagattaagggatgttagaggtgggacctccatcgaccgagcctttgccgtggaaaaatgccaaacacagaggcttttaatttctactctccccttatcgatcacgatagagcaacttgaacgcgatcattgtatgctaacaaacagagtgagagaactgatttacctaatccaaacggatttaaaggcccctaatcaaggcaaagctcctcaatttcttcctctgaaggcgagaacgggatcaaactacggcaggccgctgctggccggcatttgcgggcgagcaagcgca

SEQ ID NO: 55178 - DNA, 224 bp, Zea mays
  Clone ID: MRT4577_150319C.1
actcgagaggggagcgatccctgacgccttccggcgtgtagaggacgagacacatccagcaagtttgccgctgcagatggccctgctgtacactgtgctggcgaccaggccggactgcaagtccaggggcgccataacaaacactggataccatatatttgtcgacgacaggggtcgcctacagatccggccactcttactcattcagtcgatcccttctggca

SEQ ID NO: 55179 - DNA, 731 bp, Zea mays
  Clone ID: MRT4577_15031C.1
catgaccccaatttcccctagaggttgggattgggtgggttcagtcatgctcgagcggcaccgcgttcatcgcgacgccgacggcgatctccccgccgccgtgaccgccccccttctcgcgcacccaccgtcgccggctgagccttggcctgcgaactttggttcatcggagataaccgacgaggagatcgacgccgcctccgccgcctgctgccgcatctgcctcgaatccgagtccgagcctggtgatgtgctaatatctccatgtatgtgcaaggggacacagcagttcgtgcatcgctcctgccttgaccactggaggtctgttaaggaaggaactgccttttcacactgcacaacatgcaaggcgcgattccatctacgggttgaatttctggaggatgacatttgtcgtagaatgaagtttcggatgttcgttgcaagagatgttatcattatattccttcttatacaagccgtgagatcaccttctcctcttattacattatattgttctctattattcatggtcatatcatcactagtaatagaccgcggacagcttgcatatattatttccttgggttaaagcttagtggaccaggtgactagagcaggcatgtagtttgatgtgtgcacctcattgtttttttttcagaccatcgcagctataggtggtatggcatattttttggacaaagacggaaacttcagaaacaattttctgatga

SEQ ID NO: 55180 - DNA, 495 bp, Zea mays
  unsure (1)..(495): unsure at all n locations
  Clone ID: MRT4577_150320C.1
aagcagtggtaacaacgcagagtacgcgggagcatacaaacaagtgtgttccgtccatccttcaattccttgctgcttcggttcgtttttatattggaacaattggatctataccattaaaagatccaaactttagatatataccatggaccccacatgtcattaactcatgtggacccacatgtaagtgagatagtaatggtatggatccaaagtggtgatcttttaatggtatggatccaaatttcccttttatatatcctgatgattcatcgatcaataaatataggagtattttctttctttttaaaaaaaaaaaaaaaaaaaaaaaannnnnnnnnnnnnnaaaaaaaaaaaaaaaanaaaaaaaaaaaaaaaaaanaaaaaaaaaaaaaaananaaanaaananaccttttggggggacccaccgttaagggggaaatttgggaaatatccatcaacctgggggccgctcgggaatccttcaaaggggc

SEQ ID NO: 55181 - DNA, 601 bp, Zea mays
  Clone ID: MRT4577_150321C.1
cttctctcgactcctgtttttccaaatccaaaaatcgtcgaaccctagcgaaggagcggcggcggactctggcagggtcttgggctgctgtcgtgttcctcttcgcagaggagatctaccgtgctcgcccatcttcatcctccctgctctgctcgcccgctaccatggcccgctgctgccccaccacggcgccgcgcggccacgcgctactagctccttcggcaagcttcgcagaaatgtgggaattctgtagctgctggtcacggattgtgccatcaaaacatgggacatagatatgtttgttgattctaaccagtttaaagagagacgaaaaggaattcgatgctactgctatgtggatcttctattcggctggtggatgttagtggcgagaaggtttttgcatctggcacgccacctataataagcagactggcaacaggggcagtggtgaggaacaaatgttcagggaaagagaaagacaatagagttacattgtttgttactcgtatccattagaaatatcaggttgtaggcagtccgattgctcagtagatagccccttgatttattgacaatgatttgtactaaaattgatgga

SEQ ID NO: 55182 - DNA, 350 bp, Zea mays
  Clone ID: MRT4577_150322C.1
catgtcgccggcgtggcgcgccaggccggtcttcgtccagtctttcgcgccgacgtcgctggtccgcgcggccggcctcacggactcgccgctcgtcttcctcgtcgacgacgtgaccgtgcggaccgaggacaccaaccagccgtacgacgatatcacctccggcgagcacctggactacatgaacaggtacgtggtgggcatcgggccctggaaggacacggtggtgccgccgaccaaggacaaccggctggccacgccgtcggacctcgtcgcaatggcgcacgcgaggggactgcaggtgcacccctacacgtaccgcaacgagaacaagttcctgcacttcgact

SEQ ID NO: 55183 - DNA, 325 bp, Zea mays
  Clone ID: MRT4577_150323C.1
ctgcgaatgcttgaggatgtgcctcgcatatttgaggctgatttccagtgcactctcgagatgagtactaagaactttgaagattattctgagcaccgtctcaaatttttttctctgctccgtgcaaatggcacccattgctttcgatcattaattcagcttttatgcttgcttctgttttattgtgtttttttgagtttttgtgcgattgtgcttttcttgtgtgtttattatagactgttcttagtttattttcgtgaatttttaattactttttggctcttgtgattctaatatattttttctttttcttttttttttcttt

SEQ ID NO: 55184 - DNA, 332 bp, Zea mays
  Clone ID: MRT4577_150324C.1
tggtgctcatttccctcgccacatgcttctcagctcagccacatccttgcgggcagagatctggatctgtgtgtctctccctccctcccttgttgaatggcggcgggttgctgccctgttgccctcgcattcttctccttctcctgtgttctcctcctgcttcaaacaatctgctgttcacgagtatttgtggagctatcatacgactcgacacaggccaaggtacaggtactgtccacctcagtggtcactgacggctacagagtgatggtcactgacaagcagcgcgcctacctctttctgaagccgtttgcgtgcagagacaagccatg

SEQ ID NO: 55185 - DNA, 643 bp, Zea mays
  unsure (1)..(643): unsure at all n locations
  Clone ID: MRT4577_150325C.1
aattcggcacgaggcagacagacacacaccggagggagccgcaccttcccccagccccactatacgacgaccgccgcggtcgaaccaaaacagcttcctcctaccggcgtcgcctccgcgacgatcctttccgccgccccatagggttctgctgcccccgatccgggcgccagatctcgcgtggcgacgcgcggatctcggatttctctagaggcggcggcggcggcagccggagcaggaggagatggcgctctcggggatgcgggggctctcggtcttcatcagcgacgtacgcaactgccacaacaaggagcaggagcgcctccgcgtcgacaaggagctcggcaacatccgtacgcgggtcaaaaacgagaagggcttgtcaccatacgagaagaaaaaatatgtatggaaaatgctttacattgatatgctgggttatgatggggattgtgngcatatggaaactggctgggggatgtctgcaccaaaggatgctgagaagcaggggggctatagttggacatctggctgactgaatgaggatgacgatggctgaagaatggggatgaatgcanggaggaatgacatgatgggacgaaatgagaccttgcagggctgagggtggcaatggggggggaca

SEQ ID NO: 55186 - DNA, 397 bp, Zea mays
  Clone ID: MRT4577_150326C.1
tcgtgatcgatcgatcgatgatccattccgccgccgccgccgtcgtcgtcgatcggcgccggagcatcgaccatggatgagtatctatctacgcctgatatgatgagatgatgagttgtctactactgctacgtcgtactactgaataaaaatctctccgtacgtatgtacgtacgtgtcgtcgtgtacgctgtgatacgcttgcatcttagcgtatgtacgtacgtgcgtgtgtacatgtgtgtgtgagagatgtacttttgcttgttgggtttatttttgagtgcatgcactatgtgcggtgtttattatttatgtccgtgtacgtttcctctcgctcctgtggtctgtactagttcgatcactgctacatgcacacacacatctctttgtttcc

SEQ ID NO: 55187 - DNA, 830 bp, Zea mays
  Clone ID: MRT4577_150327C.1
cggccgcgtgggtgcattccaaagctagtacacaagctagcagtctcctcgatcccagtctcgatcagaattcagacaccaagaacatcgacgacatggctcggcttgctgtggcgatcgccgtggtggcggcggcggcggtggtggtgctggcggcgacgacctcggaggcggccatctcctgcgggcaggtgagctcggccatcgcgccctgcctgtcctacgcccggggccagggctccgcaccctcagcaggctgctgcagcggcgtcaggagcctcaactccgccgcccgcaccaccgccgacaggcgcgccgcctgcaactgcctcaagaacgccgcccgtggcatcagcggcctcaacgccggcaacgccgccagcatcccctccaagtgcggcgtcagcgtcccctacaccatcagcacctccaccgactgctccagggtgagctaaacctaaacgaggatgatcgatcgatgatccattccgccgccgtcgccgtcgtcgtcgatcggcgccggccggagcatcgaccatggatcgagtttgtctactactgctacgtcgtaatactgaataaaaatctctccgtatgtacgtacgtacgtgtcgtcgtgtacgctgtgatacgcttgcatcttagcgtatgtacgtacgtgcgtgtgtacatgtgtgtgtgagagatgtacttttgcttgttgggtttatttttgagtgcatgcactgtgtgcggtgtttattatttatgtccgtgtacgttcctctcgctcctgtggtttgtactatgttcgatcactgctacatgcacacacacatcttttcgtttcc

SEQ ID NO: 55188 - DNA, 1484 bp, Zea mays
  Clone ID: MRT4577_150328C.1
gatccaaaaccatgctaaccaaaatactgtctacaaacaggtgttcaattgaaattacaattcatggttacagcacgacaattgaaacaccatgatatcataataatgtggtttttaaaaactatgttcccaaacagggcctgaatatgcccctcgttccaaggtgtagttagacagtactaacagtctgtgtcataaatctatttggtacgtggatatcaaaaatcgcaaatctttcacataccatctccatgctacaacacaggtaactctattcaactttcaaagtacaagtcagaatagaaggcctgagtggataaccagactcgaaacaaggcctgagcggcggtgccttccgcagtgcaccagcccacaggaatacagaagccagaagtccatattgagaaactgttagtttacgatgcatctttataggctctggtgaaactgttagtttacgatgcatctttataggctctggtggaaagcaaaggttcttcaaccaagttcgagaactaaaacacttccatccaagtatgatctgatgtgcaggcaaaggatctgagagacatggaaccaagttcatacagctcggtactcaataaacagaatcaacttctgaaccaacacggcttgtgaaccatatacaggctttctcccttcactgatccagttcttctctaagctggatggttttgcattagcttgcaggtcatcaatgaatgctgaaagtatatgataaacagaagtccgaagaacatctgccatgatataagctttcttgtgcaggccacttttttgtgtgcttgcaattgcaactccattgccttttcgtcctgtggagaggttagtccacctaatgttttcaggtcccagtgagcgcacaggctgtgggtttgttttctttcccaaacatgtctcaattgctactagggcagacagcaacgttgtcatcacagcggcattgcagccagtcagttgagcaacaccataccgatcctcctggcgtgagcgtgcagttaacccagccagtgtcctagcacaccatgcgcatatctgggaatcatcaaatgcactaaagagtttggactgttgtagcatcaattctggcttatcactagaaaaatcttcaagggattcagcaatttttgaagtaaactcctcaagtggcttcaaacaagttgtcacgattcttttataagtttcaccagattcctcaaagaaagcagctctgcgccacggttccaaattacactcagataccacacacaaatcttggtaagcaagatattgtatcaatgattgtggatcactttgttccaaagattctaggataaattcagtgggattagtgtctgcagcagcagtgctctgaggcggagcaaaactgcacctccttgtatgtacaacctgaacaaaatgatgatttatttccaaacagagagaaacaccaggtgtcactataaaaaggcgtatctcacccg

SEQ ID NO: 55189 - DNA, 117 bp, Zea mays
  Clone ID: MRT4577_150329C.1
caaaggtgaatgacgaatggctggaacgcgagtgcaaagggaaggtgggcattttccccaaagtttttgttgaagactgcgcaactacagatttggaaagcactcggagagaagtct

SEQ ID NO: 55190 - DNA, 259 bp, Zea mays
  unsure (1)..(259): unsure at all n locations
  Clone ID: MRT4577_15032C.1
gccgccgcaaagacaaacanacgcggggggggcgcgccggaggaggggaggcgcanggccaagaacaagaccggggacaacgcggngaacaggaccggcaagacgggggccaagaacgcccacaacagcgacgacgaggagagcaagggccggaacaaccgccncacgagcaccggcgacaggaacaacaggangaagaacgacacggaggacaagcaggggcagaacaagaaagngaaggcgaacgacancaaaagcc

SEQ ID NO: 55191 - DNA, 1324 bp, Zea mays
  Clone ID: MRT4577_150330C.1
cattgggaccctcgaggccggccgggccaaccccgtccccaattcgaatcctcttcttcctcttcctctgtgctgctgctgctcacagacccaggccaagtcgtctcagtcctcttctaccaccaagctcccgtctcttcccctcctggtctcagcgactccatcctctccctctccagatccccgcccgtgacgccgccggctgttacctctccggctcatcgtcctcaggcccaggtcttgatccgcgatccgccgatttccatccggcgcttactcggtgtcccgtcacctgcgggttttgcttgtgcggggaggctgatccggcgagcgccttggatgaattcgcgccggtctcggtcggtgaagctggtgtcagcgcgcgccaacggggacggggccctggaggtggacgtacctgaggaagagggagacgcgcggatgagctcctcggccgccaacaccgtgtactgctgcatcgccaggggccggagcgtgatctaccggtacagcagcaagggcggcgacccgcaggcggaggccacggcggcgctctgcctggaccggtcgccgccgcaccaccggcattacgtgcacacctccgggcgcaggagctacgggtacctgacggccgacggccacaccttcttcgccatcatcgaccccagcgtcggcagcgccggcgcgctgcagttcctggagcgcgtccgcgacgcgttccggagcagcgcaggcgtcggcgggcgcccgcacgagtcgctggtgccggccgtgcagcggctggtggcgtcgctggagaagatgccccacgccgcgttcgtgctcgatggcgcgggcgcgggcgcgggcgacggcgacggcgacggctgcacgtcgtcgtcgtccaaggcgcccctgctcgggaagagcgggagcaggaaggagaagcggcggtccagggacaagctgtcgtctgcggcggcgggggcggggggctgtgaggacgagcaccacgggacccgagcggtgaggatagacgtgatgccggccgaggacgtcggcggcatgtcgctggagcgcagcggcagccagtccaagctgcggaggcagcagtcgtcgcggtcgctgtggatgcggcacgtgaaggtcatcgtcgccgtggacgccgtcgtctgcctcgtgctgttggcggcctggctggcggtgtgcaaggggttccagtgtgtgtccgggtgatggtggtcagtcgtgtacagtgttttgaggagacctgaggatggattcaatgcaaattgcctatttcgattgattgatcaaaaaaaacgacagcaacggaattcgagct

SEQ ID NO: 55192 - DNA, 423 bp, Zea mays
  Clone ID: MRT4577_150331C.1
tttttttttttagttacatatgcattcattgtgtgtggtagtgcggttacaaaatgctaggcttgataacaaaagataagacattgtgatgttctcatgcgtttacatctattattcacggtggtctactggtcttctagctggtacaattgttgatgtgcagggatccatgtttaaccctatgaaatgaaatgtatagttttattaatctgaccaatcattaggtaatgaagtagaaagaaaatgcaaactgtaatttcttcccctgtaatttcttctccagtattggatatgtgagttttttttggcaatatctgagggtgcttttattcataatttctctgtagtagtagaaggtgattcttctagcaatttaaaagtagatgttttgttcggtgtatatggacctttttctatactgtc

SEQ ID NO: 55193 - DNA, 265 bp, Zea mays
  Clone ID: MRT4577_150332C.1
ataaaaaaaaaaaaaaaaaaaaaaaaaaaaaaaaaataaaaagaaaaattttaaaaaaaaaaaaaaaaaaaaaaatattttttttgttccttaaaacaaaaaccacactaagggcatttttctgcaaatctccataacactgaggggcctgtgggggccttcttcctagaggccccatttccgccttattgtgaggggttataaaatatccactgtgccgttttttaataacattttctagtgaaaaaaacctctggttttcccc

SEQ ID NO: 55194 - DNA, 328 bp, Zea mays
  Clone ID: MRT4577_150333C.1
gcgaccactcctcactagcttaggacggttcagcggcacagacgtgcgacggacgatcacggcgactcatgctccacacatggcattccagctctccgacgtcgggccccggttccacggcctctggtgctacgccgcgcccaggtccgcggtggcggagctggcgcccgtgaggttgggcatgaagaggtcgtcgtcgcaaggcatccgatgggactacatcggctgtgggaccaatatgatcatggtgacgacgacaacactgatgctgttcgcgtgacggttctgactggcgccgtcaaggaaacgcactgctaaggccgggctg

SEQ ID NO: 55195 - DNA, 274 bp, Zea mays
  Clone ID: MRT4577_150334C.1
tgcacacgacgggggacgcgtggacgaagccgctgatggaccgagatggctgccgcctccacaacctgaagggcacaggtccgtactgccaagctgatacaggtctacatgcggacgcgaccggccaggggaggatcgctaaacctgatttgtactgctacggccctgcaatttgctgtaaagttcagtacatggctcccactctcagaacgcaaacggcctgggcgatgcctggcaactatgaacccggagatgcggacgacgctggacaagg

SEQ ID NO: 55196 - DNA, 493 bp, Zea mays
  unsure (1)..(493): unsure at all n locations
  Clone ID: MRT4577_150335C.1
gggctcccttctcgccctccncggctggtgggctgccggcgccggcgccgccaaacgccaggtgctgaggccttcgccagtgtcttcgacggcgacgagcacgtaccaggtggagcatatgggatgcagattgggagttcggaagtgaccttcactaagaacccatatgaagatggttataatgcttatgtgggggttcctgagaaagatcctttgcatcctcctgaatatgcttcgtgggggacatatgacaggagtcgccttcagtaccgctaagaccagaacttagtcattggagaaagaattgccttctaggttttaatggccatgtcttgtcgtttacagtaccgaagctttatgcctgctgcttggttttccattaagagttgtccttttcaatgcttctaatcataactttttccattacaaactggctagattattaaactattggtaccaagatgtccagcaatgtgcggaaagcaccttacat

SEQ ID NO: 55197 - DNA, 278 bp, Zea mays
  Clone ID: MRT4577_150336C.1
cgtgagactggcggtggataacgcgtcatggaccgacgataagcagctccaggacatgtacctgatctgcaagtccgtcgcgatgcgacatcgacgcacctgggagcgggcatgagaggagaagctcaaggcgttcgagctcgcactggcgacggcagacgccacgttctagaacctcgactcgtcggagatctcactgacggacgtgagccactacttcgactcggacccgatcaagctcgtgcattggctgctcaaagacgggcgagcggcgtcct

SEQ ID NO: 55198 - DNA, 1671 bp, Zea mays
  Clone ID: MRT4577_150337C.1
ccggccgggtaaaaaaaaaaaaaaaaaaaaaaaaaaaaaaaaaaaaaaaaaaaaaaaaaaaaaaaaaaaaaaaaaacctcgaggccggccggggtggaacactgggccggcaggttgtccgccgcatccccttgcgttgcgttcacggttctcctctctgtctctcgcgcacgggatctcgttctccgcggcagctggtgtttcgctcccttctcgccctccgacggctggtgggctgccggcgccggcgccgccaaacgccaggtgctgaggccttcgccagtgtcttcgacggcgacgagcacgtaccagcaccaagcatcatgtcggaaagaggtcgcctggcaggacgattgattgataaccgcagcagagggtaccatgtagtccctctagttgaggatcccagaggccatcctgaagtcctcgtggatggggatcggaggggctactctgacattcgtggggttcagcagcgtcggggctaccctgacacccatctgcttgaggaacctaggggctaccctggtgttcgtgtggtcgaccataggggctatcctggcagtcgtggggttgatgaacgcagggcctatcctgagctccatcaaggctcacgcatgagggcggctcctcccccttacccagctgccttcgaggatgagcttgagttacaggaagttgaactccggaggctttcggcacataaccgtgctctagttgaggagcgtgaactgttaagcagggaaatacaagctggaaaagatgaggtccgccacttgaatgtgatcattgctgacattaacactgagaaagaagcttatatcagtaagcttatggacaagaggaggaagcttgaagctgaacttggagcaagtgagcacttgtgtgatgaggtcaggcatcttcgtggtgaaattgacaagctcgttaccgctcggaaagaactatctgcagaggctgcatctctcgtggaagagctgaacagggagcaatctgttaaacagcagctacctgtgctgaaaacagaaattgatggtctgcaacaggaacttgttcacgtgaggactgcttgcgggttagagcagaaggggaatttggaattgctggaacaaaggaaggcaatggagaagaatatgctttctatggcacaagagatcgagcagatgcgaggcgaattagctaattttgaagttagaccaaggggcccaggtggagcatatgggatgcagattgggagttcggaagtgaccttcactaagaacccatatgaagatggttataatgcttatgtgggggttcctgagaaagatcctttgcatcctcctgaatatgcttcgtgggggacatatgacaggagtcgccttcagtaccgctaagaccagaacttagtcattggagaaagaattgccttctaggttttaatggccatgtcttgtcgtttacagtaccgaagctttatgcctgctgcttggttttccattaagagttgtccttttcaatgcttctaatcataactttttccattacaaactggctagattattaaactattggtaccaagatgtccagcaatgtgcggaaagcaccttacatacatgtggttttgcgtgtctgaaaaaaaaagaaaaaaaaaaaaaaaaaaggaggctgtgcatagcttccttgtatccc

SEQ ID NO: 55199 - DNA, 218 bp, Zea mays
  Clone ID: MRT4577_150338C.1
ccggaacggaaggcccggcccgaacccacgcgatcaggacgacgaccattgccagctgtctgtcgttgacaaggacaactgatgcaccgaccccttgaagaagtggatgctcaagcaacagctgaacgcggacgtacgaagaacctttacaggtggctggcgttgtcatggacaactgatacaccggaccgacgtgtctgcttgcgtttctgtgaagt

SEQ ID NO: 55200 - DNA, 401 bp, Zea mays
  unsure (1)..(401): unsure at all n locations
  Clone ID: MRT4577_150339C.1
cccacgcgtccgcccacgcgtccgatcccttcaatcttacgctactgctagatatctcgttttttcgcagattgacgatgcatcggagatccgatcggctaaccgaaagcgttgtgacgaagctcttgccgaaccggtcacaacgatgttctgggttgccctagaagatgaacggatggtgagaaattcctcgccggagttgtcgctagagtttgggtggtaatcgaacttcgacgagatagtcatgtgtaacaccctaaatccatcatctaaaagcaaaccagtttaagttattggtttccaatagaacaaaaaaatatttgtgttttcaaataatgtaatggtgacataactaaatcaagcaatntcttgaatagataaaatcttaccaagattgatgc

SEQ ID NO: 55201 - DNA, 370 bp, Zea mays
  Clone ID: MRT4577_15033C.1
gatgggctgtggaggatccgtgcagagaaaagtcttcgtgataatggcttctagccttctggaatatttaccacctgcggccaagcgtgtgaaaattgctcggaaagattggcaagctgaatgaccgaaggggataagatcattgaccgcgtgcgcaagtctggttgctctctcaagtgtccctatcagggcttagaaaggacgtgtttggacaaactcaggaagaactacataatgacgatttagtgacgggttttttttaagaagggtttagtgatgacttgttgcatgcagctttcggctccaggacttggatttagtaaagctgttctctgttaaagttgctattagtactatttgctcgtgtgga

SEQ ID NO: 55202 - DNA, 316 bp, Zea mays
  Clone ID: MRT4577_150340C.1
cccacgcgtacgggggtattaacatgacttagaacatggtgcaattaaggatgatagttgaggaggcagctcaggatacacctcgatattactgactatcatggatactaaccaatcgccaccttgcaaggaaccgaaccgagatcaagaccgctaaaaggcacccttctcaaacataattcaagacatgtgacaagagatatgtagagatctccctgaagatgttatagaaactgtcatagcaagggtaactgttgctgcacttactggattccgcactgtgtgtcgcatgtggtgctcacacatgggctcagac

SEQ ID NO: 55203 - DNA, 518 bp, Zea mays
  Clone ID: MRT4577_150341C.1
agtgctcactcaaagctcatttatacagttttttagttcgctgttatgcgtgctaaataccgtacacaggacatgcccaccggaccgaacgggctactatactagcattccggcacaagagaccataggaatcgccccagcgcgcacgctggacgcgccatgctcagagctcagttaacaaatcacccacattgacttatactttggcactcatgacaccagggtatcaagggatatatttatacggcacgaaccgtatactaggagaggaccattgccagcatggcttgttttctacctgggcaattaaataaccatatcagaaaggtcgactaatgattcaaacagggctcccatcctgcggattgatttagcgtacataccatcttgacattttttcactgtaccaaacagaaaacccattgaagtatccatatgcgtatcccattcggtccagcattatgttatgagcctccacctcttcatggatatagcctgacaaccgctagagaatgctg

SEQ ID NO: 55204 - DNA, 333 bp, Zea mays
  Clone ID: MRT4577_150342C.1
tcggatgaggccgaccaactggccaaaaggctgtgacgagctacagaggaagctctccgactaggtgaaggtgaggaacagggcggtgaggaagctcaggagggccatcaggaagctggagtccctcaaggttctggacgtctgtctctcggactgctccaccggatcgctttccttcaactgacgctccggtcaccagtcgccgtaggtgtaagactctgcgtaggccgaggataggaacggtcctggctcgttgaccaccgatggctctgcgccatgcgctccttacagagacgccgacatggacgtgtcgtcagagggatcgtgcaccca

SEQ ID NO: 55205 - DNA, 572 bp, Zea mays
  Clone ID: MRT4577_150343C.1
gaaaccttaacgcaaaggagacggatctaactctacatgactttctctcacccctggagagagaggaatcttgcgaatttctactgggagaagggggtctgacgccgatccccacgagtttgtcctggccaactccgtctatctctcatcgtccggctatatggatgttactgaatgcgtcgacattgtgaatactgccacgccaaaggatgtccctcctgatgaacctgactgggactacattctcgatcgcatctgcaacagagaagatctacatgaaatcaggcattcgtcgtatgccggctgccctaacattatatagatcggccgctgcaggaatcggctaaatgccacctcagttttgcaagatcagtgagggcattatgcgcaacgtcctccagcaaattgcagaagatgtccatcgttagatgtcaatcccgaagatgaacgaggcatcacctcccacttaaggcgaggtctgcctcactttggctggaaacagtgctgatgaagcttgagcaatctcatatctatgagtctcatgaagacatgttagactgacgatacgggta

SEQ ID NO: 55206 - DNA, 1291 bp, Zea mays
  unsure (1)..(1291): unsure at all n locations
  Clone ID: MRT4577_150344C.1
gggtacctcgaggccggccgggccggggccccatcagccgccacgatgtgcaccctggagcagcgcggccgcgtcttcgtcctcacccttaccggcgacggcgagcaccgcctgggccacgccctcatctcctcgctccgatccgccgtcgcctccgcggcggctggtgcggccaaggcggggcccggggccgcgctcgtcaccgtcggcgagggccgcttcttctccaacggcctcgacatcgggtgggcgggaacctcccgccgcgcgcctaggcgagctcgtcgacgcgctccgcccgctcgttgccgacctcctcgcgctccccatgcccaccgtcgccgccgtcaccggccacgcctccgcgggcgggtgcctcctcgcgctctgccacgactaccgcatcatgcgcggggaccgcggagtgctctacatgagcgaggtcgacatcggcctccccctcccgccctacttcatggccgtgctccgcgccaagatcaccgccgccaacgcgctccgcgacgtcgtgctcaggggcaagaaggtcagggccgcggagggcaaggatatgggcatagtggatgccgtctacccctctgcgctcgagacggcggaccaggccttcaagtttgccgagcagctcgcggcgaggaagtgggacggaggcgtctacgcgtccataaggatgtccatgtaccctgaggcctgcaggtcagttggaatcgtcgaggagagcgatgaggagaagcggaagcacttcgcttctaagctctaacttcgtgattggctgatgagagggtttctgtggaagcatggaggaacctacacattctgtatctgtacatcgtccaaccattggcgctgtcgctacgtgtgaagtacacaccgtgtacttgtgcagaccttgtaatttttacttgcctggtagcgggaaataaatcgaagctcctctcaccctttcttgaataatttgccccagtaacattatcgatatgtgttcatgtgttgtgcttgattcaaaaaaaaaacatgcgcggacgagtttggaagcttagaacttgcgaatggtcccgtggtggggtatcttgcaagttgcaagcgggtacactccttggctgcagctcgccatggattagctcttttccggctttgattgaccggaaaatttccataacgaaattgtcgcatcatgtctaacatgagatgacgagagtgcctcgatcatgtcagtgtcatgctggctgtnactattaggcttggttcaaggaaaganaaatgaccatgatttttg

SEQ ID NO: 55207 - DNA, 204 bp, Zea mays
  Clone ID: MRT4577_150345C.1
attcggctcgagcccgaccttaccaaccacagttctttcaccaaccccaacgcaaaccccaacaggggcctgcagcactaacccgggggggcgcgccaccccaccaaaaatttcccccctcttcccacctacaccaaaaatgctcaccccctgcatcaggaccgatcccctccaccaacaaagcatgcccgaaaaccaccccac

SEQ ID NO: 55208 - DNA, 364 bp, Zea mays
  Clone ID: MRT4577_150346C.1
cctcctcctcccagcgactccaatctcgcgctctctcctccccaaaaacctcatcttcccctgctcgtctgcgtgctcggccatcggtactctccaccgacgctctagagttccagggtttagggtagacacggcggtggcggcggcttccttatgcgtccggtagtactccctgtcctcctccctcaccttgcgcgccgcggactcgggccgccgggcgtcacggcctcgcgcggctcccgcttctgcgtgaacgacgcggctcccgccgggtccgcgagctcgtatttggacccgaccagtggcggcttctttcctgagggcgcgaacggcaggacgcgctccgccgcttttccccccggct

SEQ ID NO: 55209 - DNA, 487 bp, Zea mays
  Clone ID: MRT4577_150348C.1
ggaacaaagcccccattttttaaattttttgggagggggggggaaaccctacattgttccctccaaaacccccacaaaaaaaaagtttttttgaccacaacggggggcttccctcgcctaaaggcccctaaaggggaccccaacccattaccctgttcctcgacaacttaattaaggggccattcttaaacccatggaacccccccttgcccaaaaattttcaacaagggtgtcccgaaaaaatagggcccggttcttgcaggggaaataaaaatctacttaattgggcatttgggaccaggcagtggggttaaacccctctttccggacttacggaattgcagtcaaaaaaaaggaggggggggggccccaacaaaataaaaattttttggtccttcgccttgggcctcgaaataatgttttgcatgaaaatgcatgcaatcatcatctccggggggggattgggaacccaaccataagctggccc

SEQ ID NO: 55210 - DNA, 516 bp, Zea mays
  Clone ID: MRT4577_150349C.1
ccggccgggaaaatctcacgctccctcctcctcccagcgactcaatctcgcgctctctcctccccaaaaacctcatcttcccctgctcgtctgcgtgctcggccatcggtactctccaccgacgctctagagttccaggtaatcgcgcttcctcccccgccctcctccaccccaccccctccatcacactccggttttccattgctagggtttagggtagacacggcggtggcggcggcttccttatgcgtccggtagtactccctgtcctcctccctcaccttgcgcgccgcggactcgggccgccgggcgtcacggactcgcgcggctcccgcttctgcgtgaacgacgcggctcccgccgggtccgcgagctcgtatttggacccgaccagtggcggcttcttccctgagggcgcgaacggcaggacgcgctccgccgcttttccccccggctgcttgccaaagcgacccaccgctccagtggcctccatcacaccggaaaaacgcgacggcc

SEQ ID NO: 55211 - DNA, 145 bp, Zea mays
  Clone ID: MRT4577_15034C.1
ccggccgggacaatgcaatttatataaaagaaaaactatggggctagagtaaccacggcgtggcccgctcgccctagcgaccgggacgtacgccgcccgcgtcgcggtggtctcacgggacggcaaggccacggcgcatggagcc

SEQ ID NO: 55212 - DNA, 221 bp, Zea mays
  unsure (1)..(221): unsure at all n locations
  Clone ID: MRT4577_150350C.1
actctctttcaaaacacatattcccatnacttctattccccccctccacatcacactgaggctgtttctttcatacacacctcacccccacccacacacactctaaaccatcctcctacaacgataccacctcaccaattatcaccacaccactcccaccctactcttaatcctcacccacatcaatcaccttcacatcatagaaaacaaacacatttaca

SEQ ID NO: 55213 - DNA, 271 bp, Zea mays
  Clone ID: MRT4577_150351C.1
ggctaatcgaaagaaaagaaaaaacagccgccacggatctcctccgctgagtcattttgtagccgaaaccctagcgctccgccgaggcgccgagcaccaggctccagcctcgcctaagaaaaagccgggccgagacaaactacttgtactaactcagctgctatgccatggatctggagatcgttgggcggtgtgccttactgttcgacgatgacgcgacaacggaggtcgtcaactccggcggttccttgtcccctgggcggccatcggg

SEQ ID NO: 55214 - DNA, 172 bp, Zea mays
  Clone ID: MRT4577_150352C.1
tcgagcggccgggcgggcaggtcaagctttttttttttttttttttttgaatctagaaatgtgctttcttatttctgggacgccgcaaacatcttccaaaaaacttcattgttgaactatccctcctgtgctctctctacgagggcaccacctatgatgggggggggggggg

SEQ ID NO: 55215 - DNA, 123 bp, Zea mays
  Clone ID: MRT4577_150353C.1
accacgcgtaagccaataaacagctttctatcttaacatagactgaataccagcaggtggagtcatttacacaattcgatgccaaatcttaacattatctttcgccatcacatgctctgaaat

SEQ ID NO: 55216 - DNA, 176 bp, Zea mays
  Clone ID: MRT4577_150354C.1
aggtggccgataccacatttttttttgagccgggaaacaacacaccttgggggagggggggcagatgaaaccatgcaaatgtcccacttggtttttacgatacaaggacccgggcaacttgcctcaaaaacccccaaacagagagttgtaaaacaggtcccgggcggacccgtggg

SEQ ID NO: 55217 - DNA, 343 bp, Zea mays
  Clone ID: MRT4577_150355C.1
gagccggccgcgacaacagcatccatcgcgtgcgtacattaatctaatgcgatcttcagtaccagtcgttctgatctgctccctcgaaatgaaggtaactaacaaggcgatggcttcagggctcctcgtacagatggatctgatcatcacaggctttgccatgcccgaacaataacaaggactgctgtaacgacatctgctactactgcaaccgcaagctcaactgccagaacatcctctgccaggaccagagaggtgaggacttcacgtggcacgtatgacataataagctctccgccgcctctggaatggcctatacacgtcctccaagtccacaaggagt

SEQ ID NO: 55218 - DNA, 324 bp, Zea mays
  Clone ID: MRT4577_150356C.1
gggccgacccacgcgtcaacgcgactggtgaccggattgaggtgaacccaatcggtcatgcactgggggtgccagtctatcaaatacagaagtttggggtgccccccaagcggggtactgcggcatcccatatggatatggtggcatgccccacatttgattttggacatatggtggtggcgggtatgcataatgatacggcatataatggatatggtggtggaggtgtccatgatgttggtggtggtggtgtgaccagtgatctttgatgtcataatgtgatatactctacttccagctgcacctgtgattttttttcaggac

SEQ ID NO: 55219 - DNA, 307 bp, Zea mays
  Clone ID: MRT4577_150357C.1
gttcgagaaggacgctgattaagggaggactcgttcattcaagcgcccctgcctgctccacacgctcagggctgaccgttagagagggattaccatggatatagctctatcgaagtttgagaccaccaggtactactgcacggtcattgatgcccctggacaccgctacttcatgaagaacatgatcactggtacatggaatgctaactgtgctggccttatcattgactccaccactggtggctctaagggtgatatctacaatgacggccagacccgtgaacatgctctcgttgcagtaactctt

SEQ ID NO: 55220 - DNA, 630 bp, Zea mays
  Clone ID: MRT4577_150358C.1
gcatgtattccacgctctttgtttggatcccaatttcatgaccgagagcagcgcatggccattgcctttgggttcgatttccaacgatcaagaggacacgatgttctatgctgcagatgaagggagactactactgatacctctctttgtataagactggcacctccaaagaaaggacgctgctaactacaccatctcgacctagaaggataccaactacattaattactgtgaccttcatgcaacttactgtattaggctccaactgaaactatacctaccacaggtctactatgaaaaacacagctaacttgattacgcatggagctttaaacaacatgcactttactactgcatgtgggtactgcataccctagctgaggagtgctacatggacaccactctgatgatgaacatacttattcatcactggatgctatggactattgacatatcggaagcacctgctgaagacatcagatgggcgcccaaccaccactgctgcgagggcaaggaagacctgtcttacatgccttgaacctactgcctagtgttggatgctgtctattgacattatgcaatgtgatctgcaccctgctttattgtaagcgacgcttgtagcatccgtct

SEQ ID NO: 55221 - DNA, 319 bp, Zea mays
  Clone ID: MRT4577_150359C.1
attcggctcgagacaggtacatcgggtgtttgtttggggacaagggccaaagtactcttgaccgaacccctatgaacgcctaagactcttcaggggcaatcggtgcgacctatgtgtgacacgatcaatgttgcaggctattgtgcctctgaacaggctgtattgccactctatgctggtggtcgcatttcacgatgcacagctgacattgttcacgggataatatatatcgctccattttgtgaaggagctggtcaacacatatctcctaagagattagagattgggggagtagacttgacaaacctgttctgcacaa

SEQ ID NO: 55222 - DNA, 320 bp, Zea mays
  Clone ID: MRT4577_15035C.1
ggtttggttttaatatatttgaggggttgttgagatgttaaagcgttccaggccagtttcgctcaagggttaaagctttccggcaagtttgcttaaagttgaaacccaaaaccagaccaaccatttttttgccaaacaaagtgtgtgccacacccgaagtggcccataccaagttttttcttttaattggggacccggctcacgcccgcttttttaaagagggggggacttaacggggggggtggtttatataaagtcccctacctccaaaataggggttttaaaccttggggccctttgggatttttgatggggccttt

SEQ ID NO: 55223 - DNA, 1467 bp, Zea mays
  Clone ID: MRT4577_150360C.1
tcccgggccgacgtccgaccgaaaaaacccaaagtcacgtttcctcctcaacaaaaaccctcgcaaaaatctgggatctatctagaagcaccactcaacaaaccctaggttgcctgatcggttgatcgctccatggcgatcatctccgacttcaaggacgacgaggcaccggagcagcagctggcggccggccacggcgtcgaggtggccctcgtggcggcgttggagaggagcggcggcgcgctccccttcctacaggcggctatggatgtcgcccaccgcaggtccggcctgttccgcgacccttcggcggtgagcaaggtcaccgcgatggcggcggccgtcagggcgcagatcgaagccgaggagagggtgaccagggaggcggaggccaagaggaaggcggaggaggacgagaggaaggcggaggccgaggcgcagagggctgccaaggaggcggtaatggcgacggcagaggagaagccagagagcacggtggagaaggacagcatggaggtggataagaaggaggaagccaacgtgagacaaccaaatgctggcaatggtcttgacttggagaagtactcgtggactcaacagttgccagaggttaacatcaccattcctgttcctcaaggaacaaaatcaagatttgtggtatttgatttaaagaagaaccatctgaaggttggtctgaagggccagccacctatcattgatggcgagctctataagccagttaaggttgatgactgcttctggagcatagaggatgggagaaccctgtccatattgcttacaaagcatgaccaaatggaatggtggaagtctgttataaagggtgatcctgaagttgatacccaaaaggtggaacctgagaacagtaaactctctgatttggatcctgagactagacaaaccgtggaaaagatgatgtttgaccagcgccagaagcagatgggccttccaacaagtgatgaaatgcaaaagcaagaaattctcaagaagttcatgtctgagcacccggagatggacttctctagagcgaaattagattgaggatgtgtttggccgtttgtctgaatgcgttattagtatgaaacattttttgatcagtttgcatgtaatgcgtcagaaatatctggagatagacttctctagagcgaaaatagcttgaggatgtgttcggccagttatttctaccagtgtgcattggttgtctgagtgcgttattagtatgaaacaaaaattttgatcagttcgcgtgtaatcgtcagaaatatccggagatggacttctctagagcgaaaatagcttgaggatgtgttgggccagctatttctacagtgtgcgttaggttgtctgagtacgttatcagtatgaaacgaattttgaacagtctcttgtaatgcgtcagaaatatttttttagaactgtggcatgtcttgaaccaaaaaaaaaaaaaaa

SEQ ID NO: 55224 - DNA, 352 bp, Zea mays
  Clone ID: MRT4577_150361C.1
ggaaccaaggggggggctccactcaaaaaaaaaaggggtttggccgatcccaaagggcaatttaaaaaaaatttgcctcccccatacggaagggtttttgccgatcccaaggccaataaaaggggcggtttttccgctttttagatagaacaaaaagggggggttggattttcccattgggggggggcaaattccccgggaactaacaacagagacttggggttaatttcccaatttaaagatacccctcttccccatgggagggatgttttttttttgttcgaatttaaaagctttaacaaggaaacaacatttaggaacctacttgggggggggggtttaaaacaacggg

SEQ ID NO: 55225 - DNA, 415 bp, Zea mays
  unsure (1)..(415): unsure at all n locations
  Clone ID: MRT4577_150362C.1
tgcgcgacgggggcgtaccccccgtgtccgcggccaggctggggctcgccgnnggcgccgnggcgctggcggccgnggcggccgncnccgcncacgaccncgccgcgcaccnggctggcgncgactgccgcgcgggacaggcgaggtacgangccctttttgggctcggggtgttcctcaagccggccgtgcacgcagccagaatgcgcgctcgccgtcgccggcctggcgctgctggcctacccccactcccactcccagtcccagcagcggtacgcggagaccatgctgctcgtcgcggngctcctgggggtgctgggctacgtgctcaactcctgcctggtgtacaagcgcgccgactgtcgcacgcacctggtgaagtcggtcatgcaggagccttatctgctggggagcc

SEQ ID NO: 55226 - DNA, 362 bp, Zea mays
  Clone ID: MRT4577_150363C.1
gggccaaaaaaaaggggacctttttttgggtggccccggaaaaattaccctgggatacaagggggcgccaaccctttccaacggggggagaatatcggggggaaccaaatgaggggaaagtttacagaaaaaaaagcggaacttggaccggcatttgttttcttggaaattgacggggccaggggtttgggcatgttccaaaaccccctggtgaccgaagaccccgatttgggacaccccccaaagaaaaaagaaatttgcaggggaaagggaactcctttttttttgggccccccttaataaattgaggggaagggcttttgggggaccaaagggacgggctttattaaaggggaaaaatg

SEQ ID NO: 55227 - DNA, 317 bp, Zea mays
  Clone ID: MRT4577_150364C.1
gccatatttatgctagggagcgcataccggagggaagaaaagccatatattgggcaggtctgggatgaaccgaccgtgaaaaaagctggtacactgacctgaccgaggacaaagcatcagaaacatatcactcaatcaaagcaaagccatatgaattcatgaaaaacatgtgcatacatatagcaacgaaaagtatcaaattactgatttcctctttcggactatgtaactgtacatactgctcaaagggacatggtaattgtgcatacttcttgcgctcatctattacgcaggcagagaactactaaacacaactg

SEQ ID NO: 55228 - DNA, 563 bp, Zea mays
  Clone ID: MRT4577_150365C.1
agttccagaactctatctaacgtcagcctcacacagtctctcttatcgagctagagtgctacactgctactacgttagaagaagaagcaacttacagctgaagctgtatcagtggcgaaatcttacgccttagtgtccgccctactgccacgttatagcctcgcttctatgctgagccccattgcttgctcccgcaagctcgctcaagccgaaacaaggctaagcgcgatcccacaaacggcgcgggtggcacggcgtcactgcctcgcgacggcacatcatcacacacgtagtcgccacgtcacgtgctactgccggcctactgggctcacgttcgacctgtcctgtcatgcgcgttcgctgcactccactacgccagccccaaacggtcactctggcgacgctgctgcgtgtcgccaccacaccgccggcgatctatgccccttctcgcctatgatcgccgacgacagtccgtcatcatgctcaaggcatgaaaggactgacgtgcctgttacgaggttaaatgcgacagaaacccggaatgctccgctcatgcagacatc

SEQ ID NO: 55229 - DNA, 283 bp, Zea mays
  Clone ID: MRT4577_150366C.1
gaggcggcgtgggtagctcactgcctgtgatcttcagcaagcttcagctagctcattgcctctttgcagggagtgtggagatggcgcctatggcggctactcgtgttcggatcgtgcgggctgttggtgcaaccatggcggctcttcaccgggacgaagaaggccaccacccccttcgaaggccagaagcccggtacctccggcctccgcaagaaggttactgtattccagcagcctcattatctgcagaactttgttcagtcaatatccaatgaccttcctg

SEQ ID NO: 55230 - DNA, 1363 bp, Zea mays
  Clone ID: MRT4577_150367C.1
caatggttttcttgcggccggccaacacattcaacaccacgcgcatccttcacgcacccactcaggccgcatccggctgtgcagcctgatcgactgcactaagctgtcgcaggacgcgtcgagccacgcggcgcatttcggaccggcgtgccgatccagatggtggtgcgcgtgctctactacgagcagccctggctctgatcggccgtctcgggcggcgggtgcaggtgcgccgcttgtatgttccaggacgccctaaaaacaaatgcatattgccgcttgagacattgtttgatgaatttgttgttgcccatatccttgggtggtggggcaaagctgtaatgatacgaaatcaacttctactttgggtcttgtcgattggctttgagctaatggagctaacgttcagacatatgctgccaaactttaatgagtgctggtgggatagcattatcttggacatattgatctgcaattggtttggtatttgggcaggaatgcacacagtccgtcactttgatggcaaaacttatgaatgggttggactgagccgccaacgaagtatcatgggtaaggtgaaaagatcgttgagccagttcactcctgctcaatgggacaaggatcagtggcatcctttcatggggccactgcggttcatccaagtgctgttcctctgcgttgtcttcatgaccgtggagcttaacacattcttccttaagttttgcctttggatccctccaaggaaccccttagtcgtgtacagattgatcctctggtggctgatcgccatcccaaccatccgcgagtacaactcctacctgcaagacaggaaaccggtgaagaaggttggagccttctgttggctctctctagctatatgcatagtggagctgcttatctgcatgaagtttgggcatgggctgtttcatgacccgatgcctacctggctgatcatcttttggagctcggtcgggactgcactcgtgattttcttgctttcgtggtcatggaggagtcaccaaaggttcaggagaaagcagctctgattgtttcagtttgctacttttctttttcgaattttatataggcgttgtacatatttgatatggtttgtgatgtaacttacgttttaggggtggccatttttctgctgcccctggcaggaacttggtttgtcacgatagatcatgcattgttgacaacatgagattgattaataaattgaaataaccgcgacatcataaccaggtgtaattaattattaaagcaaggtcactgcatattttggttccaaactaattctgggccaacaatgcacagttctgtaataccaatgaccaatcattatctaaaaaaatgaagg

SEQ ID NO: 55231 - DNA, 1755 bp, Zea mays
  Clone ID: MRT4577_150368C.1
caacgaagcatcatgggtaaaggtgaacattgggacctcgaggccggccgaacgctccccctcaccttccatcctccgcgcagccacgcatcccgcagccgcgattcccgccacgctcaccttccatccccgcgctctcccatcgacgtcgatgctcatcctccgcgcagccacagccgcgattcccgccgccccgccgcgctcacctaccagccccgccgcggatccctgatgttgagatctgggagctgaagctgaagatctcgcggatgcgggtgcggctgacggagctggagcgggagcaggggctaatgaagcagcaggggaggatgcgcggcggggacggcggcggcggcgagcacgaccgcgccttccttgcgtcgctctcgaggggcatcggcagcatcaccatgttcggcgggcccgcggcggccgacagacggcgcaagaattgtggcggccggagctcccagtgctccgacggcaaggcccgcaggcggcagaaggcatccttccctatgactgatgcttcgctgctagcgtcgacagtggaggcgcggcaggcggtgatcgtggatggatgcggtctcagcctctggaggatcggtcggagctaagcagggacggtggctgctgacagctgagtgatacgtgtatttctaggaagatcaagcccagagctgtcgcatagccagaactgcatctacttccacggcaccgtcagcaaggacctcctcacacacaagttggtcatccagctctctaggaagatcaaggacgacatatgaagactggagtactttgaagtttgatgaacaacaaggacatcctcacgcacaagtttgatgaacagtcaacaaaattcttgagccagttcactccaacccaatgggacaaggatcagtggcatcctttcatggggccactgcggtccatccaagtgttgttcatttgtgttgtcttcatgatcgtggagatcaacacattcttccttaagcttgcgtcctgttgccgagttcctcaaaaggacaaagtcgttacggtggttcagtctctacttgaatgatattagtgacaagcatgctcggactaaccaaggaatcccttagtcgtgtacagattgatcctctggtggctgattgccatcccaaccatccgcgagtacaactcctacttacaagacagcaaaccggcgaagaaggttggagccttctgttggctctctctggctatatgcatagtggagctgcttatctgcatgaagtttgggcatgggctatttcatgacccaatgcctacctggctgatcatcttttggagcttggttgggattgcacttgtggttttcttgctttcatggtcatggaggagtcacagaagattcaggagaaaacggctgtgatagatttcaataactcaccttagattctttcaattcgcttcttttcttttctctttctctttctttttcatttttatatacgatatggtatgatatgatatgtgatgtaacctacgttttagaggagccccatttttctgctgctcctggcaggggactcggtttgtcaggataggtcattgttgtcaacatgagattgatgaataatcaaggtagctgcagcatcagcaccaagtgtaattaaacagtaaagcaagatcactgtgcgtggattgggcttaccaaaaaaaaaaaaaaaaaaaaaaaaaaaaaaaaaaaaaaaaaaaaaaaaaaaaaaaaaaaggattttaaaa

SEQ ID NO: 55232 - DNA, 280 bp, Zea mays
  Clone ID: MRT4577_150369C.1
ctactactactctcctcgattgcttgctgctgctgctactcctaggcgccaggcgccagcaccgcgaagcatctcgcctcgccgtcacctccggccaattcttctaacgcgccaactaacaacagcccagctccaaagccggagcgagggggcgcgatgtcgtcgccgacggccgcgccagcgccgaccgcgccaccggccccgccggccaatgcgacaatcccgccaccggcgacaccgtccgcgtcgcccccgacgcccacgcctcccaagcccaccc

SEQ ID NO: 55233 - DNA, 488 bp, Zea mays
  Clone ID: MRT4577_15036C.1
cctggccggctccggcggcagcctccaaaccaccctcgcgctctaccactccggtcgtgtagctccccagcaggcaaccaccatcgcgcacccaccggccaccgcgtctacatttgccaatctctgcttgaagcgttctgcccactctttcaaccgagaagttcactattatcctgcgcatgttccctttccccctttcgtcgtggcacgcacgttaggagttcgaccgattgccggaacgtcttccgccgtcttctgcgccatcgaaagagcgatgaggtttgtggtgacgaaagtttgcagcggcggagggaaggcgcgggcgggtgcgctccatatagccggcgccggcattggcattgagacgccggcgctgctgctgtccactcgtaaggggctgtcggcattcttgtcctgtgacctccttgggtggttgccgctcccggactccctctttttccatgtgtgtgctacccattttatagagg

SEQ ID NO: 55234 - DNA, 2441 bp, Zea mays
  unsure (1)..(2441): unsure at all n locations
  Clone ID: MRT4577_150370C.1
tttatcagctgcggcagcgagattcaccgggggaagtatttgcagcgaccgcgccggtccccgccacaaaatcagctacccaccaccgtccgtcagcggcggcggggagagcatggcggccatcgtggcggcgcgggcgtcggccccaggcagggcggccgtcagcaccatcgccgcgttccacagccacgcgtccccttcccgcgcgctcccgctcgcctcctcctccatcggcggcgccaggcggtaccaccacgcccccgcgtgctgcttcgccaccaagcccaccgcgccggccgctgccgagctcgtcgaccaggacttcgccacggccactcaagaaacagacttcatattggtgtcatgttcaggttctgggattgaatctaacagaagagaacaagttctcaaagccaagaggacgacaagccggtggcggcggcagacgacgaggcgaaaaggaagaatgcggcggccggcgccgaggacagcgcccggtcactcgtggccggcctcgacgacgtgatcgtcaaccccgtgggtctgggtcggcggtcgcggcaggtgttcgacgaggtgtggcgcaagttctcgcggctgggccagatttcgagcgcctcgtccaccgcgctggcggaggaggagcaggccgtgcttatccgtggaggacctatgtgcgagttcactgtgccaggggcgcaggacaccaccgtcctcgtcgtcggtgccaccagccgcatcggccgcatcgtcgtgcgcaagctcatgctccgcggatacaatgtcaaggctttagtaagaagaaacgaccctgaagtgatagatatgctcccaaggtcggtggatattgttgttggtgatgttggtgatcctgcaactgtcaaagcagctgtatcaggctgcagcaagataatctattgtgcaactgcacgctcaactattacaggagacctaaatagggttgataaccaaggagtaaggaatgctagcaaggctttccaggattactacaacgaattggcccagctcagggctggtaaaagcagcaagagcaaactcctgatagcaaaattcaagtctgcaaagtccttgaagggttgggaggtgcggcagggttcttacttcccaaatacttttgtttctagatttgatgaaggtatcgatgcatcactggatttttcagaagatcagcaggctgttttctcaggatttgtattcacaagaggtggatatgttgagatatcaaaaaggctttctcttcctctaggttctaccctagacaggtacgatggtttactcttttcagtgggaggaaatggaagatcatacgttgttattcttgaaactggtccattggcggacacgacccagagcaagaagtattttgctcggatgactacaaaagtaggtttttgtagggtaagagtgccgttttcatcttttcggccagtaaacccacaagaccctcccctagacccttttcttgtgcatacactaaccattaggtttgaaccaaaaaggcagagacctggtgaggcatctcaaaattctagtgatcctcgaaactttgagctaaaactggaatacatcaaggctttacctactggtcaagaaacagacttcatattggtgtcatgttcaggttctggaattgaatctaacagaagagaacaagttctcaaagccaagaaggctggagaagatgcactgcggaggtcaggccttggatatacaatcgtgcgcccgggtcctctgcaggaagaacctggtggccagcgcgcgctgatcttcgatcaagggaacagaatctcccagggtatcagctgtgctgatgtggctgatatctgtgtcaaggcactgcatgattccactgcgagaaacaaaagtttcgatgtatgctacgagtacgtcagtgaccaagggaacgagctttacgaacttgtggctcatctgccagacaaggctaacaactatctcgcaccagcactgtccgttctagagaagaacacctgattgatgcgcaccatcagactcggacatgtaatatacgagtcatacgacgtgtatattttctcctcctgtaaagccatacgtttttcctatacaagccttgtgtcattcacatggtatgccgtttggcccttctgtaaagatcattgcacagaccgactccaggaaacaaaattttatttttgcgaaaaaaaaaaaaaaaaaagcgggggggggcccgcgttcccccttttcttttttgggggattattttaaacaaccttcgccggggggccccgggccccaattccccttttattggttcgctntaaacttccccccctgaggcggtttccccccctcccatgggggctctcacgcgcatcaccgcggnctttgcggccctttacctntttttcgcccccgtctccttcccacaccccaaaacaaca

SEQ ID NO: 55235 - DNA, 605 bp, Zea mays
  Clone ID: MRT4577_150371C.1
tcaggccctaaataattcaagaatcttctaagcacagtggttcaaactgataaataagggggaaaaatacctagagaacaatcaggcatgtatttatatagtgtagcaaccacatggtagttaaaccgttacaaccgaccaaggaggaaacagttggtgtgaggtcaaaactccttgggaaagggacaagtttcagtcaagctatttttaaaaagaaaaatgaatcttttattccggtctctacaaagttttgcacccatcaaatcaattacacagtttaagcttccggctgtttttataaaaactctcaaatagcgtgggactacttgagcactaagcctcttaaaacgaacaatgttggtctcctttgcaggatactccaaatccatatccaataagttgctctaaaactaacctacaaataaaagtataattatctgtaaataaaaaatcacatcatttttacaaagccaaatataccaaagagttgtacaccttgaataaatcagttatatctttaggaggctgcaaaccaaatgccattgtaaagactcttcaaacaagtcttaccaacatgacagtcaaataataagtgtggaataatt

SEQ ID NO: 55236 - DNA, 397 bp, Zea mays
  Clone ID: MRT4577_150372C.1
ggaacaatacttggttcttttcatttcacataagcacattcaagacattgctaacactgacactgacacccatggagatgcgtgacacataattactcaatcatcgccgctaaatgactcaactagctagctagctcaggggctctactacaacgcatagatgcttcactgggtggacaccgtccatagcaatgaatgggcatggaaccggatgctgcaggccaggcatcgcccgcagatgatgaactatctgcaccgccaacagcccatacacctgaacaataacctgctgctaatgcaggatagactggaggaccaagccgaatatcggctggtaccggtgctgcggctacacctgactgagctgctgggaaaactgttgccctaactactggaa

SEQ ID NO: 55237 - DNA, 2365 bp, Zea mays
  Clone ID: MRT4577_150373C.1
tccgagagctcccatttctcctcccgtccccttccctaatcatctcagcgaatccaatcgaggcgatggaccagcaccagcaccgagcgcctcgacctactcgacgacgccgctagggtcttcggcttctccatcaccggaggcgagcaccgccttcggaactaccgctccgtcaccaccgtctccgagctcgcagaccccgcgatctgcaccgtcgtgctcgagtcctacgtcgttgacgtccccgacggcaacaccgaggacgacacccgcctcttcgccgacaccgtcatcaggctcaacctccagaagctcaagtccgtcgccgaggccaacgccgccgaggccgccgcaaccaccaattccgtccctctgccgcggccggcggagtagcggcggctgccatcggcaagggaagaaagcaacagcaagttttgtgcgtttctgttatttcaattctctgggaaagggtttctctgaattaaatctgatcatggatggatttggactggacaaggagaggccgggtcagcctaaattaggtgtgattgcaagggcgcgacctgtaataatctctctttcatctcctagattccttcttttcatctttacttcttccagaatttggttaattcctgctttatgtgattggaatcattccttaggaattgaaaaaaaaaaaaaaaaaaaaaaaaatccgtccttctgccgcggccggcggagtagcggcggctgccatcggcaagggaagaaagcaacagcaagttttgtgcgtttctgttatttcaattctctgggaaagggtttctctgaattaaatctgatcatggatggatttggactggacaaggaggggccgggtcagcctaaattaggtgtgattgcaagggcgcgacctgtaataatctctctttcatctcctagattccttcttttcatctttacttcttccagaatttggttaattcctgctttatgtgattggaatcattccttaggaattgctgcttctcataaaaaaaaaaaaaaattcgccgacaccgtcatcaggctcaacctccagaagctcaagtccgtcgccgaggccaacgccgccgaggccgccgcaaccaccaattccgtccttctgccgcggccggcggagtagcggcggctgccatcggcaagggaagaaagcaacagcaagttttgtgcgtttctgttatttcaattctctgggaaagggtttctctgaattaaatctgatcatggatggatttggactggacaaggaggggccgggtcagcctaaattaggtgtgattgcaagggcgcgacctgtaataatctctctttcatctcctagattccttcttttcatctttacttcttccagaatttggttaattcctgctttatgtgattggaattggaatcattccttaggaattgctgctaaaaaaaaaaaaaacgaggccgccgcaaccaccaattccgtccctctgccgcggccggcggagtagcggcggctgccatcggcaagggaagaaagcaacagcaagttttgtgcgtttctgttatttcaattctctgggaaagggtttctctgaattaaatctgatcatggatggatttggactggacaaggaggggccgggtcagcctaaattaggtgtgattgcaagggcgcgacctgtaataatctctctttcatctcctagattccttcttttcatctttacttcttccagaatttggttaattcctgctttatgtgattggaattggaatcattccttaggaattgctgctaaaaaaaaaaaaaaaaaaaaaaaaaaaaaaaaaaaaaaaaaaaattctctggaaaagggtttctctgaattaaatctgatcatggatggatttggactggacaaggaggggccgggtcagcctaaattaggtgtgattgcaagggcccgacctgaaaaaatctctctttcatctcctaaattccttcttttaatctttacttcttccaaaatttggtaaattcctgctttatgtgattggaattggaatcattccttaggaattgctgcttctcaaaaaaaaaaaaaaaaaaaaaaaaaaaaaaaaaaaatattcttctttgaaaaagggtttctctgaaaaaaatctcatcatggagggattagcactgaaaaaggaggggccggcccacccaaaattaggggagattgcaagggccccacctgaaaaaacctctttttaatccccaaaaaccctttttttaatcttaacttctccaaaaatggggaaaacccctgctttatgcgagggaaattggaatcattccttaggaatcgctgcttcccaaaaaaaaaaaaaccggcgggactataaa

SEQ ID NO: 55238 - DNA, 287 bp, Zea mays
  Clone ID: MRT4577_150374C.1
acagtgctctcatctccttacaccgactccctctttctgccactagtatattgacaatggggcggcttcttttacacagggctacaatcttaatcaatctcaacctatccatccgtcctcttctcaccatctatatcacgacaacactttccccccgctccttgccaacatcaccctcaacatcatgcccttccagctcccgcccttccatccttatcatgtcctcgtgctcattaatgcacttttgatttaccacactcatgtgcactacctactgcataatccca

SEQ ID NO: 55239 - DNA, 1063 bp, Zea mays
  Clone ID: MRT4577_150375C.1
cttaataaaactttgttggtgaaggattacgctattgatagattaacttcagagaatcaggtgattctgttgccaatgtttctgatttcaggttgccttgaagatcccaattgaatgcctatttttttgcaggcaatgcgtttggaacttcataacatggaaattgctttacagaaatttcaagatttattcagtagtattgggcatgagggaatgaatagtttttcagcaatttctgaaaatcaggacgtacaggatgtgaataatgaacaacatgaaagggttccaggtacacaatgtggtctagcaaatgagcataccttggtaactgcagttgtcaaagaagccaccacacaaaatgtagatcaccagttggaaactgatccaggcagcatgcaagtacaaagcccagtgcacttcaagtctggtgcaatgccatctccggagctagtagctgcaaatacagaaaaagctgacagccttcttgaacccaatgtagacattggcatgggcagtttatctcctgcacgaccaacagattgtttgaatatggatcttgacacggagagtcagtcctgacaatgcaatttatatcccttcacacctggtattcggatacgtatatttaacaatctcgtagttggttgtggagcatattttattattttcttgtagttgatcaactgtcttgtgtgcgtagcctgtttagttagccactaaagagatagatcaggtagtgtaaagagcatcttggctcatctctctaccgccacaatgtcccgagattcggatggcagctcagctgatgagaccgaggagaaagaaatgatagctgtcattgtctcttgggataaatctgagggctcttattggaggagatgaaaaaaaacagactcttaaaaataggaggggctctcaaaagaaaaatagagagctatatttcgagggctgttgctagactggagatgctctaaggtgtatttgttttttggcttttgttctaagactgtctccaacaacgttctttatattcatcctctatatctgtcttttacagtcttct

SEQ ID NO: 55240 - DNA, 1701 bp, Zea mays
  Clone ID: MRT4577_150376C.1
aaactgggccgctggaacacagccaaggcacgtctgactcctgcttctctcggcttccgcttacagcgactcgaggctccagagtccggtcgtggtgattattatttaggcatgaggggcgccctcgggggcctcgggaaatcgacctgggctggacccagccgcgccccgtctgcctcctgcttctctctccgcttccgcttcctgcgcctccaggctccacttctccgctcggcagtcggcactggaaggacagcatgtcggcctcggcgtcgtcaccggcggcggcggcgggcgatgagaagcaggaggcggcgcccgtcaggcgctgcaagggcgtcaacgacctcgacaaggtcgttctccgcgaggtccggggcagctccgcagaggtgtacttgtatggtgggcatgtgacatcatggaaagatgagcatggagatgaattactttttgttagcaataaggctattttcaagcctccaaaagctatacgtggaggaataccaatatgctttccgcagttctccaactttgggaatctggaaccacatggatttgcaaggaataggacatggagtgttgatgatgatcctccgccatttccagtgccaacctccaatagcgcttatattgacttgatcctcaaacctactgaagatgatttgaagatctggcctcatagttttgaataccgcctgagggttgcacttagtcctggtggtgatttgatgctaacttcacgtataagaaacactaatgcagacgggaagccattctctttcacttttgcataccacacatacttcaagatttctgatatcagtgaggtgcgagtagaaggattggaaactctggattacctagacaacttacaagatagagctcgttccactgaacaaggcgatgcaattgtttttgaatccgaactggacagaatatatctgggcacaccatcgaaaattgccattattgatcatgagaagaaaagaacatttgttgtgaggaaaggaggccttcctgatgctgttgtttggaacccctgggataaaaaagcaaaggctatgtcagattttggggatgatgaatataaacgaatggtatgcgtggaggcggctgctattgaaaagactgtcactctgaagcctggtgaagagtggactggaaagttggaactttctgctgtgccatctagctattacagtggtcagctagaccctgaccgtgtgattcaggattccactgtcccggaggactccatcagctagtccttattctatttttgcaggtagagcattgtatcattatgcataagagatgctggcaacaagggctgtccacatgtttcttccattctgttcaaatcttcggtgtttttttattccgaatgcatatccgaaccaaggaatgtgaaattggtttccgctttttgaggatctatgtagcataatggataagtcggtgtttcgtaccctatttagggatgcttgaagcaagaaacatcttcatgggttgtaaaataaaagaaaaattatctttataatttgatcaattcttttgccttaaaaaaaaaaaaaaaaaaaaagggcggccgccaccgaaaaaaaaaaattaaaaaaaataaaatttaaaatctgaccttagaaaaaaaataaattataagggcgctcgccgtctagtgagccttgccccccgggaatt

SEQ ID NO: 55241 - DNA, 277 bp, Zea mays
  Clone ID: MRT4577_150377C.1
atagttcggccgaggctcgtagggtgcctcctctttggggtgtcatgaaaaacgtgcacataaagatcccagatgtcgcttacaagaagttccatgcgcacgagcatctgtttgagcattacaagaacaggtaaatcaattctacatgtgaaatatggcaaatttctaagtgggaggttgtatttaacgctaattggttttgccccaagaataatattcagaacacgttgaaatttgaaacggtagtctgcttgaattaggctcaagaacatgaatg

SEQ ID NO: 55242 - DNA, 561 bp, Zea mays
  Clone ID: MRT4577_150378C.1
gggaatgccgcacccacccacgcacaacaagaaaattttgactttaccggatgcagggagagagggcacgctcactagctgagtgatcgggcgatctttgggcgctagctttctgccgatgccaacacacggtaaaaaccacacgacgggagcacggaaccgaaagcgtatgacaccttcttcatgaacagctcccaggacaaggctaccgtggccacttcagacctccaactccaccccgcgggaaagatgactaaggacgacagatcgcatggcgcaaacggctgtacccccaaaaggccaaagcaccaagctcctgtgacgacagagagttcctacacagacgctgctgtccaagagcctataaacagatcctgcgaaaacactctcctatacgaggactcgctcgtgcgcgcctacaaggatgttgctcctaacgaggaggcactagctgcgaaaaagacaaacagcgctacgctgcctctgtaccaagaaaacaaccatctcacggatgcgtcaaacgtaccccgggtcaggcatgcaaacatcgagccccttgca

SEQ ID NO: 55243 - DNA, 621 bp, Zea mays
  unsure (1)..(621): unsure at all n locations
  Clone ID: MRT4577_150379C.1
cccctcgggtcgaccccgcgtccggctggnacccagccgcgccccgtctgcctcctgcttctctctccgcttccgcttcctgcgcctccaggctccacttctccgctcggcagtcggcactggaaggacagcatgtcggtctcggcgtcgtcaccggcggcggcggcgggcgatgagaagcaggaggcggcgcccgtcaggcgctgcaagggcgtcaacgacctcgacaaggtcgttctccgcgaggtccggggcagctccgcagaggtgtacttgtatggtgggcatgtgacatcatggaaagatgagcatggagatgaattactttttgttagcaataaggctattttcaagcctccaaaagctatacgtggaggaataccaatatgctttccgcagtgccaacctccaatagcgcttatattgacttgatcctcaaacctactgaagatgatttgaagatctggcctcatagttttgaataccgcctgagggttgcacttagtcctggtggtgatttgatgctaacttcacgtataagaaacactaatgcagacgggaagccattctctttcacttttgcataccacacatacttcaagatttctgatatcaggtatg

SEQ ID NO: 55244 - DNA, 541 bp, Zea mays
  Clone ID: MRT4577_15037C.1
ggaagggaagagggaaccggggtggtctaaaccgggaaaaaaataaaaaaagctttaagggggggggggggggaagaaacaaaggaaaggggggggggggggaaagggaacaaacaaaaaaaacgggccggccggggggggggaaagttaaaaaaaaggggggcttttcaaaaagttggaggacgtaatccgggggggggagctggaccacgtaaaggggggttttcccgccaaggttttgaagggtcctgaaaaaaaagaaaaaaggggggagctagctaaaaaaaatttttttttaagggggagcccccccccacccggaaaaaggggggggaaaaaaaaaaaaaagggggggggttaaaaagggggggccgttttaaaaaaggaggggaaaaaaatctttggggccgtatccgggggggaaaggaaagggggggtttttgtttttgggaagggggtccaccggggggccggcctcaaaaagggcctgggcccactggagctcgccgaacccccacgcaaaggggaggccacccccccc

SEQ ID NO: 55245 - DNA, 347 bp, Zea mays
  Clone ID: MRT4577_150380C.1
gcgccccgtctgcctcctgcttctctccgcttccgcttcctgcgcctccaggctccaggctccacttctccgctcggcagtctgcactggaaggacagcatgtcggcctcggcgtcgtcaccggcggcggcggcgggcgatgagaagcaggaggcggcgcccgtcaggcgctgcaagggcgtcaacgacctcgacaaggtcgttctccgcgaggtccggggcagctccgcagaggtgtacttgtatggtgggcatgtgacatcatggaaagatgagcatggagaaggctattttcaagcctccaaaagctatacgtggaggaataccaatatgctctccgcagctct

SEQ ID NO: 55246 - DNA, 882 bp, Zea mays
  Clone ID: MRT4577_150381C.1
ttgggtaactcgagcctggaggggcccgagcgcaaagcctgaagctgaagcaaagcaaaagcaacgagcagtggagaaaaaaaaaaaaagaggcgccgcagcgaggtcgaggtgattattatttaggcacaaggggcgctgtccggaaattccccaaatcgacctgggctggacccagccgcgccccgtctgcctcctgcttctctctccgcttccgcttcctgcgcctccaggctccacttctccgctcggcagtcggcactggaaggacagcatgtcggcctcggcgtcgtcaccggcggcggcggcgggcgatgagaagcaggaggcggcgcccgtcaggcgctgcaagggcgtcaacgacctcgacaaggtcgttctccgcgaggtccggggcagctccgcagaggtgtacttgtatggtgggcatgtgacatcatggaaagatgagcatggagatgaattactttttgttagcaataaggctattttcaagcctccaaaagctatacgtggaggaataccaatatgctttccgcagttctccaactttgggaatctggaaccacatggatttgcaaggaataggacatggagtgttgatgatgatcctccgccatttccagtgccaacctccaatagcgcttatgttgacttgatcctcaaacctactgaagatgatttgaagatctggcctcatagttttgaataccgcctgagggttgcacttagtcctggtggtgatttgatgcttacttcacgtataagaaacactaatgcagacgggaagccattctctttcacttttgcataccacacatacttcaagatttctgatatcagtgaggtgcgagtagaaggattggaaactctggattacct

SEQ ID NO: 55247 - DNA, 177 bp, Zea mays
  Clone ID: MRT4577_150382C.1
gcccttaacaaagctagatggggtgatttgagcattaggttgggttttttcaccccgccggaagccaatgccatccttaacgccaggacatcttccactatagagcgtgcttctagcaaatttaaaattttcattatttaacgaatgctaacttattttagcactaagtcgcgctac

SEQ ID NO: 55248 - DNA, 786 bp, Zea mays
  unsure (1)..(786): unsure at all n locations
  Clone ID: MRT4577_150383C.1
ttgggtacctcgaggccggccggggggtgatgaaagcgagcgaagcacgtcagaacgtaccagcaaagaaaggcatatccatggggagctgctgatccagcgatccgcccgagctcaaaagcctgaagctgaagcaaagcaaaagcaacgagcagatcgcgatcaggggaggaaaagaaaaaaaaaagaggcgccgcagcgaggtcgaggtgattatttaggcacaaggggcgctgtccggaaattccccaaatcgacctgggctggacccagccgcgccccgtctgcctcctgcttctctctccgcttcctgcgcctccaggctccacttctccgctcggcagtcggcactggaaggacagcatgtcggtctcggcgtcgtcaccggcggcggcggcgggcgatgagaagcaggaggcggcgcccgtcaggcgctgcaagggcgtcaacgacctcgacaaggtcgttctccgcgaggtccggggcagctccgcagaggtgtacttgtatggtgggcatgtgacatcatggaaagatgagcatggagatgaattactttttgttagcaataaggctattttcaagcctccaaaagctatacgtggaggaataccaatatgctttccgcagttctccaactttgggaatctggaaccacatggatttgcaaggaaaggacatggagtgttgatgatgatcctccgccatttccagtgccaacctccantagcgcgtatgttgacttgatcctcaacctactngagatgatttgaagatctggcctca

SEQ ID NO: 55249 - DNA, 325 bp, Zea mays
  Clone ID: MRT4577_150384C.1
gacacacgccactaaactaagtcggatcaccgcgcacagatcatcgacatcgccgctgccatcgaggtcctgaccgtacggacgacctccacaagcggaggatccgccgcgctcgtggtgatatgcatcacgacactgtccgccaacctgtgaaacataacggaggcgaagcacaccagcacgtacaaggtggtggacgcggtgacggtgctaaagatgcaggtggacgtctgcacgaagctcttttaggccgcgcaggggatcgccatggacgaggtcaatgcggcctccacgctcgacgagcagtcggcgctgaagctctgca

SEQ ID NO: 55250 - DNA, 498 bp, Zea mays
  Clone ID: MRT4577_150385C.1
aaggcaaaagaattgatcaaatataaagataatttttcttttattttacaacccatgaagatgtttcttgcttcaagcatccctaaatagggtacgaaacaccgacttatccattatgctacatagatcctcaaaaagcggaaaccaatttcacattccttggttcggatatgcattcggaataaaaaaacaccgaagatttgaacagaatggaagaaacatgtggacagcccttgttgccagcatctcttatgcataatgatacaatgctctacctgcatcgttggaaacataaacctatgaatcaaatgcaggaattaataatttacaacaaatgtcgttcataatatttgatattgatggttgcaaacaaacaaaacaatttgagcattagctattcttcctcaatgtggttgccacttttacggttatcctgtatgatggcaagtgtccttatgccatgaccttcgttgtctgctataactcttggcaatgtac

SEQ ID NO: 55251 - DNA, 221 bp, Zea mays
  Clone ID: MRT4577_150386C.1
gtttttatacgtatgtcacataagcagcggtggtctaaacgccaaccacaaccagcgggcgagagttcgagctgggggctaaatttagactgctgcccaacccacacccagaatcatcaaagcccgagctgacttctgtgacggccagccgggatggtaactgagacgtacactggtacttatactcatactgcacctcatatatagagactagggtacga

SEQ ID NO: 55252 - DNA, 1617 bp, Zea mays
  Clone ID: MRT4577_150387C.1
ggaattccccaaatcgacctgggctggacccagccgcgccccgtctgcctcctgcttctctctccgcttccgcttcctgcgcctccaggctccacttctccgctcggcagtcggcactggaaggacagcatgtcggtctcggcgtcgtcaccggcggcggcggcgggcgatgagaagcaggaggcggcgcccgtcaggcgctgcgagggcgtcaacgacctcgacaaggtcgttctccgcgaggtccggggcagctccgcagaggtgtacttgtatggtgggcatgtgacatcatggaaagatgagcatggagatgaattactttttgttagcaataaggctattttcaagcctccaaaagctatacgtggaggaataccaatatgctttccgcaggtatgccattgtcgttccaatagccttggcttctctgtatcttcttttgcaggaatcttaattccacttatgtagttctccaactttgggaatctggaaccacatggatttgcaaggaataggacatggagtgttgatgatgatcctccgccatttccagtgccaacctccaatagcgcttatgttgacttgatcctcaaacctactgaagatgatttgaagatctggcctcatagttttgaataccgcctgagggttgcacttagtcctggtggtgatttgatgctaacttcacgtataagaaacactaatgcagacgggaagccattctctttcacttttgcataccacacctacttcaagatttctgatatcaggtatgttgtttcaagttatggtcatcatctttgaaatattcaatttgccagcatagtttttgaagtaatcttgtggcagcatgtttatccccagtcccaattcgtttgaccaaactctggtattaaaccataattatctttgattttgtaattagcgttcttaagtacagaattgtttacgtgattccatgctaatacagtgaggtgcgagtagaaggattggaaactctggattacctagacaacttacaagatagagctcgttccactgaacaaggcgatgcaattgtttttgaatccgaactggacagaatatatctgggcacaccatcgaaaattgccattattgatcatgagaagaaaagaacatttgttgtgaggaaaggaggccttcctgatgctggtcttgtgaatgctcatctttccttttgcttgctactgaaatagattattatcattgaaataattcaagaatgaagttcacgaggtttcatatattcttcgttacagttgtttggaacccctgggataaaaaagcaaaggctatgtcagattttggggatgatgaatataaacgaatggtatgcgtggaggcggctgctattgaaaagactgtcactctgaagcctggtgaagagtggactggaaagttggaactttctgctgtgccatctagctattacagtggtcagctagaccctgaccgtgtgattcaggattccactgtcccggaggactccatcagctagtccttattctatttttgcaggtaatatttctagaactagtgtatgcgctatataaagtctgtgaattgaatcaagtaaaaatcaaccgttgtgct

SEQ ID NO: 55253 - DNA, 475 bp, Zea mays
  Clone ID: MRT4577_150388C.1
ggcaaaggagtgaactgatttgattaaaagtttcaaggcgacgcatagaacagacataatatagacccatttttgctcaaccaagcactgggatacacccaacatagtttcagacattccgatggtttttttgcattcttggaagcacttttatccggaggggaagaatatcattccgtcgtatgaccagaccttgaattcttcatgttagtcgcagctgttcatggggaggatcagagccgccacccgggtgctggatcagcactcgttggcgtaccaggacacgatctccaggaagatgccgttcaaggcaatggcacccttaacattaaggatagtagacctgctgacaccctgcaaatatgtggaaacaatgtcctccttagcgtaacccatggatggcttgaggctaccttctgcctaggtcttgaccgtaatcttgatctaatgataggtgaaggacttctcaagccta

SEQ ID NO: 55254 - DNA, 327 bp, Zea mays
  Clone ID: MRT4577_150389C.1
cctaccttgggcattctttatccaccggtcgggtaacgaatgaagaatgttggcaggcaataagcatgtgaatcaagacagctgaccccggccagacttctgaaaggcaacatattggatggtttatagacggaacaaaacaaactgccaacgagcacgggatatgcgcgagccgaaaacctaacttacgcacgcatgcaagcgacgagatagcttatttatagggccacctaaaataaattgaccggccgtggataaacaacggactgactggaaaaacccaggacccacccaacttaaatggcaggcaaaacatcctcctttcgc

SEQ ID NO: 55255 - DNA, 304 bp, Zea mays
  Clone ID: MRT4577_15038C.1
gcaacggggacttttttcacaagaatagaaaggcaccgagggcctgccacacacctatttacacacttgaactgagaaaactctcggataaagtggatggtgcttccggatcttaaggaccgcatgctggtcttttcgaccccttcaaagaaaatgatcaaagctccccaacgagttacacaagggtggcaccaccggttttgtgatcccctacataatttacacccaggctgctggttctttaccagagaaaaaagaaagggggttgcctaagatgagaccgggttgacacaacacaccaacc

SEQ ID NO: 55256 - DNA, 275 bp, Zea mays
  Clone ID: MRT4577_150390C.1
cccacgcgtccggttagtcatcactactcacgttcgtccaccagagacaacaatggccatggagacgtgcttaagagcgtgggcgctgcacgcccccgctggcagcaaggacaggctcctcgtcggcaacctgcaggtgctgccgtcgaagcgggcgctcgcgccgtgtccgtcggccgtgtagccacgcgccggccgcggaacgtctgccattccaagaacgcattgtacgaagttggggtgtcggtcaagaagaactggaacggtttgtggat

SEQ ID NO: 55257 - DNA, 198 bp, Zea mays
  Clone ID: MRT4577_150391C.1
tcgttggcggtgcgcgccggcccgttgaggcgccgcatgttctactccgtccacgcacgacgcctgtgagtacggccaagggggagaagatcacctacgccgggatcgtgacctgcacccttctggcggcgtgcaacctggccatgggccacccgcacttagttgagccgtcggcggacccctatctgcacatccgaa

SEQ ID NO: 55258 - DNA, 273 bp, Zea mays
  Clone ID: MRT4577_150392C.1
cttgttgcctggaattactccacatccaaaatacacgcacgagtgcataaaaaggatgacccagcgccatgtgcgtttacaaggcctaaggttttttgaagcggcacataacattcctccccccattaatgattatggggtcagcggcgcctctaggaacaaccatgcactaacaggacttacaactgctggaggctggacatacaagattaagacacggcactgacgatgactacaaaaagtcatctagtgtgtctacgactgatgtacctt

SEQ ID NO: 55259 - DNA, 311 bp, Zea mays
  Clone ID: MRT4577_150393C.1
gtgttgggttttttttttttttttttttttttttttttttttgagggaatcgagtctgtcattttggagcacaatcaaatacaaggcaggatcatgacccatccattgcagatttgcagacttggatccgctcgatgtcctgcgccgtgaccaccgcgacccccgagcaggcgaggagcaaggcggcaagcgccagggcctgcgccgccgtcgcgctccccgtcccacccattggcctgggcgcctgcctccccctccactttcgggcaggcggcagctgctcaggagtcaggaggaaccccacccgtccg

SEQ ID NO: 55260 - DNA, 429 bp, Zea mays
  Clone ID: MRT4577_150394C.1
attcggctcgaggaggtgctctacgccatctcgtggacgttctccaaggagcacgtggtcgcgatgctcaccggcggctccgccatcatgcggaagggccccaacctatggaagctggagagcatggagcagcgcctggcccgcgccacccagttgcactccaagtgcaagaacacctaccaggtctaccgcaccctccagaacggcgaggtgcattacctgcaccccagggacggcatgtacccggagaaggtcaaccccggcagggagggcctaattcagaacttccccaggaggtgcatgaacgtgaaccccatcgacgtaatagttaccgggagggtcaccttcgactaataacacttcacgtacgccgagcgccccatacgggatccaaattaaagaacttgtgcctgtattaattacagtcta

SEQ ID NO: 55261 - DNA, 360 bp, Zea mays
  Clone ID: MRT4577_150395C.1
accgagctcatcccaagattgcttttaaattctttggtcccttcaaagtgctacaacatgttggatcagttgcttataagctggatttaccttctacgactttggttcatctggtgtttcatgtgtctcagcttaaaccatttacgcccaagtatacaccagtttttttctgacatctctcagttggtcgacctgtctggccgggatgttcatcctgttcggttgctggatcgtcgtttagttcggcggggtcacaagcctgtggtacaagttcaggtggcctggtcagagctaccagatgatgctactacgtgggaagatattgatgtgttgaagactcggtttccataggctcttgat

SEQ ID NO: 55262 - DNA, 362 bp, Zea mays
  Clone ID: MRT4577_150396C.1
acggatacctccaccatttacctaggccggcttctattgacatgttgctttataagttctatcaccgagccgtgctgtggcttgggacgggaactccaacaggaccccaaatttttatgatccttagtgtccgctcaaacgggtccgtagactcatttattcttgccgggcttttctaacctccgccctctccttcttcagggggatcggatacccgacaggtttacctatggcgttctgggtcatatgtatcgggttccttatctgtggccctggcattcgacttctaccataaaatccttggtgtaatcaaaggcttcatgctctcctataatttcttttgctttgactacagttggcac

SEQ ID NO: 55263 - DNA, 830 bp, Zea mays
  Clone ID: MRT4577_150397C.1
gtgcggacgctcgaggccggccgggccggggtctggagtcgtgtgtctgtgcggctgtgccatggcgaacaaagggtcagaccctgcctccccggcgtcggcgccaccgccgccaccgaagcggcgaaagatcgagccgcccaggaggaccaggccttctcaagttaccatcgataacaagtcgtcttccaactcatcgactccgggttcgctgccagcgagagttgatctcaacaaagttagagaggcaaagagatttgccgtccttgaagcgcagcatgagggatgccttggaagctataaaagcttcgattccctctttgggaattaccttgttcctgtcataccaacgaacgatttctttcatcaggccgggaccaaatgatgaacaagaatggctatttgtaacgaacagaatgactactaaattttgcaatttcctttaagagcgcgacctgatacagcattactaagctatcaacggaagataacacgaagaccaagttttgtgtgtggtgttgtacgtaggccccctaacttgcaagatctcaaaaggtaaagattatcctgcacagttgcagatctaagtagtgaaaaagtttttgcattatggggagcatatgtcagtgtgtgttagctttctttctttttctcttctagtgcgaatttgtatccacatcttttccttgcttatcgctccaccggcctctgaggaatgcacgtctggatcatcatttttatttaggtgttgaacttgaacataacctatgtacccttttgtcagaatacgaaaaagatgatttctgaaaaaaaaaaaaaaaaaaggccct

SEQ ID NO: 55264 - DNA, 359 bp, Zea mays
  Clone ID: MRT4577_150398C.1
tgtatagtctcaaatatatatcacacttaaaactaataattttgagttgctgctgctataacttattatcttattttattgcaatgcctttttttagactattaccaaattggactgatgattgctgtctgggctgggtctgtctgatgatctagcctgagtggttgagcctgagagggaaatccaatgctctcattgtggtggttagtgcactaggtattaattacagagattaagaataatttttgattgatctcattgtggtggttgtactgtacgttctccacatcaacccagtatttgtaaaaatggaactgatgggacttctataaacttctaaaacagtccaattaattaat

SEQ ID NO: 55265 - DNA, 357 bp, Zea mays
  Clone ID: MRT4577_150399C.1
gcggccgggccgacggacgctacgatcatccctattcttgagaccaccacgcgacgctaaaaggggaatccagacacaacaatccagactcattggctacccagatatactccctacttatgctccttgctctttctacatgtggtgctaacgccgactatcatccctcatagctcacaagctcatatagcttcccttcgtcccgcataccttacatcaactatatgccttctatgctgtgaccacccagctcttcaaccatataggcttcaacacgctgtctcagcaggctacatacctttatcgccctagctggctcagacacatgccagccctatctttggcgcaggtattggt

SEQ ID NO: 55266 - DNA, 291 bp, Zea mays
  unsure (1)..(291): unsure at all n locations
  Clone ID: MRT4577_15039C.1
gagcttanagtcggcggccgcggcagccggcaccggttgcctagcaggctccgccgggcgcagcgatcgaaccgacggagcgcgctggccacgcgctggcgccgccgacggggtcacgctcgcctggtgatgcctgagcctgtcaatcctggcagctatgacgtcgaggagggcggcggggtgcgacgagatggaggtggtagccgaagccatggatgctgtcttggggctttcgaatggaattcgcaggcgtttaaattctctggagcaagaaactcgagccgatatgcg

SEQ ID NO: 55267 - DNA, 903 bp, Zea mays
  Clone ID: MRT4577_1503C.1
aagacacgctacgacctcgcttccggcgccatggagacgaagcgggtggccatcatcggcgccggcgtgagcgggctggcggcgtgcaagcacctgctggagcgcggctgacggccaggcgttcggctgcgccggcgctggcgagtggcgcctcaaggtggccgacgccgagggacgcattgagacacacaaggcagacttcgtagttctctgcattgggaggttcagtggtgtacccaacatgcctacgttccctccaggcaaaggtccagaagcatttgaggggcaagtgatgcactccatggactacgcgaagatggccactgagaaaaccagggagatgatcaaaggcaagcgcgtcactgtcgtcggctacctgaagtcagcgatcgacattgccgccgaatgcgctgaagtgaacggcactgatcatccatgcacaatggtggtccggacgaagcactggatcatacctacttcgcttggggagtccacatatcgctgctatacctaaaccgcttcgcagagctactgatccacaagccgggcgaaggcttcctcctttgcctcctcgctaccctgctggcgcctttggtgactaatccgttctgttatccctctaatcaagagccttgcacacacagacagatttgttaagacttagaggtggccgttttgcaatgcattctgtagaggtggctgttttcaaagttcgctgagagctactacgccatcccgatgaagaagttcggcatggtgccggaccacagcctgttccaagcgctggccacatgcctggtggcgatcctgccgaaggggttctatgagaggctggacgaacgcagcatcgttctgaagagggcgaagacgttcagcttctccagggaaggcgtcgtcgtggac

SEQ ID NO: 55268 - DNA, 316 bp, Zea mays
  Clone ID: MRT4577_150400C.1
gcaaggtttcagctcgccgcccgtggggaaaggtgcttggtggccgtccgccgtggggcgtaagacgggcggtgtgagtggaggaacggccccttggggcgcgaatgccctaacgtacgtcgtgttggtgggcgagcggcggcgccgatcgcttgctgagcattcgtgcattgacaagcgtgcagcgtatccacgcgcctcataggtgctgtgcaccgattgcgttgcgcctcaactgcgatgaggacttgagcgcaatgaacagtgactctcatactaagcggattgaatgcctagcgtcttatatcaaggaggt

SEQ ID NO: 55269 - DNA, 239 bp, Zea mays
  Clone ID: MRT4577_150401C.1
gcacgaggccgcctcgccccccgctagcaccagctagtctgcttactcacctccatcacctggctggctggctggcgcgcatgcatgcatgcaaactgcggggggcggccgttttgttgttctagggtctagttcgatcgacgtgtcctgtttcgactgggtacatcttctttcgttgatggtgtctagtgtctttcggttagggctctgctgctagacttcccactaattgcactgcc

SEQ ID NO: 55270 - DNA, 387 bp, Zea mays
  Clone ID: MRT4577_150402C.1
ggttctagtcgcttctcgtcgtttcgttcgtaggtgcgccccctctcatctgcactaaacctgagtcctgattagggttctacataatcgcttctctttgcctgattgatttgataccctacatccgtggtcgccggttgttccggattagccggatctgttggtctccggttcgtgtgtgctgtaccggatttggggtatgttcgagttgcttggtagatttacgttggtacatacggttgcacagaagatctggatttactgagtagtaggctagtagctgcctacggcgtacacatgacttgtgtatgaatcgtgtatctggcgtgtcgatgcttagtacgcgtagtgctgcaccatactgaaactgaatggacattggctgtg

SEQ ID NO: 55271 - DNA, 314 bp, Zea mays
  Clone ID: MRT4577_150403C.1
ccctccttttttttttttcaaaagggcaattggggcatgtttttttgctcgaagggggaaaaacatgtcaagatttcacccaaatcagggtaaatcgctccccatatggggcataacctgccactcgtaattgtgcgcgtaccccaagtgcatgaattaaaaaatagcccgaaaaatacaattcgaggacagcgattgctaggctgcatacacatcacgagcgccaaccacccccaaccgtttgactattgcaacaaagtttgacatcacgttttggctcctttatttagcattgtgtttgttttttcctgggt

SEQ ID NO: 55272 - DNA, 272 bp, Zea mays
  Clone ID: MRT4577_150404C.1
catagataagtcgtgttttgaagggttcttgtgaataagataaaggcttagatacatttggttgtatgaacgggttttttttaggtgtatctagtgtttggagaaccgcaacatgatgtctatgttgtacatgacctaagtgcatttctctaccaccagcactcttgcccaagcatggtagaccatttgtgtttaatgttcattacatgctaataaaagatactggtgggaaggttaaggttatggttttaggcacaccaaacaagagggag

SEQ ID NO: 55273 - DNA, 277 bp, Zea mays
  unsure (1)..(277): unsure at all n locations
  Clone ID: MRT4577_150405C.1
aaaggggcccaaaggnaaagggaaccgaccacaggcgnacaaccaaacaagncagagggggagncaaccagagacgncangccacggcaaacanccccagncgaggaagaggggcaaanggcaacgganaaggaccgaagnangacggggnnannacacaaagaacagcacggcgcncncaggcaccgcccgcanacaggggagnccacgccggggcgggggcaacagcngcnaccggagggganngccagggccccgcaaggggaccggagagagg

SEQ ID NO: 55274 - DNA, 282 bp, Zea mays
  Clone ID: MRT4577_150406C.1
atcacatctggagacaaaataaaatgtgcaatattttttatgtaggcgagctaacacagtgtacctaattgcagaattatctgattaatttgtaatagataagttgtataacattttcatatcttaaaatgttttttagatcaatcttgaagtgtaatattttcaaaataaaattctacagaaaaaaaaaaaaaaaataaaaaaatactaaaaagtaaactaaaaagaaaaaagaggtgtggtgctgtttgtgttgggtgtgttgatgtgtgtgtttgtttg

SEQ ID NO: 55275 - DNA, 707 bp, Zea mays
  Clone ID: MRT4577_150407C.1
cccccccccccgctgcattgtttcagagaattacaagcttcagcaatactttcttctctggcacaaaatagtcccccgaaaactaacatgtcacacattagtctgaactttaaattgtatttctcattaccaatgctcagctaaaattctaactttccagggctcagtggagcacttctgtttccagacagattcacaagaaatgtacaagtggactgaacttttgggaaggccagtgtggttgtaaaatgagtactcttgtaaaagcagatgcattcttgcttaatctccattgcccagagtgttgccgcttattcagcctctatgtctaatattctcctcaaatattccaattgttcaaactcaccttgtaggttctcccactcttgaagagacaacgaaactaacttccacccagaagcagtaatgtagcgtcgtttaaatgctgtgtggcctaatggtgtacctaaattcctagagaagtgtgttggcccatctatctcaaatgcaagcttctcatcaactaacacggcatcaacagtgtaaccatcgatggcatattctctaacccactcatgcccggtactatagaggagacgaccaacctccttttgaaatgaagaagttgtcttctggttgaaccttttgctctttccagcttgtgctattttctcctcaagatcacttcttaagcacagtccaagatt

SEQ ID NO: 55276 - DNA, 269 bp, Zea mays
  Clone ID: MRT4577_150408C.1
gagtaatcaaagttcatgaaaaagataatggagacatcaaatttctgactaaaggagataataatgaagttgatgatagaggcttgtacaaagaaggccagaactggctggaaaagaaggacgtggtgggaagagcaagagggtttataccatatgttggtatggtcaccataataatgaatgactatccaaaattcaagtatgctcttttggctgtaatgggtgcatatgtgttactgaaacgtgaatcctaaaatgagaagcagttc

SEQ ID NO: 55277 - DNA, 329 bp, Zea mays
  Clone ID: MRT4577_150409C.1
gtgtatagttttaattaaaattgttagcaaacaaaagtgttacagtatttcatagtgctggtactaatgaaggagagtgtatatatatacataaagcaaaattcagagggggactgacgaaaacgaatgaacgaaagaaaacaaggttgacattagcatcagatggtaacattatctactactactaaaagaatgcctaccagggaaatctaaataacacaacatggaaaaggagaaccagactttgcaaaccgagacctggaagggcgaggcgttgtgggcgccggaagccgagacagaaagcttgcaggtgaccttagccttgggcc

SEQ ID NO: 55278 - DNA, 608 bp, Zea mays
  Clone ID: MRT4577_15040C.1
ccataatcaattttatccatattctgttatagatccgtgcaatacagtttctatatcatataaccatcaattttaggccttttttacaaaacctcctaatgacttctctctttatctgtttgtcaacaagaacatcaaataacaaacaaaacgttgtgtacgtatttcttattttacatccagacaagccagctcacttcctcaattaaaaaaaaattaagagaataataactgtgatcagttcgacgataatcaatgggtcgctggtgacagccgacaacatcctagtaaaatgtagagctgttcattggtgaagtatgtataatgtgtaagcttatactgagtactataaggtgagaattcattttatcgctcggcatacaagctaggtcttggtagcactacctatcgacttcagcttcgaaataaactgcggaggatcatcgatgctagaagagcccaagacgatttcgcgcttcattttcattgtaagcttgtgcaccgtgcgcagttcagatctagtggctccaccaatcatgaagacaaaaatccggttgcctagcctcttgaagtcacctgatgcgtgtctcaggactgaagaatacttg

SEQ ID NO: 55279 - DNA, 505 bp, Zea mays
  Clone ID: MRT4577_150410C.1
ctcaaacactatacaatgtcatactcttagaagggttgaggacaaatatttatagccctaagggttgtactacactacatactacactacacactgcagcacacaaatgttgtcctctagatgctaaagtttaaccgttatactacatgctgctgccacactacaacagtcaaaagactgctgctactgtgctgactgcctacagcagagacgttgtagcagagatattatcctccgcacaaataccacatgtgcatagcactatggcagccgagcaagtagtccggtcttctggcgatgcaggaaggttaacagcagcttggcttatcaagccacccccccacattcgcaaggtgtgagcctgtatgagactcgtacttcgacaagtgccaaactcatgatgcaatgagctaatctcaagagacggtccattgtggatttacttttacaacgcatttacatgattatcaatgttcatcgatgaagatcccacaaatagatgttt

SEQ ID NO: 55280 - DNA, 459 bp, Zea mays
  Clone ID: MRT4577_150411C.1
acaccgtctgctgcgaccgcaccgcgctccgcaccgacgtctgcgtcatgcgcgggcacgtccgcacccaggccgcctccaactcgctcttcctgctcctgcctcccaactcgtctcgaccggccaccgacgagcacatccgcccatacacgcgcaagtgggagtccagcatcatgagcaccatcgacgagctccgcctccgctccgcgcggatgccagccaaccagacgatccaggatttccgtctgatgctcgatgacgctcaccgtggtcgcatccagacgatcatcgaggagaagaaggaagctgctgctgcgaggagacaggaacatcgcggaagcaagaggagccggcagcgcagcaagacagccttggctgagaagccacggctcacgatcatctctcggaacgggtcgcgcgcgatcgagaacgaagccgagctggtgcgcgccgctgcgg

SEQ ID NO: 55281 - DNA, 1145 bp, Zea mays
  unsure (1)..(1145): unsure at all n locations
  Clone ID: MRT4577_150412C.1
acccggccgggatccaccgccccgtgcttctgcttcctgggttcttccgggcggtgctcggtgctgctgatcctttaaggctcgaacaccacgccccccgccggcccccactcaaaatccgactgtgagttgagacttagagatgatccaccaccaccgggcgagcttgctggtgcaccagcacagaaagggcgaggcggcggcagaggatgcgctgccggctgaagagtcaggcggcggcaggatgaaggagctccggggccgcttggcagactacgcctgtcaacaccgaaagcacgggcacgatgcgctgctccgtatgcttgccggcttcgcgctcgtatcctgcctcctgctgctgcttcctggcagccccgtctccgccaccatggacgagctgctgcagctagggaggagggcgcggcacgacgacggcgcaccggcaccgccgtgcgccgacgtggccaacgacaccgtctgctgcgaccgcaccgcgctccgcaccgacgtctgcgtcatgcgcggggacgtccgcacccaggccgcctccaactcgctcttcctgctcctgcctcccaactcgtctcgaccggccaccgacgagcgcatccgcccatacacgcgcaagtgggagtccagcatcatgagcaccatcgacgagctccgcctccgctccgcgccagagggagcgcccagccgctgcgacgtccgccacgacgtccccgccgtcgtcttctccaccggcggctacacgggcaacgtgtaccacgagttcaacgacggcatcatcccgctctacatcaccgcgcgccactataacaagaaggtggtcttcgtcatgctcgagtaccacgactggtggatgaccaagtacggccacatcgttgagcagctctccgactacccgcccatcgatttcaccaacgaccgccgcacgcactgcttccccgaggccgtggttgggcttcgcatccacgacgagcttgctatcgacgccgcgcggatgccagccaaccagacgatccaggatttccgtctgatgctcgatgacgctcaccgtggtcgcatccagacgatcatcngaggaggagaagaaggaagctgctgctgcgaggagacaggaacatcgcggaagcaagaggagc

SEQ ID NO: 55282 - DNA, 201 bp, Zea mays
  Clone ID: MRT4577_150413C.1
cttcgcccacgcttatgcggccacacgatatccgcctgcagagccaatttgcaagtgcacttgcttttatctccccccggctgaggcttgcgcatctcccctgcacagccaaagagctggacaaagagctggggcttttaagcacgccccaaaatgaggctgtgcttggccaatactttgagggggcctactgtttttggg

SEQ ID NO: 55283 - DNA, 244 bp, Zea mays
  Clone ID: MRT4577_150414C.1
taacgctgtcacgccgatggttgtggctcgcaagcttgagctgagtcagcacgcgatccgtcgtctcttgacgtatcagaagtctgacttccgcggcatttaccgtgctatgcattgactccggttgaccatccgactcctggagcctcatctccacgagttgcttccagaagggcaaatcgagcacattctaactgaattatgtactgacacgggagccaaacaggagggtgcgctcgcgcga

SEQ ID NO: 55284 - DNA, 843 bp, Zea mays
  unsure (1)..(843): unsure at all n locations
  Clone ID: MRT4577_150415C.1
gaccctccgggcctcggaggcgtgggcggacgcgccccttccgaccttgcccctgcggtctcccgagtcccgaagcatccccttccaaaaccctcgccgcgccgcagccacccttgcttccgcacgctatcgcccgggaccagccatctatggcggcgtccctgctcctccgcgccgtgcgccgaagggagcttgcgtcccctctcggatccctgggtgccagcatacagtcaacatgtgttgccaacatatgctcaaaatggggaaggtttgcaagacctttcagtgcaaaagctgctggaaatgaggttattgggattgatttggggacaacgaactcatgtgtttctgttatggagggaaagaacccaaaagttattgagaatgctgaaggtgcgagaacaacaccatctgttgtcgcatttactcagaagggtgaaagacttgttggaactccagccaagcgccaggcagtaaccaacccccagaatactttctttggaacaaagaggttaattgggcgacgctttgatgatccacagacacagaaagagatgaagatggtgccatacacaatcgtgaaggctccaaatggtgatgcttgggttcaaacaacagatggcaagcagtactcaccaagtcaggtcggtgcatttgtgctgaccaagatgaaggagacagctgaatcttaccttggcaagtctatctcanaggcagtgattactgttccagcttatttcaatgacgctcagcgtcaggccacaaaggatgcaggncgcattgctggccttgatgntgaaaagatcatcaatgaacctacagcagccgctctgtcttatggat

SEQ ID NO: 55285 - DNA, 1736 bp, Zea mays
  Clone ID: MRT4577_150416C.1
ggagagccaggggttgttagaacaagtccagtctagagagggagcgaaccaaaagggagaaataacaaaaaaaagaatagagacacacacacacagctctgttcttcttattccaatcctctctcatcttgctggttcatccttgggatcggctctgtcgtcccctagctagttcgttcggtgctgtggtttctgccgctgtatccaagaactcttgctcttgctgagtctgggacttcagttccttgcagagccaggctttacatatcttgggtgccgcacacagtatctatgcacctttgacaacaccaatctgattctgatgacaacaacagccactatctcccgtcatccttgcatcgatctgtcagctggcgtcgcctcgtgcttctgaagacgatggccacattcttctccacttccacgaaccagagggacctcgccggaggcggcggcgacatgtcgtcgttccaccactacgcctactcggacccaccagccggcggcctcatgcctttccccgccaccatcgtgtcgtcggaaggccacgtcgcgcacggcggtgacgacggcggcaggggcgcgttcgtggacgtgaacgcgagggacgggccgacgggcggcgccgagatgggcctgcagacgcagctgctcatggcgaacgccgcgtcggcggtgcagcaccaggggctgtcgcttagccttggcacgcagggggtgccggtgtctctttaccagtaccgccaggcgcaggcaggcatggccgccgccgcctttctaagcccggaccaggcgtcggcggcggcgagcaggagcgcgcagagcatctacgtccagaactccaggtacctcaaggccgcgagggagctgctggacgaggtggtcaacgtccaggacgcgatcaagcggaagggggacaagagccagcagggcaaggattccggcggcggcggcggtggcggcgagggcaaggacgccgagacgagcgacgagaaggctggcgagcacgaggggaactcctccgcgccggagctgtcgccgtcggagaggcaggacctccagaacaaagtgtcggcactgatggcgctgctggatcaggtggaccgcaagtacaggcactaccaccaccagatgcagatggtgatgtcgtccttcgacgcggtggccggcgccggcgcggcgaggccgtacacggcgctggcgctgcagaccatctcgcggcacttccggtcgctgcgcgacgctgtcggcgcgcaggtgcagtcgctgcggcggagcctgggcgagaaggacgggtccgcgcagggaggcgggctgccccggctgcgctacatcgaccagcagctgcggcagcagcgcgccatgcagcagttcggcatgatgcagcagccgcagcacgcctggcgcccgcagcgcggcctcccggagtccgccgtctccgtgctccgcgcctggctcttcgagcatttcctccacccgtacccgaaagattccgagaagctgatgctcgctaggcagacaggcttgtctaggggtcaggtgtccaactggttcatcaacgcgcgcgttcgactgtggaagccgatgatcgaggagatgtacagggaggagttcggggcggagatggactcgcactcgtcgtcggagaacgcggcgggcaacaagggcaaggacgaggcgatatcctcggaggaccacgaggagttccagagcccgtcgagcgccgccgcggccgc

SEQ ID NO: 55286 - DNA, 121 bp, Zea mays
  Clone ID: MRT4577_150417C.1
tgaggctgcaaaacactagtcggcaaatatttaaaggaagatgcgtttccgcgtcggatttgggctgttgctccaaatctctatctagaagctctaataaaggtttaagcttttggataaa

SEQ ID NO: 55287 - DNA, 378 bp, Zea mays
  Clone ID: MRT4577_150418C.1
gtggtaataaccgaagacattaacagatgtcctcctgctagtccttgggaggggggggctgagagaatgaagacatagattaggccattaggattgtgtgtacttactggatttaatgttggaagtgcttctagcaggtgctccttctattatgtatatacttccagttcgtttccatattgaagtccttcatcctgacatattttaaaaactttccagtctggtcgttaatctagctcggtacaaaaggaatcctactatcacttttggcttgatcattatattcgttcacgttttcttttctgacaatttgattatgcacaatgtctctggggtaactattcctgatcctagttcacttgcaaattattgctcttt

SEQ ID NO: 55288 - DNA, 366 bp, Zea mays
  Clone ID: MRT4577_150419C.1
ttaaatagtgatgctattgttgcttttgtgaaagctctttgcaaagtttcaatgacagagttgcagtctcctacagatcctcgtattttctgcctaacaaagattgttgagattgcgcattacaatatgaaccgtattcgtttggtttggtcccgtatttggaaagttctgtcagatttttttgtttctgttgggttgtcagagaacctttcagttgcaatatttgttatggactctttaaggcagctagctatgaagtttctggaaagagaagaacttgcaaattataatttccaaaatgaattcctgcaaccttttgcggttgttatgcagaagagcaatgcttcaaaagttcgtgaacttata

SEQ ID NO: 55289 - DNA, 385 bp, Zea mays
  Clone ID: MRT4577_15041C.1
cacgcgtccacacaaggcaaactattttctgggcgcttcgagttagtttgtatttgatggttttcatagttactagaattggaagtttgatcaaccgcttttatcagttgacgcatcagggatattcaccctttggtctcatggtgctccatgcagttacgcagagtttgcaaggttttctatttggacttatttatatttaccacgaaagagcactaggggaagttgttctattcattcgtcgcaagtggagtcgcagaggggatttgcgcgaggattcttttatcgcattagagaaaagaggacttgctcatttttcacaatttgatgaagacgaggaccacgaggacaacatggattcgcagagtagttcccttgcattttg

SEQ ID NO: 55290 - DNA, 742 bp, Zea mays
  unsure (1)..(742): unsure at all n locations
  Clone ID: MRT4577_150420C.1
gacgcctgcaggttcggtccggaattcccgggtcgacccacgcgtccgatcggatctttggcttggaccaagtggctggaatgtccgagacagcactacctggtgccttcaagacccggaagggcatgttccgtactgtcggacagctgtacaaggagcagctggccaagctcatggccacgttgaggaataccaaccccaacttcgtgcgctgcatcattcccaaccatgagaagaaggccggcaaactggacccgcacttggtgctggaccagctgcgctgcaatggcgtccttgagggcatccggatctgccgccagggctttcccaacagggtggtcttccaggagttccggcagaggtatgagatcctcacccccaactccatcccgaagggcttcatggatggcaagcaagcgtgtgtgctcatgatcaaagccttggagcttgacagcaacctgtaccgcatcggccagagcaaagtgttcttccgggcaggagtgctagcccacctggaggaagagcgggacctgaagatcaccgatgtcatcattggcttccaggcctgctgcaggggctacctggccaggaaggcctttgccaagaggcagcaacagctgaccgccatgaaggtcctacagaggaactgtgctgcgtacctcangctgcgcaactggcagtggtggaggctcttcaccaaggtcaagcccctgttgaaactcataagacatgaggatgagct

SEQ ID NO: 55291 - DNA, 637 bp, Zea mays
  unsure (1)..(637): unsure at all n locations
  Clone ID: MRT4577_150421C.1
tccggatccacctagtgcatcaanaccggggggtccggtctcacgtgctcgccagatccagctaccgttgaccttctccttgccttccactgcaggcgccggagcagggggcagtactcctaccggcgggggcctgaagaatacgacagccgcctccgcctctccacgcgacaagcgacggcggaggcgtgcagtagccacgtccaccacgcgcacctcgcggctctcctcaacgcttccgcgcgcttgcctccgctccctctcagccgcctccacctcccgctctcgctccccacggcctcccgcctcgtcgcgtccttccctccactcccgctcctcgtctgcttcctccgcgcgctccacctcctcccctcctcgccgtcgcgcccctttgactcgctcatcaagtcatatgcgaaggctgtgagatccgccatccccactgaagtccgaccagcgcctcgtcgaggtcttcacccccttcctcgagaattcctcgagaagctcatacgcctaccggatctcacagccttcgcatatgacttgacgagcgacgcaatggggcgcgagccaggatgggaggcggctgagcgcgcgcaggaagcatactaggagcgacagtggacggaaggacacc

SEQ ID NO: 55292 - DNA, 385 bp, Zea mays
  Clone ID: MRT4577_150422C.1
gactgttaagatcctttctcaaaataaaccagcctcggatgtcacatttgtacgtgtgaacctaggctgttgaccgcgaaacgtataactgaaccgctctcgactcgatacagatcaaatgccatgtatgatgaatggctttgcagccagccgtggcagtcagttcctgtgcctaagctaatctctagctgatggtctaaagggagtctaggctgttgtggggcattaggcgcctaacatgctgatgaggaccaaggacgtgccttggagcttggcctgctccagaacggacccctctgttgagggaatcaaatttttgttggtggccctggatcccggcctgaaatgggcactgaagttgaaggtgaatccagggtacagacct

SEQ ID NO: 55293 - DNA, 366 bp, Zea mays
  unsure (1)..(366): unsure at all n locations
  Clone ID: MRT4577_150423C.1
taccctccatttttttttttttttttttttttttnacggaaccgtttacactcatttttttcgctccnnacacatacaacaaaatctatttttacatcttttcccttaaatactattattttacacctataaaatatattttatctttacaatattttttaaccactatcaccccttcccccactaaatttacataacatttatacaatatacctctatcattcgttaccccaattacaactacaacttcatttccacgccttaaaattcaatcctatcatatttttcattcttaatctactaaatacaattttatttcccaattatccaatacattactttaaatttaactcaccaaattattca

SEQ ID NO: 55294 - DNA, 681 bp, Zea mays
  Clone ID: MRT4577_150424C.1
cggccacggtcctccagtggagcctggcgtggcccaacacgccggccttgcacgcgtcgcactggaagcacagcacccgccggtcgtgctccacacgcggcagtcgatggcgtccgccgccgtggccgcgccggacgccgggggtgcccagaacgtggcgttgacgtgctggagcccgcagtacgccggcggcttgcagcaccacgcgtccgcgagcggcaggtaccgctggtacagctcgccgccgttggtcccgccggcccagccgccaccgcacacgcccgcgtcctcgatgcagctctggatccgacgccacgtctcatagtccccgaccatgtcctgcagccagtcggagtagtccgcgatccggtactccccgtacccggccccggacacggcggaggcggcgccccggttggtgacggcgaacgcgaaggcggtggccacgaacatgccgatgaggatcacgaagatggcgacgacgtacgcccagaggagcggcgtggcgcggcagcacgcgccggccagagccaggagcgacagcaggaggaacgcggcgcccagcgccatggcgggcgcccgcaccaggcgctggcactcgctggccggttgcgccaggacgtaggcgcccgcgccgatgagcgccacggaggcgaggagggagataaagttcccggccgg

SEQ ID NO: 55295 - DNA, 772 bp, Zea mays
  Clone ID: MRT4577_150425C.1
ttgaggatagtgctcgagtagcattacagactttagaagagcccatcaaggatttaattccggttcaaaggcaaggtattaacgaagatgatttccttaaccagtttagtaattccctaaaagtaaagggcttagactttcatgaacgtatcgttaaagcctttcatacttctctaaaagtacaagatatttcggcattagtaattttagccggaattagcggtacaggaaaaagtgaattaccccaaaaatatgcggatttcattggtgctccactcgtcatgttgccggtacaaccccgttgggattctccccaagatttacagggtttttataattatattgaaaaaaagtataagccaactcaattaatgcattatctctatcaatatcagcaggatagaaaaatgcatggcagaatcatcatggtgctacttgatgagatgaatctagctcgggttgagtattattttagtgatttcctttctaaactcgaaacacgacgtagtaagccaacctatttatcattggacgtaggtagtttaaaacttcctgagaaacaacgagatattctgattcccgaagaattcctgtttattggcaccatgaatgaagatgaaaccactcaatccttatccgataaagtgttagaccgagccaatgtcttaacttttggtcgtccaaatgaattgaaattacggggaagaaaaatcaagtatgaaaaagcagaaaattatttaccttggaatgaatttgtaaagtggactaaaga

SEQ ID NO: 55296 - DNA, 410 bp, Zea mays
  Clone ID: MRT4577_150426C.1
cccgaacccgggggaggtaggaaaagtaaccaagcgcggagaaggggtgagagccttactggacgccagctatggacgaggacaaagagatgcctcccgccggagccgaagagatgatggacgacgacgagaagggagactttggcgaagacgagggcccatcgatgagggggggcgaggagaaggaggtcggcaagaagggccttaataagaaggtgctcaaggagggcgaaggccgcgagactccaaaggaccaagacgagggagaagagcattacacgggcactctacttgatggaacaaaaagcgacaaaaaacgtgaagggggggaaccgtccaagaaaaagttagtacaacgtcaagtgaaaaaagggtgcgcctaaggaaggaagaccacgaataaagagaaa

SEQ ID NO: 55297 - DNA, 596 bp, Zea mays
  Clone ID: MRT4577_150427C.1
atttccctctcgcgcgccacggtgagcaggccaccataaaaatatccaggccgcggtgaactcaatcctaatccaaaattcgttataagctcagtcggggtctataaattggaggcaccccctgcttcgcctacttgttacgcgcccagcacaccgcttctcgcctcaaatcatccactgtagcgcccgaatttggatttttccccaaatctgtcatctgcgccgccatgaggcaccgcgccgtggccagccacccacagaaaacgaggaagagactgtagttgaagaagttgtctctcaagctgagaatccaccagcgaagaataacttctacttcgacatctatggagtagacccagaacctcctgcaacacaaggcaagccccggtgatgaaacagccaagttctgttgtttttgctcaaaggtgatgccaaagcaggaggaagaacactaaacttgtttgggggaggatgttttgtttcccaattatgtaatattaagttctgcactcgaacaccttgttatgtaataagtactctttctatattttataagaatgtaaattatgttattggtgaaaaaaaaaagttaattt

SEQ ID NO: 55298 - DNA, 601 bp, Zea mays
  unsure (1)..(601): unsure at all n locations
  Clone ID: MRT4577_150428C.1
cccccctctcgagntttttttttttttttttttttttttttttttttttttttttttttttttttttccattcaaaggggcgcccttttttttcaaacgtatcaaatattcaggaaaaggattccccatattcgggaaaatttaccggattctccattgggaaagggaaccggaaaggaaaaggattgggcatactgctgcaccctgaaaatgtcccccaacctaagccctttttctttcttaaggggggggccccaggaaaaaaaaagggcaacttaaaaaaaccggttcaaaagcgtcccccagaaaacccccacactttgggaagggttttaaaaggttcaagttggttgccacccttgatctgacctcataaacaccagggtaaatgacctcctccgggtcaaggaaagggctcctcgggatttttaaaaacccggaaacaaaaaggccagggcccttggtctttttcccaaactggagggttccaacgcaggcagcctaaagttttggggggaagccaagtagtcaacctttgccataaacctttgccctgggggcaagcccttttgccccccaaaaatggaggcaatcctgttcg

SEQ ID NO: 55299 - DNA, 299 bp, Zea mays
  Clone ID: MRT4577_150429C.1
acccacacgtccacggacgcgtccgtttagcataccacggggtgcatgcacatgtatccgattccctgcatcactcacacctcactttttctgctaaattgtggcaatggtgataagtgatatgcatagactgtcgttatttattgactaggcgataccatttagaatagccattgtgcatgacatggttaatctactacagacacacatagttaagccttgctcagctgatcactgctatggaatttctgtggagtccagtttggggggtcatctcaagcagtgcttgacatttaggc

SEQ ID NO: 55300 - DNA, 1021 bp, Zea mays
  Clone ID: MRT4577_15042C.1
atccagattctgttatagatccgggcaatacagtttctatatcatataaccatcaattttaggccttttttacaaaacctcctaatgacttctctctttatctgtttggcaacaagaacatcaaataacaaacaaaacgttgtgtacgtatttcttattttacatccagacaagccagctcacttcctcaattaaaaaaaaattaagagaataataactgtgatcagttcgacgataatcaatgggtcgctggtgacagccgacaacatcctagtaaaatgtagagctgttcattggtgaagtatgtataatgtgtaagcttatactgagtactataaggtgagaattcattttatcgctcggcatacaagctaggtcttggtagcactacctatcgacttcagcttctgcacttgcagagttgttgcatgaacatatagtagtagaacctaaaaaacaggaattgagtttttaccgaaataaactgcggaggatcatcgatgctagaagagcccaagacgatttcgcgcttcattttcattgtaagcttgtgcaccgtgcgcagctgattcatatgaaatgataaatacagtatataatatgccaaccagattgggaattcgtttttttaatgcagtagtataagcacatggcgtacttcagatctagtggctccaccaatcatgaagacaaaaatccggttgcctagcctcttgaagtcacctgatgcgtgtctcaggactgaagaatcacttgaagaatcatcggaattacgagattttgcccatgttggtgtcctccttgatctcatagacatcggttgtggattttgtgctggtcgtgcagttgatgatgcagtttgtgtggcatcttgagaagcagaagcagaacttggttcactcatagatgggtactcttttagaggtaattcacccttgctcagtttctcaatcagctcctcaataagtgggaaaaaacgtgataaagccctcactcatagttcagcatgtagcgacgaatt

SEQ ID NO: 55301 - DNA, 476 bp, Zea mays
  Clone ID: MRT4577_150430C.1
aaaaagaaaacaggaataataccaggaggggttagcttacacaatccaagcccccaacacagagatataaacgtctccccagtacgtcccgacccggccgggaccgggttaaaccgggttttggactttggaggaaaaaacgactttgacaaaacaaatttgccaggaaaccggaacaaacccgttatcacataaacaagcagtagggggaggaaggggagctccgatccgatcccacccgaaccgttttatgaaaaggaggggggctacaagccgccttttcccttttggggtcccgcaaatgctggcggcgtggcggcgggggggtctccttttccaactcctcctcctttggcgaagccgagctccgaaaactcccagctcggaggtggggctacctcctggggcacccgggggtattgccccatttttgagaacagctcgctcgcgggtggcgccaaaacaaatatctggct

SEQ ID NO: 55302 - DNA, 208 bp, Zea mays
  Clone ID: MRT4577_150431C.1
ccctgagaatcactctgtctaagtttctaatctcatgtggacgaggccattttctcagcggtgagcttacgacttcctttgataggaatgccactaggccagagaggctcaggaagaagagctgtttctttttttatccggaatgtcaaatggctaggaataatgtttctacaagacacacggtctattaaatggataccgatactta

SEQ ID NO: 55303 - DNA, 133 bp, Zea mays
  Clone ID: MRT4577_150432C.1
gtcaattacaactgaaattgatgtttttttgcaatcgatgtttcactagatagaaaggagtttgcacaaggaataaccaaactaagattatccaattgattaatggggcacagcaattcttgtcaaatctgaa

SEQ ID NO: 55304 - DNA, 213 bp, Zea mays
  Clone ID: MRT4577_150433C.1
tccacgcgtccggccaccgcaaccgtgtgaccgaccgtgccgccggcgatcccgatccgacgacccgtgccagtccctctcgcagtcatgtcgccgtttgagccgactcgtgaggagagcgtgtacatggacaagctggcgtagcaggcggagcggttcgaggagatggtcgtgtttatggagcgcgtcgcgcgctacgccgggggcgctgtt

SEQ ID NO: 55305 - DNA, 337 bp, Zea mays
  Clone ID: MRT4577_150434C.1
aaacataatttaaatagattacatgtatatgaaaattgatgggaaacagacgttaaacttgtgtaatcacatattcatgaggctagtaggtttacaattaacttattttgaatatcaaataaatatcttcataaataaaagttattgtaggggctagcctcactattaaacgtaatcgctaggggctaatttgtaaaattaaccttcttctacatctggtttgcaagtagcaatgatacacggtctagaccctcggaacgacgtggaatggagcagaggacggagggatgacactgaatttcgtcggtgagaggcgtactccggcggtgaacagtga

SEQ ID NO: 55306 - DNA, 226 bp, Zea mays
  Clone ID: MRT4577_150435C.1
ggttcatgtcttgctcttccatctgttgtggctttttgccaaagagtggagctgttgaatgacgacttggatgcattgttcaatcgctacacttctttagcttctgagctcctgaacctcaataaatctgggattatctttcagaatttgttaatggcaatctgtattggtgctggatcttttctctcttctatattgaatgatggcgtgcatgcctatggaatta

SEQ ID NO: 55307 - DNA, 352 bp, Zea mays
  unsure (1)..(352): unsure at all n locations
  Clone ID: MRT4577_150436C.1
ccttatttcccccttcacagccccgcactactatcccccgctaccgctagccgccgcgctgctcatctggtggnggctcgcctccctcaccccatccgccgacgccgactcctcctctagctncctacttaccccnagcttaaagctcgtgctacctgcctacctatccgtaggaagagagagagagaggngagaaggtccgctcggtcggtcgggggctctcggatccccncgctgcccccccgttttttcgccggaatctcgcncgctttgcgccatggccgnngtcgcgccgccaccgcnccccgcgcccgccgtcccnncaccgcaaccgtcaccggctgctgccccg

SEQ ID NO: 55308 - DNA, 1531 bp, Zea mays
  Clone ID: MRT4577_150437C.1
ttttttttttttttttaaacacaactcattagctaattggttaaatgctaaattcatctctcgttttataaattgtactacatctttataagtgattaaaatatttcatcaacacacatgcctactaagattctactcggtacactaattcaactaattgaccggaatagtgaaataactcgttataactgaacctggctcaataatcgcaagaactgcgaagtcgacgagagtttcgtgacttacgcaatttattgagcaccttaatgagcctcgcactagcacattaatttattcaacgatcgaactattttgaataatttatcagcttaccgtttccacagctaacacgaatctccgagatcggtagcgattttccgattcaggcaattttgtcgagcgcttggggaatatcgtgttgttagcttcgtcttcacccgactcttggaatttcttgctgacgcgtggaacgatgacgacacagggggtgacgtatatagagctgcacccgcgacgcgacgtcgaacgacgctaaccggcggaatcaacgacgcgattgggaattaaagccgagcgagccgagagggcacgctggcgagcaggaaacaggacgcgcggcgaaattccgggtgcgacgcggggacgacggtgttgtgttgaataggaaaccaatgaccggcaaaaaaaaaagcacgacgccggacatagcgaaacgacggcgatgcactggagcttcaaccctttgttagatatttcgtcgagaagcctccaacagcagcaacaaagcttttgtgcacgccgttgctgtccaaacgaaggacggtgcttccgatcctagcaacgtacagcccggcgagcggaggaaagcgcacagggcacggcggccagggactcggcaacgcagcaactgcgagctagagcagaggctgaccagccaaagcatcatcggcaagctcaactcgacgcgctaggaacgaaaggagcagagaggtgctggacagttcggcgcggcgagctgagcagggagatgaacgccgcgaaggaactccgcgagcagagcgcggcgctggagcacacgcggccctggcgagctgggcaccggagctggagagctgagcaccgcggagcgcgcaggggcgctggctgagcgcgcagggaggaagacacaccagggagctacgcaggtctggcggaatccgaacagggagggagaggatttgggcgcggccatggctggggagggaaatcgagctggggagctgccatgggaggagcagggacgcgccatgagctggagcagggcgcagctgccgggcgctgggacaagacaaggaacgcgcgcgccaggagatatacgacggatgagaaatatcagatggagggcggcggctggagatttttcagaggaatgactagtggagaggaatcatatggaagctagaagatgacgtgatagagcctccaggatgttgtgcatttcagggatatgaacagctgggcatgtgcaccgagaaatatcccaaggagccgt

SEQ ID NO: 55309 - DNA, 567 bp, Zea mays
  unsure (1)..(567): unsure at all n locations
  Clone ID: MRT4577_150438C.1
gggtacctcgaggccggccggggtggtattggcttgtaatacaggacgtagtaagtgcancacactttctgtaaaaaaaaaaaaaaaaaaaaaaaaaaaaaaaaaaaaaaaaaaaaaaaaaaaaaaaaaaaaaaaaaaaaaaaaaaaaaaaaaaaaaaaaaaaaaaaaaaaaaaaaaaaaaaaaatttggccccggaaaccggggccaaaaaagggttcccccccctgggatccggaggggggccccccaaaaaaagggaccgggggggtccccggaaaatttttttcggggaaaattcccggaaattgccattaaaaaaaccctcccggtggaccgtttttggtttaaggggttcccccagggggggaaaagggccttgctttttaaaggggggaagggggccgggtttcattaacccgggggggaacccttgacccggggcctgggcggggggtttccggggggccccttggggtttggggggggttcgggggccatgaaccctttggtgaacttgggggaatttggggttttctttttccgcggtnttgggggggggccccggg

SEQ ID NO: 55310 - DNA, 551 bp, Zea mays
  unsure (1)..(551): unsure at all n locations
  Clone ID: MRT4577_150439C.1
ctgggattacagacatgagccaccgtgcccggcccacttttaatacattaaaggggtctgtgataaacatcctcctaccgcccaaaaaaggttaaggaccactgcaatatgggctgtttgctttagatttcattttagatagatgttgataactgtcagagctgttcttttttggccttcgtttgtattctaaggagagtccaggcctctccttagaaccccagatctggagatcaagctggctaccgtgcctttcttaatcagcatccctcatacatctcattctgaaatagaaaactaaatctatcttctcccctaaacctgttccgttcttcctatgtctcctacttcagtgcacaacctcaaaaacgaccctattgtataaatcagaaacctaacagtcatcctaaacctgtctccccatcccctctctgcttccttctcgctaatatctccacattcaatggatgttttaaaaatataaactcaagattttattgtcttcataataaaagaaaacatgacactttnnaaaaaaaaaaaaaaanaaa

SEQ ID NO: 55311 - DNA, 498 bp, Zea mays
  Clone ID: MRT4577_15043C.1
ggggaagggcccttttttttttttaaaaattttttttccacttaatggttttttttttttttttttttttccaaaattccaaaacgaaaagaaaaaaaaagttccttactcaaaattttgggttcacaggaaggcatttttgctttggggggggacacaaacaggagtccctttgatcgcccgacaactttcttggggggggggggggcagggaaaaaacaacaaaccctggaatggcaatcggggtaattagttatttagccagcatttttagtcgagcttccccccgtaaaggtacaagcaaaaccccggggggggggggggcccccccgccccgccgtggagaatccccgcgggggccaacccgttgaacaaaacaatggggcggaaaataaaaagcgccggcctggggccggccctaaaaaaccattcgggcccgtcccaaaacacctccaccttggcccggttgaagggcaacgcacgggttgcccctgaact

SEQ ID NO: 55312 - DNA, 272 bp, Zea mays
  Clone ID: MRT4577_150440C.1
cacaagacaggttcatgctcttgcagagaagatagggctcctatctgactctcatgtcatcaatgggcttattgattcatactggaagtgtggtcagctagattatgcgattaaggttttcaaagaaagccgttctgatgacattatatcttctacaaccatgatgacagctctctcacagatatgacatagtgaggatgcaataaactgtttgtgcagatgttaagaaaaggcctgaacctgattctttggtactaagtaggctcctaaat

SEQ ID NO: 55313 - DNA, 624 bp, Zea mays
  Clone ID: MRT4577_150441C.1
aattcggcacgaggctgcaatgaagaaaccaggtgcttcctcaagctaggatgctcttctctcttgagaagcaaagggaactttcatacaaaagtttgtgtgttatgccattgaaattattggaacgtgttttgccgtggttggtgtcgaagctgagtgatgttcaggcaacttcatttcttcagaatatatctcttggcagcatcaccatctgaaactgcactggtcactcttatctctggttgggcatgcaaaggccgggataaatccaaagatggagaatatttatgcttaacatcaggtgcggcgagatgtctatcagatgatgtagatgatctgggaaaatgccgatcattctgtccatgtgcttcacccaacagctcagatctttctctgcagctacatactgagaatgattctaggccaggcaagcgaggaaaagatgcagtatctttttctcatactaatggaatctactgctctcaaactgctgacattgaagcaattccatgtagcaaaaaaccatgttgtattcctggtttgagagtagagagtagcaatcttggtattggttccttggcttctgcaaagacttttcactctttatcatacaattcaactgct

SEQ ID NO: 55314 - DNA, 228 bp, Zea mays
  Clone ID: MRT4577_150442C.1
tacgtaagctcggaattcggctcgaggtaaattcgagctgcatttgtattaatcaagacttaacaggcgatctggagaccgttgtgtacgtactcggcgaaccggcgaatgtggggggtgctgctactgaccttgtgatggcttaggagtcgtcaaaccctcctgaacactacatgtacagcccacatgcgataaaacgttgctcatacgaaaaatatactgaagaag

SEQ ID NO: 55315 - DNA, 387 bp, Zea mays
  Clone ID: MRT4577_150443C.1
ggagaccactcgcgactgctgtgctgagctggcgcaaggttgggccctaggtgctgcacgcgtgaacctggacctctggtcaagcttaaatagaagtgctacatcaacgttgctgttatgggtcatgtctactctcgcggggctatgaccattggcaagttgagctacatgcaatctggcattgacacgcgcgcgagtgtcagtatcaacagggaagcctctgtaatcatcacaaagttctctgatcaccactaagtgcttagacaagctcaacgatgatctctatacagggatcaccgttcatattggattgtcgaagtgatagactaccgagcactaatggactgctattgactcaacagaacatctggattacgaccataacat

SEQ ID NO: 55316 - DNA, 774 bp, Zea mays
  Clone ID: MRT4577_150444C.1
ccggccgggttccatgacagtgaaccttgatacattgtacatacagagcggcagctttcttaacgaaaaacgacaataatcgaacttcataaccttaggtccaattcatcatggcgaacgccgctgaaaaagtcccagtttacaacttggcggacctcaagaacacgtccaacgatgctattcccaactacctcaactctctcaaattcgaacagtcgcatacactgactgatgtccggctcgccctcggcttcagcgcatttggtatcgcagccgcctgtttcgcttgggattacaagctaggccatgacacgacaaaacactacacggctgccgccgttgtgctctacaccctaatcaacactgtgatgacactatggatcatgttcaaggagaaggacactatttgcgagggaacttcgccctctggagagaagatctccatcgctagctccaccaagaagaacgtccctatctataacctcaccattacagtcaccgacaagaactccaagtccaatgtctacaaggtttctaagcctttcagcgagtggtttgaccagaccggccagtttgttgctgttccgttccaagcaatgctcgccaatgcggtacccgtgataggaaagagggatcccaggcgcgttactgtttccaaggagctgttggatgctagccctgatgttctcgatgccatcctggcggctaatgccactggtgctgaagctgagaccgctgatgcggcaggcaagaaaggcaagcgacgcaatgctt

SEQ ID NO: 55317 - DNA, 288 bp, Zea mays
  Clone ID: MRT4577_150445C.1
atgcaggtggcgtgcaaccgcaccatggttctgcaccctttcggcttcatcgcattcggtggggaccgggaaaggggatatttcgaaagggatccttctccgcgaaggaagcaggccccgagccctcctactgatcaggggttcgaaggctggcccttcggaagggttcgacagccgccccagagcactcgggcttcaggctcattactgatcagaggttcgaaggctagcccctcggaagggttcgacagccgcctcagagcactcgggctccacgcccactactga

SEQ ID NO: 55318 - DNA, 372 bp, Zea mays
  Clone ID: MRT4577_150446C.1
ggagggaaacccccaggttagttaatccccaacatcacacgctggtgttggtcctaaccaattaatttcacgtccccgagatgagaggcgcccttgttttacgggtttacatgctacactgaaacacctgggaaaacggtctcgcatttccttttgggaatttttaacctttttaactaacgggccatggtgttaccacgtcccccagttaaaccgggggtttttcccacccgaacgccttgttcttgtgggcggggccgccctccagccttagttccaccagaattagtttgggggacacctccgacatttcctttgacatggccacgaggcccggaaggacccccaggggaaggggcttggccccttttt

SEQ ID NO: 55319 - DNA, 272 bp, Zea mays
  Clone ID: MRT4577_150447C.1
ctggctccgatacgccttcccacactcgaaactggtcgagtgtacacccactcgtatactcttctggttctacattcagtggggggtcaaaaagatgggcaaactgcacctggcaatacgattttcctaaacatctatggtaaacatagttgacctagtttgtaggccagtaggtccaaaaatgcactaagcgcgcccaatacttaggcttaaagatgatatgcggcgccatcaagctgtatataatgtaggtgctagacttaaccagatgg

SEQ ID NO: 55320 - DNA, 253 bp, Zea mays
  Clone ID: MRT4577_150448C.1
aaaaccaaaccatcctgcatttatttttaaagccccgaatttttaaaacctacaaacagttggccacttggtattggtataaaaaaggtaaaaaaaaaaacttccaaccaacttcttttaccattgggcgggcccaaaataaacccacaaactagggggccaaaaacaaaaggggcaagtttattttttctttacccaactgaaaaccctacaaaacaaatacccaaaaaactttaaatgatttataaaatgt

SEQ ID NO: 55321 - DNA, 1809 bp, Zea mays
  Clone ID: MRT4577_150449C.1
ctctgccccgggccacgagccacgaccttgaagccgcccgcgtcgtccaccgccacctcctacctcctcctggccccgctcgcgatcctcctgctcgtcttcgtgctaccgtcgctccgcccttggtcccgcgtcggctccgactccgacggcctcggcgtcctctgcgcccgccgcgctggcggcttcgtcgacgtcgccgccgacgccgacgccgcgccgccaccggccgagacgacacgggcggcggagctcagcctgctggtgggcgtgctgaccgtgccgggccggcgggagcggcgcgacatcgtgcgcacggcgtacgcgctgcagccggccgcggagggcgcgcgcgtggacgtgcgcttcgtgttctgccgcgtgacggaccccgtggacgcggcgctgctggcggtggaggcgaggcggcacggggacgtcctggtgctggacggctgcgccgagaacatgaacgacggcaagacgtacgcgtacctgtcgtcggtgccgcgcctcttcgcggcggaccaggtaagcagcagcaggaaccctagcaccgccgcatccgcagccatgggtatcgacctcgttgccggtgggaggaacaagaagaccaagcgcacagcgccgaagtccgacgatgtttatctcaagctccttgtcaaggtacgcctcgtgtagtgtttttctgacttcccgagcgaggcggcgatgttggcttctgtagatcttctcgtggtcgcgttgtttggatctgaaaattctttgtgattcgtagtcttgtactgctacaataacaatagcattattttcgcgaggatttgcttgttgccctgatgtagtaatcctgtaagcttcactagcctgacgagattttctaataagaaaggattacttttctatgcatttgtttcatagatagatagatgaacaatacttgttttggtggtatctgcttaccctttatcaaaagtgtcatgtcgattttgattggtgtgtcatgattttgatgtgctatgctgggttgtagctctaccgtttcttggtcaggaggaccaagagcaacttcaatgctgtcattctcaagaggctcttcatgagcaaaaccaatcgcccaccaatctccatgcgccgccttgtcaagttcatggaaggaaaggagaagaacattgctgtgattgttggcacagtcacagatgacaagaggatccaagaggttccagcaatgaaggttactgccctgaggttcaccgagacggcaagggccaggattgtcaatgctggtggggagtgcctcacatttgaccagcttgctctccgtgctccacttggcgagaacacagtcctcttgaggggccccaagaatgcccgtgaggcggtgaggcacttcggcaaggctcctggagtgccgcacagccacaccaagccatatgtgcgctccaagggaaggaagttcgagaaggctcgtggcaggaggaacagccgtgggttcaaggtttaagaaagttgtgggccatcagcatagtaatcacttcctaccgagtagtagcacattttgttgccttggcttgtctactgaaggattttcgtgccttgtctactggttactggttgagcaagaagacaatgttcttttgcacctcttttttattggtcggcatattttgcgctgtgattggaactgtgttgtgttatctgctggatgtacttactgcatcacctagaaaggtggcttgggccatttggaatcataaaacgaaagttgctcgcttcaagctagaataaaaaaaaaaaaaaaaaaaaatataa

SEQ ID NO: 55322 - DNA, 440 bp, Zea mays
  Clone ID: MRT4577_15044C.1
cctggacccagcaaaaccggtgaaacttgcctggaacttgaagaaagatgttcacttgcatgattaaattgcaaatcagaggtacccatggccacaatgtaaattcgaaaggttttttcatcataataaaaaattgcaataattcagtgatcaatgggtaatggagcagaactctcaacttcatgattggctgttcgcttcgattaaagccaactggactgctgcagctacaatccatagagataaaacactgtagaagcaatagaagccggtacggattaaagccaagtgaacaggctaagacctctctctttctctgaaaatgtactaccaagaaccctccttatctacttacaatgacacctttcctttcttcacctgcccgtgacgcggagctgcctttgcccttccgccgctgcctagatgtttcatttcatctt

SEQ ID NO: 55323 - DNA, 788 bp, Zea mays
  Clone ID: MRT4577_150450C.1
gaaaaggacaattcggcacgaggctcgctcctctggccttccctccagctcgttccgacgtccccctccgccttcggccgtggccatggccgccgccgccgccgccgccactttcggcttcctccaccctctaatccggaaacctttagttccaccactgtacatcctcccgcttcccacccaaccccacgccaaaacgcaccctcgctctctccccctcctcttcctcctcccgcgccgccgccggggaggccccatcgctgccttacccaacaccacatcttcgtccacgaatgcctctgcctcgcccacctacgacgtccgggaggcagaggccgccgtcgcggatctcctccgcgagggcggcgcctccgcggacgacgccgccgccatcgccgcgcgcgcgccggcctacgccgctatgctcgccgatggcgtccgcgagctggacgagcttggcctctgggcgtcgtggagctccggtgccagtgctcggctgggcctcagcggtgtcgtcgagatggagatggggaggctcggttttaggaggaaggtgtatctcatgggacggagcaggcctgaccacgggcgtggtgccgctcctcgagagcttgggagtgcgtctctcctcggccaagctcatcgcgccttacgtcgcggctgcgggccttactgtgctgattgatagggttaagtttttgaaggaaatgttattttcaagcagtgattatgcaatactaattggaaggatgctaagcgcatgatgacatacttatcaatacctgcag

SEQ ID NO: 55324 - DNA, 368 bp, Zea mays
  Clone ID: MRT4577_150451C.1
aactaattattgttttattttattttttttttgaaaaaagtcctttcttattttgggaaggcctcaaccacagaacaacaaatttttttcttgctctacaccttttgaaaaaatctaaaggagggccccacctttgatgggtcttagtaaaaccgctcctgggcttttcaaaacaagcaggatcaaaggcaacagttgcagcatttgcaaaagggcaccagcattaggcgccacctcctgggaaaactaacacctctgtggtttcatgaaaaaggtaacggggctcacaccacctagctgactaaaagcagctacctgctgctgctggaaataatcaagagagttctttgctgcccacaggttcaatg

SEQ ID NO: 55325 - DNA, 596 bp, Zea mays
  unsure (1)..(596): unsure at all n locations
  Clone ID: MRT4577_150452C.1
cggacgcgtgggagccgatcctcgacggcaaacagtgtgaatcttgtaatctccaaacccaagcccggcggcagatccgcgcggcaggcggacggggccgctcgaccgccttcgtgccgtgcgcgcctccccacctcttccgttctccgctccccgcgcccgcgaaggcgaattgctgaattgagggtggtggctcgtgcttgattttgattttgggggtcggtttcagttccaattcatgacggtgcggccggggtgggtggtgagggtggcgcatgggctcggcggcggcgtggcagcgcgtggcgtgcaacccggagacgctcccgcctgaccgcgtcctcgcgctcatctgctgcgcgccactccacctcctcgcgcgcctcgccgccttcctctgcgtccccttcctccccgggcccacacgcaccccgctccgcctccaccgccgccgtttcctcgtcctccgccccccggagcttgcgccgcaccctttcgcttactccccctcgtcttcctcttcttcgtcngntgaggaagagaacgacgacgatggggacggcatccacgaacacctcgattgaagtttgtaggtc

SEQ ID NO: 55326 - DNA, 163 bp, Zea mays
  Clone ID: MRT4577_150453C.1
attacactgaattcgaacgcaaaaaaaacattggcttaactataggcgcttggttgttttgttctatgaccacacaaaagcatcagtacatggcatattcctactatctaaagcacaccaacggaaccttattattgacccggacattgacacccccgcccac

SEQ ID NO: 55327 - DNA, 461 bp, Zea mays
  Clone ID: MRT4577_150454C.1
aggacgcgtgggcggaaccggacgcgggaaaggggcgcgcgcgcggggacgccaggaggaggaacttcggcgtcgagatggatcaggcgccggccaatgcgggccggaacgggaacggagcgctcgcggacgcggagtcgaggaaaaagtccgaggaggcggagggggacgcgaagcggaaggcggaggagcccgaggcgaggaggaaaaaggaggaggaggagagggacgccgagctggctgcgtactaccaggaacagtgggcgaacgaggatgagggagctgccgacgctgccgcggccgagacggccccgctgtatgaggcgtcgggactacggtgcggtgtaaccgataaccccgggtggggtgagttcgctgctctcaaccttgttttgcttcatattccttattccattcagatgtactaacataatgccgaactgcaacctgcattttgggcc

SEQ ID NO: 55328 - DNA, 219 bp, Zea mays
  Clone ID: MRT4577_150455C.1
cacgactgtgcctagcatgcgtccgcctttttttctggacgccctctggccactcacgcacgagttctttccggcgcgcgtcgtacaatttacacttttttactcttcgctttacactgttgctgcggtggccttctttctcaaggctaacgtgttctggtttctgttttgaccatttctactgtctcgacccactgtatgagcgctccatggtttttt

SEQ ID NO: 55329 - DNA, 444 bp, Zea mays
  unsure (1)..(444): unsure at all n locations
  Clone ID: MRT4577_150456C.1
tcgagcgaccgcccgggcaggttttttttttttttttttttttttttattttttttttttttttttttttttttttttttttttttttttttttttttttttttttttttttttattttttncttttttatttaaaggggggggggggggaattttttttattgaatactattttgttgggtaacactacgttttttatgggctttttttatctaaaccccccgggtaggggggtaaccaatgtttttttttcatttttaaagggcttcgaccggtttttttgtagggggggaaggtcccaatttttattaaaatggcggggggtcggccctccttttggggggtctttttttctttttacggaacagggtggccttttattgggttttttttggcaaccctgtgaccgtaaaaaccctggtttaacacaaaaaagtccctttg

SEQ ID NO: 55330 - DNA, 394 bp, Zea mays
  Clone ID: MRT4577_150457C.1
aactgcgcgttggggtgttcgcaaccatggatttgtacaggatcacaattttggaacggcatacagaacagaccggggaaacaaaacaaaccggcaaaatcggccattgacacgctcggtcaagaaccaccactacaaggggggctaggtcggttcgggggttctcctggcggaacagatccttcttccaccacttcaccaaagacggcgccgaacagatgtgaccttcacatttggtggcgctcctaacatggtatcaggggcgattaccaggacctggatgtgtcccttggtgtggccaaccaagggaacaccaccggtcgggatctcagggagccagatcctctctactttggctaccattccttggtacgggggcaatgattcgaaaact

SEQ ID NO: 55331 - DNA, 286 bp, Zea mays
  Clone ID: MRT4577_150458C.1
catgacggccgagctttacggcatgttctttgtcgccgaagatgtatttggcggggagaattcaggtcgtcctttggagttgacgtgttatcgccgcaacctgtggcagtgctctggacagattactttgccgaggaccttgaacaatgtcatggacgatcaaggccagcacatcgccatcacagaactgtctgcatccattacaggcatagaatcgattgaaggaaaacccgccgaaatcatttcgattccatggaaaggcgcaaaccctcaactggaggagacg

SEQ ID NO: 55332 - DNA, 371 bp, Zea mays
  unsure (1)..(371): unsure at all n locations
  Clone ID: MRT4577_150459C.1
aaatataaatttacataacagggccatgacttgggccaagcagtttttttgatccactgggaaacattacaagaacatttgtcccccttccattccaaattacaaggggttttgggtttcctaaatacaatgcttttactttgtatttctaaatataggaaagcttgggtttttaaaaaagccaaaatgttttatgagttcgaatggggtccattccaattaaaatcaagcccatttggcaagacagattttaggaaccggcaaaactcaatcttttttgaatggtaaaaattttaaataatttccaccctaacgggttaatgaaaatgaataccaaatgttgccaagggactagcacttntttccacttc

SEQ ID NO: 55333 - DNA, 196 bp, Zea mays
  Clone ID: MRT4577_15045C.1
gttctagatcgcgagcggcggccctttttttttttttttttcctgaaagaaacgattatatatgtctttcatcatatataatgaatggtcctcgattgaatggccaacaagcaaaccaatccaatggacctcggaataattactaccatggcatggaaaactattaacaacaaaatggttgaacctgaccattcca

SEQ ID NO: 55334 - DNA, 318 bp, Zea mays
  Clone ID: MRT4577_150460C.1
cgaacgcgagtggagacaatggagagcagcctagaagaaaagaaactaccgttgatgtgagctgaccctgctgacggacaatgggcagagacgtgctataataagatagaccaggccgtagcgaacctatggcgccgagtcagaagaactggagaccatcctaatgctgcgtaattcatcggctgtgtcaggagatacgccgccgtgcccggcggtatactgggtgtaaccctgaagtgtcataattcaatgtctagaacaagaactcgagtatgaggctcaaggaggctgttgatgtgagttcatgcgaggcatagg

SEQ ID NO: 55335 - DNA, 575 bp, Zea mays
  Clone ID: MRT4577_150461C.1
aattcggcacgaggattggcagtaaatgtgcttgaccagttttcgtataaattgtggtttccttgtttgagtaagcttctaaaaaacatcagggtgcatgagaagcaagatctgcatcttatgctacatttggcaatgaggcttattctatttaagttgcaagatacagaacttaattttgaacttgaatctatggaagctgctttccctattcagggttctcttggggcacttatggaggaagttatcttgtgtggtgtgtatgccagagataaaaaaagagatatttgtactgacattactaaagaagtcagagattttgcaaatacaatactcaaaactattacaggctggatgcgtgcttcgacatacttgatgggaattactctgctgttggatcattcagataatcatgtgaaaagaaagacacttcggattttgtctgaaacggccagaggaaacagtttggttcagaagaatcaaaggaaagcacgaaaactgaagcatatatctggtactactattaaagtagacaagagctctggtccttatttcagcaaattgtgcttaaagat

SEQ ID NO: 55336 - DNA, 1655 bp, Zea mays
  Clone ID: MRT4577_150462C.1
cattgggtacctcgaggccggccggataggataggtgctggcgccttgcgtctcagcatccgcttctgtcacttccttttctaaaagaaaaaaatacagtcgcatctcgcctccagcagggtgagttcgcctcggcagggtgtggcataccatggagagctcgtcgccgtcagtgccgttcccgctgctgcaggcgccggtcgagagcacctaccgcgcctgcaccatcccctaccgtttcccctccgacaacccgcgcaaggccacccctgtcgagatccaatggattgacctctttctcaactctgtcccgtccttcaaacagcgggcggagaacgaccccaccgtacccgatgcgcccgcgaaagcggagaagttcgcgcagaggtacacgtcaatgcttgaagagttgaagaagaatccggagagccatggaggaccaccagattgcatacttctttgtaggcttcgtgagctagtactcagagagctgggatttagggatatcttcaagaaggtcaaggatgaggagaatgccaaggctatgtcactttttgagggagttattaagcggaatgacgaaattgaggatgacggcaaaagaattgagaacttggtccgtggaattttagctggaaacatttttgatctaggatctgcacagcttgcagaagtttttgctaaagatggcatgtcatttttggcaagttgccagaatcttgtatctcgaccatgggttattgatgaccttgatgcttttaagagtaaatggaccaagaaatcatgggaaaaggcagttatttttgttgataactctggtgctgatattatcttgggtatattaccatttgcgagggagttgctccgacgtggcacaaaggtgatacttgctgctaatgatatgccttcgatcaacgatgtcacgtatccagagcttgttgagattataaacaagctcaaggatgcagatggaaagctatcaaatgtggacgcatctggcctccttgttgccaactctggcaacgatctgcctgtaattgatttgtctagtgtatcaccagagcttgcctttatggcaaatgatgctgacctggtggtgctcgaaggcatgggaagagcaattgaaactaacctatatgcgcagatgaaatgtgactcgatcaagattggaatggttaagcatcctgaggtcgcccaatttttaggaggaagactttatgattgcgtcttcaagttcaatgaggcctgaactacgagatacatttgataacacaataccggccgcactagtggtggcttagttctccccaagatcagcttgttaggtgttgcactgaacataattttgttagtatcagcaataatttcaatcaaaataagctacgtatatgtggtggtttatggaagtgtcaggaagggtggttatgaggctgttggattttgtacgaaatctgatgcaccagttcccatttaacgcatcggtagccaagccacgcccgtctgaacttgagctcatgtccgtttgtgcttatggtccgtaataattggttagctaccactggcttgtaaacatcacacttagacgctctggtggcccctttgtgatggtattcataaaagtgtttgtcccgaaaaaaaaaaaaaaaaaagcggcc

SEQ ID NO: 55337 - DNA, 435 bp, Zea mays
  unsure (1)..(435): unsure at all n locations
  Clone ID: MRT4577_150463C.1
acgtggtcgcggccggaccagctaagccgattctgcagactggcggccgcnggcggtcgatcggggctcgttcccgcgcttggcgttgtcatggtcataggtggtccctggttttactgggtaatgtttttttttaccctggttattcccatcttagtggtgtgggggtttatccccttttcttcttctggcgttttttggagggggtgtgctttgctcgcctttctcagcctttgtgcatactgaactgtcaatgtatgcgcgctttaagcgcgctttntgtggtggttttgtgctggttacccgcttcgctggccatctttttatttgcgggttntttcccgttctttcctttttttttgnttcctttctcctgntttnccctggttgctctttttttgttgttaatctttggccccctttttnttttttttt

SEQ ID NO: 55338 - DNA, 506 bp, Zea mays
  unsure (1)..(506): unsure at all n locations
  Clone ID: MRT4577_150464C.1
gccctggtttttttttttttttttttttttttttttttttttttttttttttttttttttgtgggggttttttttttttttttttttttttttttttgttttttgttgttttttttttttttttgtaaaaaaggggggtttttttttttcacccggggggggttagccctttcctgggagggattccaattttcccttaatggggggcaatttaagggtggggagaataaggggtaaagcctggggtgggtaaaaagggatctcactcacatttatcgaaaaaatgctgccggggagtttaagtggaaaaacggggggggctaaaggggtaactaactccgttttttggggggagaggcggcccgcttttcgggcgggaaaacggtttttccttcccccataaagaagggcacaacccgcggggggggggggtttggcttttggggaccaggggggngcncccccccccggggggccgggcaaccnaatttctccttaacgggggg

SEQ ID NO: 55339 - DNA, 203 bp, Zea mays
  Clone ID: MRT4577_150465C.1
gaaagagagatctccacaagccatgacgcgcacacacatcacatgcatcagctccggagtttcagattcatatacatgctaaacttgaagtttttgggttatacatatattgtccatttcttcatggagctttctggttgctgtggtgtgtggaatgttgcgaaaaaaaaaacgagttcaagctcgtcgacgtttcacgtggg

SEQ ID NO: 55340 - DNA, 525 bp, Zea mays
  Clone ID: MRT4577_150466C.1
aaaaaaaaacaaaaccggggggcaaaaaaccggaaccttcctaaaaccaaaatttggcagttaaccggtttccttcctggggcgaaaaattaaaccaattttcctttataaattcggccaaacctttttggccctaaaaaaaccctttgggaccaaagcgggaaaccgggggggggaacccctttttttcccacatccacccggttttttcccaacatttaattaaattctaatcaccccccccagaggttaaaaagggcccaacatagggcagcgggaccatattagggcccggaaaaaaggttcccctgggttgaaaaaaaggcttcggctgccccttgggagggaccggccctgacctataagaagctttgttttgacccatgaaagcatgggagttccttttactgttgaacagccagtcttcatcaccaagatcggacccttatttttttataaataccggtttccaggaaacaaacagatctcggaccttcttattttttttctcagtttggcggattt

SEQ ID NO: 55341 - DNA, 260 bp, Zea mays
  Clone ID: MRT4577_150467C.1
agggttttggacatctatgggaccaccgactgaactaactcgcggagggactagctgcctatgcacaccagcacagacctagaatcaacactccttggtatcgatagacttagaggactaccatcagagataccaccaatataaaacataaaccaaggacgtaatcgagtactctcgctgaacagggtggaacccagccgatgcgtggaatcaacagacatacacaggggttctgaacaagaaaatgccaataactaaaa

SEQ ID NO: 55342 - DNA, 300 bp, Zea mays
  Clone ID: MRT4577_150468C.1
aacggaaaacggttctcattgcaaaacttggcgcgcaatcaaatttaaattagttttgcagttcagaccctttgccaaactttgtcggggtacataatggttacgtcccaaacccacccagataatgctcgcgtgccaaatcttttaccttaaattttttttttcatttccaggttttttatttcagctaacaatgcaaattcaggcgcctagcaaactgttggttccttgggttatttcagtggccttccaccaagacatgttagccttgcttttgtattagcctttgctaatggaggt

SEQ ID NO: 55343 - DNA, 660 bp, Zea mays
  Clone ID: MRT4577_150469C.1
atggacgaggtgggcgagctcaagctgggaagcaggggcgcggcacaggaacggggagatggacgccgagcaccatgggatcgagggagaggaggagctccggccaggcgccatggatgcgagttcgggacggtcggccgagctggcagagggaagggcggctggggaaagatggaggctgggcaggggcacggcgaccaggggagcaggagagaacagagcacaccatgggagagagagaactcggcgaactcgaagctgcgtgccggccatggaagaaatccgagcagggagggaaggatgggcgagcagagcagggcgcttgggggaaagaagacgtgttgggagccgggcgcggggagttcagggcgcggcaccagggaactccgagcaggggtgccgcggccatgggaggacgcgcgcggcagtgagagggcagagggagaagagcgcgcgctgggggaaaaatggagcgccgtgaaagctccatatcgagggagagagagtttcggctgccagcaggggagagaagctccacgacgagcagagaacgccggcctgagcagcggccagagaaaatggagcgtgagggagctgcgctgggaggataaatggaggaagggcaccggggagaagcggtggagactcggctggagataa

SEQ ID NO: 55344 - DNA, 2059 bp, Zea mays
  unsure (1)..(2059): unsure at all n locations
  Clone ID: MRT4577_15046C.1
aaaaaaaaaaaaaaaaaaaaaaaaaaaaaaaatcttcttcttgcagccgaagcaaagtgagggcgtaccgaaaggagtctagcaaacaaaccgcagcctgagcacccgaggagacaccgtgggaaagaaaccgcagcctgagcacccgaggagactccgtgcgaccgaagccagagccagcggaaccgaacggaagcgagacccccggcggctagcgagatggacggcggcgccggcgaggaggggaagcaggagcggcacctggtgctggcccacaagctcttccttctatcccacccctccgttgatgacctctccaaggtcgccctccgcgccgaagtcctcgacaccgtgaaatccgatgatatggcgacgctgtttgagtcgctggtcgccgcgggtgtgctggagggggacgccgcgctgctggccgagatgcgtgggaggattgacgaggagatccgcaagcttgatgagaaaattgctgatgcggaggagaacttgggtgagagcgaagtccgtgaagcacatcttgccaaatctttgtactttataagggtcggtgagaaggaaaaggccctggaacagcttaaagtcactgaaggaaaaactgtagctgttggccaaaagatggatcttgtgttccacactttgcagattggttttttctacatggattttgatctgatatcaaaatccatcgataaggcaaagaacttgtttgaggaaggaggcgattgggagaggaagaacaggttgaaagtatatgaaggcttgtactgcatggcaaccagaaacttcaagaaagctgccagcttatttttagactcgatttcgactttcacaacttatgagatattcccatatgatacgttcatcttctatacagtcctcacaagtgtcatcacattggatcgtgtatctctgaaacaaaaggtggtagatgcaccagaaatcctggctgtaattggcaaagtacctcacctctccgagtttctcaactccctgtacaactgccagtataagtcgttcttcgttgcattttctggtctgacagagcaaatcaagttagaccgttatcttcagcctcatttccgctactacatgagggaagtgcgcaccgtggtatactcacagttcttagagtcatacaagagtgtgacaatggaagcaatggccactgcgttcggtgtaactgttgatttcattgaccaggaactgtcacggttcattgcagctgggaagctgcactgcaagattgataaggttgctggtgttctggagactaaccgacctgatgagaggaatgctttctaccaggcgaccatcaagcaaggggacttcttgctgaaccgcatccagaagctttcacgggtcattgacctgtaaggactgtttgtgttggagctattcctgcaatcggcgcctgcaaatgtttcccaccctacgtcttccacaagacatctctgcttgagtggggattggggaacaagccctaagaacatctgtgttttaagtgcagaatatttgtgttttaatcagtaaacgctgtcctgtcatttcaagtttcctatctgtggctctgtctgtgattttcttccttaagttgttagcttgacaatctggtgcccttttgacctacatacataatgagctatgatacgcggcccgtaaaaagagttcagttgaaaaaaaaaaaaaaaaaaaagaaaaaagaaacccgctcacaaagcagtcctcccaccgcacgcaacgcagcctcgacctcgacctcgccgtcgccatggtgagcaagcagacccgccgcctcctcgtccttgccgccgtcgccgtatgcctccacctccccgccgcctctgtcgccaccgacgtcgattactgcagtaaaaaggagtacccggtgaaggtgagcggggtgcagatcgtgcccgatccggtcgagcccggcaagcccgccactttncagatctccgcttctactgantaaacatcgagaagggaagctggtgatcgacgtcagtactttcttctctacgtgcactcggagacgcgcgaaatc

SEQ ID NO: 55345 - DNA, 352 bp, Zea mays
  Clone ID: MRT4577_150470C.1
tcggtctgacagaggtactatacgatacgctacgatgctcggacaccgctgctatcacactcaggaggatcgcttcgtccccactgccagctccttgtgctagtgatactcaagacacccatatcatactgctcaacggacaattcgagacggtgcctaccatgctgaacaagatgctgatctgggtgatgcaatacgtgcctgcgaggacggtgcaggggcacgtcgtgaacctgtagggcctgacggagtcacggggcaagactatcccagtgccgatcggactgcacacgctgcgtctcatgagccgagcattggcgatgcagaacgtgacggtaccgacgggggcgct

SEQ ID NO: 55346 - DNA, 435 bp, Zea mays
  Clone ID: MRT4577_150471C.1
ccccacaggtcgcgagtccaggaggaaggagcggggcacggagcaccactcgaagggccactacaacgtgtggaactaccaccgtaataactaccgccctggctcccgcgtctgccacctctgcgcgaaccctaacgaggctgagcatgaagtactggctgatgtgctgcaggcagagcttccggggcatcgccaaggacattggctgcatcaaatgccactgaacaggccactgtactgctgtggataacttactacattacataaatgggacctttattagaaggcctaaatcatgcgctttagatctttggacacaacttgaaactcatgcgtgaaacacgacttgtggaagctttgatggctactttgcgcttgttggaccaactatgatctgttgattgtaattttctcactaaaaagaaaaaacgatct

SEQ ID NO: 55347 - DNA, 348 bp, Zea mays
  Clone ID: MRT4577_150472C.1
ctcgggccggccgggaggagcgcagcactgggctcattactggccacattgaccttcctttaagcatagattatatccgaacagtaggtgctgccaagcccttactttaaccatcggcaagagtaagatccctgtgcgcacgcacacgcatgtccaggcccagcggcgcctgctataaaaatctccacgtacaccgcccgggtccgtgtccctccctcgtcacatctggcggccgtcaccatggggtgttcggggtctccgctacccgacgccgcgtgcctgggcctggtttttctggccttgtcggtgggggggcgccaccaccacgggtgcgcggcggccaccctg

SEQ ID NO: 55348 - DNA, 399 bp, Zea mays
  Clone ID: MRT4577_150473C.1
atccctgcagtgctagagaaccacagctgcaccacaagctaagctaagcgccacagcttttctcccgacgaccatggctagaggaggaaatggtatcccgccggcttcgcaagatgctcaccacttcgctgctattccggaatggaaagaccgcggctggagcttcgcccaggaagatccacatcgcccatctgtgaggaggcatgtgcacgccgctggcaccacatgcgccagtaggggtcttcctgcacaggctcgacacaagaacgaggagaaaccggcgcatttcatccctggcatctccaactccaggcctagccatcaagctacggaggagcagtgggactccaagcctacctcatctgtggcaataatcctcatggaggcgttcagcaccaa

SEQ ID NO: 55349 - DNA, 273 bp, Zea mays
  Clone ID: MRT4577_150474C.1
aagtgtaacgggtgactcctcgcgtctttgaggagcgtgcgaccttaccggcggcgtccatgcccccaccctggccttggcccctagcttacaccatatgtgtctagcggcttctgctggtttgtcgggccacccggcttcttccccaaacttttgaccacttcattcccaaacatttgcattgtgacgtcggcgcccttaatgtcgcacaactgtcatttggcaccgtactgtgagacgacgaccccttcggcctttccgacttttcggctt

SEQ ID NO: 55350 - DNA, 167 bp, Zea mays
  Clone ID: MRT4577_150475C.1
aggaagggagcagcctgtctccggggagattagcgtggatgacatggatattttgctgtagtttattgatagcaaaaaaaaaacacatgggagtacggaaattagccgatgcaataaaaacctcttttaacgaacagtaccatcgccgatggcactgtttcggttgc

SEQ ID NO: 55351 - DNA, 163 bp, Zea mays
  Clone ID: MRT4577_150476C.1
agccatggcaatgtctgcagactcatggatcgagggatggatgctgatatcttcgaatcatgacggcttcattagtttctacaggctaggcatagtatcccagacagacgggctccgtactaattatgggctgcttggacgactctacgatgatctgaagaat

SEQ ID NO: 55352 - DNA, 168 bp, Zea mays
  Clone ID: MRT4577_150477C.1
gttcatgacaaaaattacgcgctttcaaggacagctatagatggtttctagttttgcagtgtattggcctattctatttgtgcatacgatagaatgcgcaggttttggaccgtaataaatttatagaagatgcataacacgccaaagttgtgggcgctcaggcctagg

SEQ ID NO: 55353 - DNA, 251 bp, Zea mays
  Clone ID: MRT4577_150478C.1
cccaaggtcgttcgcggcgaaggacgaggtgagctgcctgttccagggggtgctggacaacctggggcggctgatccagcaatacggtctgtccaagggcgccaacgaggtgctcctgatcattgaggcctacaaggcgctctggtcaccgggcgccgtacccggccagcctcatgctcgcgcaaatcgccgacgcctacgccttgtctgctcttctacacgtacaccaactcgctcctcgttgcgtcagg

SEQ ID NO: 55354 - DNA, 399 bp, Zea mays
  Clone ID: MRT4577_150479C.1
atcaggcagctctaccgagcatgatgctgtctctgttcacaactcttccgagcacgccgctgtctcctttgtcatcatcatcagctcagatctagcagcttcgccttctcagattctaaatgaaattcttggagatagagagcgtatccaatctctgtattctgagattcctgggagaaccacaagcaatgccagtacctccagaagaacttgtaatttcagtgtggacgcaactggagatgaaagcctttctgttgaagcacacaattgtaaactcgacaatactgcgtctattttatccatgaggagctgcgctgacaagctgtggaagagaagaaaaggttcaaaactttaaaatcagaagataaaccagaggaagcaatgcaagctttcaagtat

SEQ ID NO: 55355 - DNA, 585 bp, Zea mays
  Clone ID: MRT4577_15047C.1
gcagtccagctccaaggccggcggcaacggcgacgcgaagcacctggtttgcgtgaccggggcggggagtttcatcggctcgtgggtggtgaaggagctcctcctccgtggctaccgtgtccggggaaccgccagggatcccgctcaccgcaagaacgcgcacttgctcgcgctggatggcgccggggagaggctcacgctttgccgtgccgacgtcatgcacggcgacagcctccgcgccgcgttctggggctgccgcggcgtgttccacatcgcctccccggtctccaacgaccccgagcttgtgcctgaggccgtggaggggacgaggaacgtgatcaacgcggcggcggacgcgggcgtgcggcgcgtggtgttcacttcctcctacggtgccgtgcacatggaccccaaccggagccccgacaccgtcgtcacgactacgactactgcaaacaaaccggcaacctatactgctgcgccaaaatgatggcggaggtcgcggcgacggaggaggcggccaggagggggctggagctggcagttgtggtgccggcgacgacaatcggtcccgcgctgcagcag

SEQ ID NO: 55356 - DNA, 294 bp, Zea mays
  Clone ID: MRT4577_150480C.1
gtataccgaaagatttggcattcaataggagtgcattgaaaaaagctattcacgtgcctgaaccttggtttgtggcttatattgggtttcaactctagccgaccccatcttgtttgagactaaaaggctttgtttgtttttttgctatgcttgcgttaaaccttgtgtggtagcttttatttctgggagcctgtccttatggaaacatcgtaataggtgcatgtttcatggtgcatctccaagtttagctagagtttcattacctttttgagggcaactagagctttatatttc

SEQ ID NO: 55357 - DNA, 1077 bp, Zea mays
  Clone ID: MRT4577_150481C.1
ggccgctttttttttttttttttttagtttgaattggatagttatatagatcaaacgaccatttgaggggcaaaattcatgtggcagtttgttgtgatatacaaatattacaaaaaagatttagataaaaaatattacagaaaagacataaaagtctataacattgttttagaggacgcaaggaagcacaacataggacatgtgttttccaaattacacatttgtgccaatataaaatagcaaaacagtgcctgcatatgaccaacctatatctctaagcccatgcaagatcattcttttctttcttaattctttttcgcagttgaagtcctttttattctagcctcatcagaaccagccgtcgtcgaagtaccaacaacagaagagacattagacgcttgtgtagccattctactactactcttcagttgtaattccagcgttgcagcttgatttgcaagttctttaccatacttgaaagcctgcattgcttcctctggtttatcttctgattttaaagttttgaaccttttcttctcttccacagcttgtcagcgcagctcctcatggataaaatagacgcagtattgtcgagtttacaattgtgtgcttcaacagaaaggctttcatctccagttgcgtccacactgaaattagaagttcttctggaggtactggcattgcttgtggttctcccaggaatctcagaatacagagattggatacgctctctatctccaagaatttcatttagaatcttttttattggttgcaggctcacatgcaagaggggatatttttattaatctcctgttcacacatttcgtaacgacactatgaggtggaaaacatcttgagcaggtgcaagaagtgttggtcgtactcttatttgagctctgatttagaatcattttaacctatgtccctaacattttagttggtacgtctggattctattgccgtagatctctacctagcatgtcggagtgcgcggtgccccttgctctgtgctggtggcgccgccaaaggagacggcggcgtgctcggaagagttgtgaacagagacagcgtcactcg

SEQ ID NO: 55358 - DNA, 931 bp, Zea mays
  Clone ID: MRT4577_150482C.1
agcgttgcagcttgatttgcaagttctttaccatacttgaaagcctgcattgcttcctctggtttatcttctgattttaaagttttgaaccttttcttctcttccacagcttgtcagcgcagctcctcatggataaaatagacgcagtattgtcgagtttacaattgtgtgcttcaacagaaaggctttcatctccagttgcgtccacactgaaattagaagttcttctggaggtactggcattgcttgtggttctcccaggaatctcagaatacagagattggatacgctctctatctccaggaatttcatttagaatcttgtgtgagcacccaaaatggtcaaatgtgcttttcgacgtagatgaacaaataacacaatttgcttagatggtaatgttgtggtagtaggtagcatcgttctatatggatcagccaaggaacttgagttcatgcagacatagaaaggttccgttttggagatgtaatccatttgatatcctaggtgtggcaaccgctgaacaccagacctgagtaggtcagatagaggtgcgatgtatcctatgcagattttatgaagcgccacgtgaacatgaacatatgtccagtaaatagacacttttttattggttgcaggctcacatgcaagaggggatatttttattaatctcctgttcacacatttcgtaacgacactatgaggtggaaaacatcttgagcaggtgcaagaagtgttggtcgtactcttatttgagctctgatttagaatcattttaacctatgtccctaacattttagttggtacgtctggattctattgccgtagatctctgagaaggcgaagctgctagatctgagctgatgatgatgacaaaggagacggcggcgtgctcggaagagttggaacagagacagcgtcctcgtgccgaatt

SEQ ID NO: 55359 - DNA, 357 bp, Zea mays
  Clone ID: MRT4577_150483C.1
aggttacttgtttttacacaaaataacaaagccggttcaaagggcaaacaaaaacaacccccacacctagaagggacacctattaccgggacagcattcttctttaatataaaaaaatccaaaacgagccctacataaagcttccaaccgaaacagtgctataaatccatagggcgtccactgaatgaccggaagacccacccaacccctttatttattgacaaaaataatggcgaggcaaagcaaggaaccctaaacagaaacaggtattgggtgggaatatataagggtagtccaagggccattttccggatagacttggaagggaaaaaaagccccaaaatgtttaaagggctt

SEQ ID NO: 55360 - DNA, 619 bp, Zea mays
  unsure (1)..(619): unsure at all n locations
  Clone ID: MRT4577_150484C.1
cggccgggataaatctattgttgttctctcatccgaattctcatggcaggcgggtcagggaggagggcaggaagaccgaagaccgagccgtgcgggggctgggaacgggaacgggacgggaccccaaaatctcatatccttcctgcccgcccgcccgtgccggcccacgcgtggaacttgccgggcgcgcccgacctccgccctctcgctcctccagagggtatcggatacaccgcaagctgcacgatgccgctgagtgtcgtcgactacgactccctcagctggaagcccggcttcaacttctgcaactaaatcctcgtttgcatcaagggctacgagggcacctgtaatctcacttgtatagaccagagaggcacaccggagcatccgattactgcctgcacgcttgaaatcgacaactagggcatatgcatgggagttgcatatcgagtccagggtgggccacaaaaacagtaatagcaataaaccacgtggagataacagagtgtgaatactagcagaaaatatcgattgatttgctacgaggaatgatatcccttgaaaccaagtgagacgggaangcttagtgctcggattccactccagatgcaatagtcaa

SEQ ID NO: 55361 - DNA, 348 bp, Zea mays
  Clone ID: MRT4577_150485C.1
tacgagccttttttttttttttttttctaacagcaaacccataaaaacttaactgcaccacgaagaacacaaaaacacccgaccaccccgggacaccaaaagccaacactcaagacccccacaagaccaacaccgaagcaaagagcacccaccccaacaaaacacaaaaaatgacgcaacagataggccaggcctggacagacaacaaaacatcacagaaacaagcccgaaacatcagcccgacagagcccctgcacgaccacgggaacacaagacctgctcccgaacgcaacggctctaatgatcaccgggtggaagacggctagcacaccagcgccaaagaagggg

SEQ ID NO: 55362 - DNA, 423 bp, Zea mays
  unsure (1)..(423): unsure at all n locations
  Clone ID: MRT4577_150486C.1
cgagacaagccaggggggccaattagaaggggggccccacccccaaagcaccgggcgacgacgaacagaggacagctcaagaagggccaaaccctnggggcgcagacaggagctgtgccaccaccagaacgaccgaaaagctcgccagagaaccctcctccagaaggcccgcagccatctgggcgaaagtgcgtgccgtcagcaccaaggacaccacctacccccccattcgacatcgacgcgctgccgccaggagagaagaggaaggacggcatagcccaaacgaaacctggccaaactgcaccaccagttccttctatgggtcctaccagacaggatgctataccatatcgggagcccgcgaagacgagaaggggaagaactaacccccaggcaaccccgctgaaaaccgaatgaaaccag

SEQ ID NO: 55363 - DNA, 619 bp, Zea mays
  unsure (1)..(619): unsure at all n locations
  Clone ID: MRT4577_150487C.1
cgggacatgtcgactgcaaatgtgaatgccgaggacgccgacttgcaccattactcgaacttgatgatcgacgtcgtgctctattgggttggaaggatgcatgcatgcgacagtccgtgtattctgctcgtggcgagctatctcgtacgaggtcaacgtccaaggcatctttatccgtggtacactgtcgcattgcgatcgtgcaccaagatgattcgaccatttggcctcggcgaccgtccgacaaatcagggatagtagaacatctccgcggtccagagtggttggcgccaccgtttccacactttaacgttttcggcggggtagtatcggcgccacaaatgtaggtaacaggtgccgaagatctacaactggctcttcgattacctcaattgctcaatagcatagagacgggcttggtggtcagtcttgttatctttccactgggccgggaaaaagacctcgtgaaaccatcgatatcgcggtgagagtgttgtcggccagctgcagacaccccgcattgaattcattcgggacantcaactgtcaaaggccttcagcttccctagtcatacggacactgtcattcagactcggtatctncgtcgtcttgcgggat

SEQ ID NO: 55364 - DNA, 303 bp, Zea mays
  Clone ID: MRT4577_150488C.1
catctttagggctcctgtttctaccaatcctgccaccaccggaccaagtaccaaacagattgaatccgacatgacatgcattcatgtagtaatgacgccggtactcgagccctgacagcaacgacacgactgacgagcgcaagcggaagcgcatgctgtccaacagggagtacggcacgatggtcgtgcgcgcggaacatcaattgtgtaggtgctggaatcggaagtggaccgcctgcatgcggagaacgcgacgactcaggcccgtaccgaggcgctggagcgcgacctgaaccaggtgga

SEQ ID NO: 55365 - DNA, 1340 bp, Zea mays
  unsure (1)..(1340): unsure at all n locations
  Clone ID: MRT4577_150489C.1
atcacattcattcatcaatactatgatatgattagtgctttgcctatttttacttatttttgatatctgtacttattttttaaatctatacttcattcatattatggcaatgatgatgaaagataaggcttgtttctcaacattcgcagtagccgcctaagagctttcgccttgccaggctcgagagcttgtgctgttgaatccttccttggatgtctgagccaaaatttctcttattgtccagctcttcatcgttattgggtgttgttttttgatgtgatgatcctttccccaaattaccgactttgattatactgtgcgatttttcgagttccgtctcctcggagatgggatcttaagccagatgttctgatcgaaacaacaacactcagtttcctcttcaacacatcattccttccgcatgttcttgactttggatcttggaaaatttttttggtctctttgacgatggaaatgatgaccctttccccagctgatcgactacgattacactgtgcgcaattgcgatgccttctccgcggagaaaggatcccaagccagaattctgatccatcaatgtcttgtttctgcatcgtttcttgtaaaacatttgggcacactaaatcaaaaaataggacgctgtattcggaagcattgtccctgtaaacagtacacatcatatccacgtccatcgttattgggtgaagctttggactcgtccatgtgatctcttttgtcgattggttcagtaaatgatggcacacgnnnnnctactaaaccaatggacaatagagagctttacttgaacccttttgacatttaataagataacacgtggttatacctttaaaattgatttcttctatgactaaaagagtgctnnnnncttatnnnnnnnnnnnnnnnnnnnnnnnnnncccaatagagagcataattttaaatgtaattctggagtatatatacagcacggacgaaagtgctctaacctttgttccatcgatttaaattgcacgaaaagctcttttatccaaattattgtacaggcatccccactaatgcatcggatagtggcagcgctccctgtgtagcagatgtgcatccacgagaacgatgtaatagtaacgacggtgctcttataataaccatgctcttggtaatcgcaaaggaaggacattatcatgtgattccagatccttgcttgtatgtttctgagtacctggaacttttatgtgctgagtactgtggattagagcattgatgtcttttctatttaaagcaggagaacaatgttgatatttgtatcaaatatttatgtaatcaaataagcaatttgtcttggt

SEQ ID NO: 55366 - DNA, 374 bp, Zea mays
  Clone ID: MRT4577_15048C.1
attcttatatatggcacattcggtgaaacgcacccttacaaaaagtttttggcggttcagtgcaccgaacatgctctaaaactgagaaaacgtcaagagtgcggactccaaccgttgtttgatataccaagaacggagcccctatacctttattatggacgttgaaaccatcttgtcgcatcccatacaaaaatgacagctgtacacctgttcctgacactaatttacaccaatcacattttctattgtaagccttgacaagagacttccaatgtcccgcatgtgaggattcaccgttgtggacacccacactacacatgatcacactcatcattagcttggatggagggttgatcctgacactcttaaaacaa

SEQ ID NO: 55367 - DNA, 745 bp, Zea mays
  Clone ID: MRT4577_150490C.1
gaagaacaacccatgtgaatcagccagccccccaggggccgtgaacggaaatggagacaacgtttttgcaagcggcagcgatacagaaagttctacccccaatgaagatggccattccgatagccctattttttttgctttgagcccacttttttttgatccgttttcatccgccgatgatgaaagtgttcccccctttttcgagaactgaaggtaaatgataaaatactccgagtttatgcccgtgaataatatgaacaacgaaaaccccagccctcctattaatgtggttgatacctcccccaccagctacgcttgcattgcaaaaagcgtcggacgcaggctttcgatatggtgaacccgtttttaggctggcatctttatattgtagcttttggacatatctctttgaacggtcgccccccataagacaaactattacctctccgttttactgaaaactatgtggcttgtaatctgctagtgcttgctatgttcacttgcctcgaataaatgttatcctttagcgtgctaaaaaaaaaaaaaaaaaaaaaaaaaaaaaaaaaaaaaaaaaaaaaaaaaaaaaaaaaaaaaaaaaaaaaaaggacttaaatttaaaagaaaaaaaaaatggggtactctttataaaactttaatgttttttttaggcgtgcaaacaaaaaaaaaattgattggatgaaaaaccttcaactacctaaattaaaacactttgaaaaaaataaac

SEQ ID NO: 55368 - DNA, 227 bp, Zea mays
  Clone ID: MRT4577_150491C.1
gcagttcatgaggctgtctcatctgggaagatagaggtggtgaatatgctggttgagatcggaactgcaccatcagctgaacaggttagacaatttgcagctcttgtgtcagatggcgcagagaagcccagttatctccatagctttgaatgtgtttctaggacgtctgcaatggtctcaagatggaaacaatatgttactcgctcagagagattggctgttccaaa

SEQ ID NO: 55369 - DNA, 291 bp, Zea mays
  Clone ID: MRT4577_150492C.1
gcgagcgaacgcgcttctttttcgtatttaatgttttttggcattctcacacggtcacaacggggagaagaccgcggtatgaacctgcttctcctgaatattcggcgcaatacccatggaggccaacgtattgacgagggctctgtttctattatggacataaccggctccgcataggatgcgtataaactgtttacccgtagctattgtatgagaagtgaggacgccagaggccacgggggcgttggcgccaaataaaaggttgtcggggggggttccctggcccagggg

SEQ ID NO: 55370 - DNA, 567 bp, Zea mays
  Clone ID: MRT4577_150493C.1
gaggagaatctagccaacaaaacaggcttgcaggtctgggctaaatttaagcacggaaatttgttaacagattacttggggggatgtttgagagaagaggaagatccaggggggcggggagatttggcagagagctggtagcgccgtgacggctggaaacaaggggaagtttaggttattacatttaataccctttaccacaacacattcctaatatatatatactccagtctctgcttgggcattcgggggttcattttcctttgacgaacgccccttttcggcccatcatcagcttgcttttttggcccatcatccaactcagggttcaactgctcctgtgccacaaccggcaagacctgctttatcgaagggctgatgctgacattccccccttttttgaacgccgtttgtccccaagcggtccctgatgggaagcgatttttttgcgcttcggcgtcctcccaagttgcttgcgaagcatccatccctgaccagatcacttggaccatgtaccaactgcttagtgaaaggtgaattgggatatgctgaaacgatggccaattg

SEQ ID NO: 55371 - DNA, 371 bp, Zea mays
  Clone ID: MRT4577_150494C.1
atgcccctggcacgcgtgcgtaagctgggatcctctatagcggccgacctagactttgtacactcgtatactctacaaagactcaagcgagaggacgcatacacaacaagttatattgacttctccttatgagatgggactcatatcaggctacagtcaaacatcattatgcatgatatgaatcctatactatttgtttaacgatctgtagctcattagaaacgcggcgtcaactgcgcagacgatgtttgatagcttatacattaagagtgtcccatatatctgctctgataaacaaatgctgtacagcatgcgtggactgtcctaagaataacacaccaggcatatgacagactacactttttccctat

SEQ ID NO: 55372 - DNA, 651 bp, Zea mays
  unsure (1)..(651): unsure at all n locations
  Clone ID: MRT4577_150495C.1
gtacgcctgcaggtatcggtccggaattcccgggtcgacccacgcgtccggtcctctgagctacaataactacagtttgctcactaggctagctagctctggtgtagagatgcaagccctatatgaaatgtctcccactcaaagttttgctggggggtgggggttgagatgtataattgcaggagaaattctgactttactgttttctatctgatacatccatggtggggaaaagatatgaaactgtctcagtttgaaaagctcttctacttcaattggcaaacgcatggagttcgttactttctactttcttcttttttctcctttagtgagcaaattattccttgaacagaaagaggattttcccatttagaggaagcttctgtgtgaattgtcaggtcacacaaataatgccattatattgttgagtgtagggctttggtttttcaggggacacatagccaagcagtgatggtcaggaattatgtctcactctatcatttcttactcaagcagggttccagccagattctattgtgagctgaggttagtcggnggaccctgtgctctacttgaagtttcataatctttagttctatgaaatgcaataacatatattagccagcaatattcctgtggtcgccagcatct

SEQ ID NO: 55373 - DNA, 309 bp, Zea mays
  Clone ID: MRT4577_150496C.1
gcatcaaacaaaagaataatttaggctcaacatgatccaacattttacgactcccataagttgtgccaaaaaaaagaagtaaaccctggcctaattcacttacttttaatcaaaaggaaaagagagggagagacaagagggcactcctgtatttggttggcatttagagaagaaattttataccctcaaatttagggggtgacaccggcgaacataatatagctgtgggatgctgtataattctactgaggggcggtacaaatggctagcaacttatgggcacttcaaggacgagagaaaaattttttc

SEQ ID NO: 55374 - DNA, 421 bp, Zea mays
  Clone ID: MRT4577_150497C.1
aaaaggggaaaaacggttatttggcgaattctccaagacgccgggctgggcccacaaaacggaacaaatgggccccgacggcaagggcgacgggggggggccggttgaatcgcttcagcccctttaggggggcccgcaaccggaagcccaaacctttactcgttccttcagggggtttctgaaagcccaaggccaaacctttattcggcgggaactaggacggacgtccacctcttaacaaagcgacggggacaaggacactttggcaaggccccaaccaagtatactagcaaggacttactggactggactggggacacacccaccacaccaatggcggggaggctggggccccgccccaaaaaggggatggagcaccggggggagaagcccaaggggcccatgagcgacccgggctccc

SEQ ID NO: 55375 - DNA, 174 bp, Zea mays
  unsure (1)..(174): unsure at all n locations
  Clone ID: MRT4577_150498C.1
gccctgcatggagccaggcncgccgtggacgaaccgagcggggttactgccactgccacacatcggcgatgcagttccagcttcagtttgcagcagcgggccgacgcggcagccggtggaggagcgcttaagaggagcctcggcgagctggagaggtggcagcaccaccagcag

SEQ ID NO: 55376 - DNA, 335 bp, Zea mays
  Clone ID: MRT4577_150499C.1
ggggggaaacgggaaatggggttttcataaaccgggccaaaaataacatgggggggggggagattggcttggttttcttgaaaggaacaaaatgccccgagattgacggggaacaatcggggggggttatttggtcaggaccataaaattgataaggaaaacaaacagactgtgggccaattaaaatttgaaaaaaaaaaacaggttggcacaatgttgtttaagaaacagataattaagaggaagggggtttgccaattttgaactccaggtttggataaggggaagggggtttaggtaagtaacaccttttgaggggtggaaattaaaagatt

SEQ ID NO: 55377 - DNA, 396 bp, Zea mays
  Clone ID: MRT4577_15049C.1
agaaaataccacaacagggctcctggagctatagctattccagcaagagagaggggggcagatctatatctgtaccgggaggtcggcgcgatgatgccctacggcacggcgatgtaggcagatgcgtggctggagcgctccatgacctgggcagaggacctgtggatccggtactcagcagcgatgccggacctgtgtctgacgtggtacttctccctcgttcaccgtcgtctggacgcgttgcctccgctgccggccatgtctatccagaaggtcgcggctcgcaaccacatgacgatacattctgcagacctccactgtctggagacctagactgattccgcgtacaacaatgacaataggtacagaacactccttaccctgggcgacttgggc

SEQ ID NO: 55378 - DNA, 435 bp, Zea mays
  Clone ID: MRT4577_1504C.1
ggcacgcatggtaggacggttggagagacacgtagacagagaaacatcagtacatacacattacctttttaactggccaccaacaatggtgtctaggttgtccatcatgctcggcacatcagagctgactaagttttttgagaaagggtattggacaaccccggtaaccttccaggtaggaaaaggctccaagcctggccacctgatgataactcccaagattgacaccatgtccgaaacgtaaataaaggagaacggcggccatgactcctcgttcgagctgaaggaggggccagccggaacctggacgtttgacacaaaggacccactcaagtacctcctgtgtaaccgctgtgccatcaaatgtgcatgttaccctatctgctgtgatgtttttccttgaaattttaaggccaacagcaactacaagaccac

SEQ ID NO: 55379 - DNA, 445 bp, Zea mays
  Clone ID: MRT4577_150500C.1
atcagaaaaccacagctttgtggcgagcgtaacacttgatgatctgaaggctctatagagcaatctacatgctggttacaagcaaaatagagcgtgatactactgaaacatcacaagtgtatgtcggagggtatacactggtttcccgtcggcaaattgcccttgaaaaactatcagagatggcaataattggccaacatgagagaccatggctacttacgcagtgaagcgacaccactcaacacattttgataccgcactctagaacctgtgttacaacatatactatgggcatggggcactctggggcggtaattctctggggtgctgcccagattgccgctcgagatcataattgagggtctctttggtggaaagggtacctttacaaattgttttatagaagtgactttttattattatagtaaagaatgtgtggggatct

SEQ ID NO: 55380 - DNA, 252 bp, Zea mays
  unsure (1)..(252): unsure at all n locations
  Clone ID: MRT4577_150501C.1
ggtacaatcaaaactggggtgggtacacagggggggggcgcacantgaacattacaccataatttacccaactacaataccaaccttctggggcagaactacaggctacaccggaacctacacagcatccataggtataacacatcaatacgggaatacatagattagatcaaaagtgaatctattgtaaagggaccgactggggcagaatcagttttatggtgaaggagaccatactctttttggccacca

SEQ ID NO: 55381 - DNA, 407 bp, Zea mays
  Clone ID: MRT4577_150502C.1
gtatatatattttttttaatatatccattgttttttaatatgacaaaaccaaaaacccctaccgaggaggataccttccggacagggcagcacaaaacaggccccaaccgccagcggggggggccggccaagggacccaacggcaacgcagcccaaacaaccggacggacggaaaaaagagaaaagggccaacgccacaagcctgaacgctcgcggccgggggaaaaagggggcaagcactggggggaaggacgggggcgggaaagctgcaggggcagaaagcctctccggaggagcaaaacgcaaaggcgggggaaggaaaacgagggcccgaggaaacactaggggcggggaaacgggatccaaaaactaaaaccagggcttacgggaaagccttccaacggggg

SEQ ID NO: 55382 - DNA, 499 bp, Zea mays
  unsure (1)..(499): unsure at all n locations
  Clone ID: MRT4577_150503C.1
gcacgagccagatcaggcacccgccaccgcggctcgatgtgacgtgagaggagccaagcgtgcaaagggtcctggacacaagagcgacaggatcaccgcatcgtgtcgcatccaaccatgtcgtgctggtggctacgccgaggccgacgccagacaaatggggtcgtagcgtatcgttttgccatcctgtgcattggagtctatttaggctccatttagatgtagacattgagagtcatagaattaaaaggagcacgagtgctcatgagacggagaacggcagaatccaatcgcagaggagcatgtcatcgatcagcacggtggctcggtccagcgatcatcatgcgacgggaagtagcagcaaccccaatgagtttatgaatcaaggtgaattcatccattttgtttcctctttgccttgttgatccatcctattagtgtcatatactgncaaatgcttcaagtctcttactaattattggagctccatcatgcatgt

SEQ ID NO: 55383 - DNA, 355 bp, Zea mays
  Clone ID: MRT4577_150504C.1
gccacggccaccacagggagcagtcgagcaccctatagcaaccatatgccctccgcgccgtgctctggcccttcccccgacaccgccagaatcccgagacctgccggcgccgccaacaagaaaatggcgtgcctctgctcgccgacgagccacccggggtcgttccgctgcagtcggcaccgaaccgcgccggacggcgccgaggcggtgcccggcgccaccagggcgcggtccgtgcgcgcgctgctgctccagaggatcggcggcatccggcgcgagcccggccgccaccaccgccgccgcggtgtcggagtcggggacttccagccgcgcccctccaggctgcgcctcatga

SEQ ID NO: 55384 - DNA, 149 bp, Zea mays
  Clone ID: MRT4577_150505C.1
ggacgatggatgggacagagacaaaagatgattgctgtgagcatcatcgtggtcattagggcacgagcctacgttgacgatgatggcgatatcatttttagtaggcggtgcctggtgtgctactacgaagggcggcggacgctagaaca

SEQ ID NO: 55385 - DNA, 193 bp, Zea mays
  Clone ID: MRT4577_150506C.1
gtcgtgtgatcccagacaccgccgctagatgacgagctcggcgattctcaggtcccgtgagaatatgctgaagcagatctcatgagattagggacttcatcctcaccgcgaagaggaagtgatgcgcgctcagtgaagatctagaggagtaaggatgttgtccagttcaatgtgcgctgctccaaatacttgt

SEQ ID NO: 55386 - DNA, 298 bp, Zea mays
  Clone ID: MRT4577_150507C.1
gccttatgtctattttggggcttgcagaatccagcccccatttgtttagctcccactacagttacatgacagcacaccaggcgcggctacttaagaagtgtgcactctacagctaacacacgcaagcgtggaccgtcgtcacaagagcaagaacatcagagagagaagttagacaccggccccgtccgagatacccgatatgcttactaccgcgttgttgcagggtgcacgagatgtacattacaatgccggtgcggactccatcagttgtcttgcccttgagggtcgtccttgcgtt

SEQ ID NO: 55387 - DNA, 317 bp, Zea mays
  Clone ID: MRT4577_150508C.1
gacacatatggcacttcaaagcgaacgttcacagttcagagcaaattcactccaggacaggcttcagcatgtgctgcaatggctcatgcacatgcttagatccaaggctttcgcttgatcaatttgtcagaatagagaatccactccagttgatagccatggcttgtaaccaggggcgcccccaccagtggggccacgtgggccatggaccaccctaagcgatgcccaccaagaactaacgcagcccattagacgtgccacaatgcatggtgttgcgctcctttcatcattgtgctccactattcacggagagaacg

SEQ ID NO: 55388 - DNA, 381 bp, Zea mays
  Clone ID: MRT4577_150509C.1
tcggcatcttacatccgcggccatgacaactagcctgtataatatccggaagaagcgctggcacgtgttggccgtgcacggacaaattggcgagtaccgaaagcacccgcgaggtcaacttaactcctgtggcatgcaccaccaccgcatcctgtttgacaagtaccaaacaggctacttccgctcggtgggcatgcgctactttcacacgctatggaacaagttacactgcccgtagctcaacatggagaggctctggtctatggttcccgccgcacaaggcctcgtacgctgtctttacggaccacgccccgttcgtcgacttgactcacttcggttacttcaacgtgctcgggaaggggatgctgagctctagaccca

SEQ ID NO: 55389 - DNA, 287 bp, Zea mays
  Clone ID: MRT4577_15050C.1
cacttgaagagaagaggtctttttgttttttgcaccttaagagacggggtttgacaaaagacaaacaattatcctacaagattcaggggggggcgtacggaaaggccagaaaacattggaggggccttctgtaggggggcaaagcatttgggggtgcgaaatgtcagccaacaaattaaaaccatctgtcttaagtaatatatcaccttacgccgggcgttttacccttttttaatcccctgggcgagtcatgtgagacaaaagggtgcacatgggtttgctggggg

SEQ ID NO: 55390 - DNA, 385 bp, Zea mays
  Clone ID: MRT4577_150510C.1
atgcacgcctccgtaggctcggaattcggctcgagctagttctagatcgccagctttctctcgcgatctagaactaggttggcttctccgggccctcctgaacaggttcgggatcgtgaggatctccggggttcggtttagtgggtgggcggatacgagatggcgacgtaggatgttgagtaccgatgattccgctgcggcctcgcctggaccacggacgaccactccctccacaacgccttcagcacctacggtgaggtcctcgaggccaagatcatcctcgatcggtagacgcagaggtccctcggatttggctttgtcacctgtttccacggatgaggcgatgcggtacgccatcgtgggcattaacggcaaggagctggac

SEQ ID NO: 55391 - DNA, 679 bp, Zea mays
  Clone ID: MRT4577_150511C.1
actctacagctgccattgcaccgcttccaagtcctcccagcttgacagactccactagcacttttgctgccacggccgatcaaccatgaccttcgcaggtagcggctatggggagaggggctccaagagggcgcacttcgtgctggtaccgatgatggctcagggccataccatccccatgaccgacatggcacgcctactggcagagcatggcgcgcaggtcagcttcatcaccacggcggtcaacgccgctaggttggagggcttcgccgctgacgtgaaggcggcaggcctggcggttcagctcgtggagctccacttcccggcagcggagttcggcctaccggacgggtgcgagaacctcgacatgatccaatcaaagaatttgttcttgaacttcatgaaggcctgtgccgcgctgcaggagccgctcatggcgtacctccgtgagcagcagcgctcgcctccgagctgcatcatatctgacctggttcactggtggactggtgacatcgcaagggagcttggtatcccgaggctgacctttagtggcttttgtggcttctcgtccctcatcaggtacatcacttatcacaacaatgtatttcaaaatgtcaaagacgaaaatgagctcatcacaatcacagggttccctacgccactagagctgacaaaggct

SEQ ID NO: 55392 - DNA, 303 bp, Zea mays
  Clone ID: MRT4577_150512C.1
tgctggagcgctcgctcaggtggtcgagcattgaagcttattgttcgttctaaccataacgatgcatgtagtgttggagagtcttgactcacttgagaatgcacacaggtgccaggtattgtactcccgaaccatgaggatgcatgaagttgatagtacagcattacattctgcgatttacagactgggactgagtgaagaggcacataaatgtcgtccttaacgacaaggcggcagaccgagtggtaatgtaactccagaactgatcgcgcattaaattcggtggttgcagtgactgctccc

SEQ ID NO: 55393 - DNA, 678 bp, Zea mays
  Clone ID: MRT4577_150513C.1
cccacgcgtccgctaaaatatggatgagtgatacaacatgtgtgaacatgcttagacttggtaggtctagtttctttcgcttttgtaagggctttagagactgaggtttacttgaagatacaatacacatgtgtgttgaggaacaagtggccatgtttttgaacacagtgggacagaaccttaggaataggttggtgggaacaaattatggtagatctggtgagactgttagtcgctacttcaacaaagtgcttcgtgctattggagagctacgagctgagcttattaggccaccatcattagagactccatccaaaatagcaggaaatccaagatgggatccctactttaaggattgcattggagctattgatggcacacatataagagcttcggtttccatagatatggaaccttcatttcgtggtagaaagtcttatgcccctcaaaatgtaatggcagtcgttgattttgatcttcgattcacatatgtcttggctagttgggagggttcagcatatgatgctttagtactaagagatgctttagagcgagagaatggccttcgtgtaccacaaggtaaatataggaggttctaaagttgtacttgtcaataatatttgttgttttgtggaattgtgaccaacttgtatataatatattaggaaaattctatcc

SEQ ID NO: 55394 - DNA, 617 bp, Zea mays
  Clone ID: MRT4577_150514C.1
aatcgaatatcctagatactggtagactgaggtcttgcgcatggtagttgctttagagaatgcgaatcgcgctccggacatgacaccataccaagaagacgaagcttagctcgctgcttggaggaagcatcactggttctttttgctccgaatacgaagaatgctccgaactgattgttcaagaaaaggagtgatgcaggcgaaatgtaagcctatgctagcggaatgttgaggaagaaggtgaatgactgggagagctccgccaaggcgggccctggtcgttttcctaggtacacacgatagcctgccatctactctctcatgtaacaatagctgagatcaagtgactatcggtgccatggtcgtatctactgcaactaggatgcttgaccgtgcgtaagcgactgcaacacgcaaggagaggagggtccaagtgaactgataagattcatcgtacttctcctacgactttgtacccctctgtatgctaaactgaaacgcggtgttcatcttgaaccagctcctatcttcggcatataattacatagtataatgtgaaagtcaggaaattgcttaacctgaaatgctaccatgcgtatatacaggatcatctgcga

SEQ ID NO: 55395 - DNA, 514 bp, Zea mays
  Clone ID: MRT4577_150515C.1
cccacgcgtccgctaaaatatggatgagtgatacaacatgtgtgaacatgcttagacttggtaggtctagtttctttcgcttttgtaagggctttagagactgaggtttacttgaagatacaatacacatgtgtgttgaggaacaagtggccatgtttttgaacacagtgggacagaaccttaggaataggttggtgggaacaaattatggtagatctggtgagactgttagtcgctacttcaacaaagtgcttcgtgctattggagagctacgagctgaacttattaggccaccatcattagagactccatccaaaatagcaggaaatccaagatgggatccctactttaaggtgtgatattcagctattcaatattctccttcaagaattttcactatttaaacccataagacccttaattgtattttggcttgtattggataaacataggattgcattggagctattgatggcacacatataagagcttcggtttccatagatatggaacc

SEQ ID NO: 55396 - DNA, 407 bp, Zea mays
  Clone ID: MRT4577_150516C.1
aaaaaaccaaacaggggcccatgcatttaaattttcgagccactgtcatacgcaggggtccggtcaaccaccttgccatttaaatctcacgggctccagttgtcaaatcagagtaaaaatgatttctggaaaccggtcttctaatttatataccaccaaactgttaaacatctggtctaaatacatggaacaccggtgttttacaaacaagacttgtttttcccaagagaatgacctaaactgaagcttcttgcccaaaaatttagaattctggtcagagaaaaaaccctttttcggaaccctgcttatcccctgtccttggaacccaaaactttcgtttttcccatttgattcgaaaacaggatcttggggtctagaaaagaacccctctttttcaaaccccaaaa

SEQ ID NO: 55397 - DNA, 372 bp, Zea mays
  Clone ID: MRT4577_150517C.1
ctagtctccacacctgatacgtatgagtccatggccgactccgaattcttcgccagtgccacggtcgacgacgagggcctcagaaacagcaccacaaacgtcaccgaatacgggcagccagctgctgataacggacgcgctatcatatccgttacatgtggtgctgttcgtactactggtgacctccatggaggagttcctgacttgttcactgaccgacgccgaacacgagcacggcttagacctgcatgaagctggttacatgtacgctaatgttgacaagcgcgccatgcccattcagcacaccaccagaataaccgtgttcatcaaccgtctgtactcgttccttacctgagaggcactgacgtggat

SEQ ID NO: 55398 - DNA, 325 bp, Zea mays
  Clone ID: MRT4577_150518C.1
gaggacgaggaggagggagatctccggactgtacaggctggttcacattcagtcaccgctagtcatgaaaaactaagcatttgctgcttttcgtcagactattagtaggaggtcggcaatcatctgacgtgggttacgcttcgtgactatcattaatcaccattaatactagcagctgctgctgcgggggcacaacacatggggggggataggaactgtaataccctgttgcgctttgcgagcttctggaaccgatgctatggtaaattgtcagcgctcaccgtctgaacactatttgcccatattagaatcgagatctcaaggt

SEQ ID NO: 55399 - DNA, 246 bp, Zea mays
  Clone ID: MRT4577_150519C.1
acgcttcgccctgcttatttttgatacttttttaaacaacatggaataacggggggaatggcttacaggaagaaacaccaaaggccgggaagggatggcagacaagaacacgttaaaacaaggtaaacgaaggcttaacatgggcaattattaaccagccagattccagggacaacaaaagcagggctttaaacaggtgatccctaatgaaaaatgaagctttatgcgggcccccgcgacatgatg

SEQ ID NO: 55400 - DNA, 374 bp, Zea mays
  Clone ID: MRT4577_15051C.1
cacagcagatacctatggagcaacgaccggcacaaaacatcagggcacaacaactacaacaactcgtgctagcaaaccttgctgcctactctcagcaacagcagttacctttggtgcatttgttggcacaaaacatcagggcgcaacagctacaacacgtcgtgttagcaaaccttagccttggacggagtttaccgcccgatttgggctgcattcccaaacaacccgactcgttgacggcgcctcgtggtgcgacagggtccgagccggacggggctctcaccctcccaggcgtccctttccagagaacttgggcccggtccgtcgctgaggacgcctcccgcgtactctgggttgttaccactcttcccgcg

SEQ ID NO: 55401 - DNA, 256 bp, Zea mays
  unsure (1)..(256): unsure at all n locations
  Clone ID: MRT4577_150520C.1
gtttcataagattttccagcagggtntaccgccagatgtggtaacattttctgcgagtcctgaatgcttncaatcnctttaataattttgaaaattcaacccttttacttgaacaacttagcttattacataactctttctatgccttcacttattgactattcattggccatcgattaacttggtctcaagcacggtccctctttaatcacctttgcctcattgattctccaacatattttgccttttacaattc

SEQ ID NO: 55402 - DNA, 999 bp, Zea mays
  Clone ID: MRT4577_150521C.1
atgtgcgtggattataggtcccttaacgatgtcactatgaagaacatgtgtccattaccctgcattaaggatttatttaatcagatgagaggcgcaagagtattctcgaagattgatctccgatcgagttaccctcagatgaggattagaccatcggatattcccaagacagcattctcgactcgatatggattatatgagttcactgttatgtcatttggactaattaatgcaccagcctattttatggatccaaagaataagaatgatagtgatcatgaggaacatctgatattggtgctacagaagctacgagataatcaactctacgccaagtacagaatatcagtgaatcctgctaaaatcaaggagatagtggtgtggagcatacccactacagttactgaggtccggagtttcttgggacttgcaggatattatcgaagatttattgaacgattttctaagattgctaagcctatgacctcacttctggagaagggaagagagttcaagtgggacgaaaaatgccaagatagctttgatcaattaaagaagagattgatgtcgccaccagtgttggttatgccagatatgcagaagggatttgacatttattatgatgcatgtggccaaggcataggatgtgtgctcatgcaagaaggacatgtgattgcctacgcgtctcgtcagtcacggaaacatgaattgaactaccccacccatgacttggaattggcagccgttgtgcatgcgcttaagatatggagacattatatcatgggaaccaagtgccaagtatacacggatcataagagtttgaagtatatattcactcagaaggatctcaaccttaggcaacgccgttggttggagcttattaaggactatgatttggagattcactatcattcgggcaaggcgaatttggttacagatgccttgagtcgaaaggagcatgttcattcagctgtcgttgcccagctgaaagggaattag

SEQ ID NO: 55403 - DNA, 1581 bp, Zea mays
  Clone ID: MRT4577_150522C.1
ctaagtagcttcatcttcgccatggtgactcaattgcactttgcacatctttataaccttatttctcatgacacgagtcagtgtatcaagaatctttatgggatactcagcattcgtcaggtcatcttgaacactaagatcctctattggtagctgctcttcaagtacccgagacacttctggacgtaaactgtgatcctgtatccaaaacgatcttcttcggtacaccgtgtagagacacaattcgagccatatatactctgccaattgagatcccttataagtagtcttgaccagaatgaaatgagaaactttggtcagtccatccacaataacccatatagaatcatatcctttcgaggtgcgaggcaatccagtaatgaagtccataccaatctcttcccacttccactcgggtatctttagtggatgcagcagtccatctggcctctggtgttcagccttaactctttgacagacatcgcacatagccacatgtgcagccatatctctcttcaatccataccaccagtatttctgcttcaaatcctgatacatcttggtactctcaggatgaatagaataatctgagtcatgggcttcctttagtatagtctcacaaaggttaacaatctcaggaacacatatcccatccttgaaccatacggtgccttgctcattttccgtgaattccagacctctaccttcagtaataagatccttgatctcttgtatcttagtttcgccaatctgtcctttgcggatttcttgctccaaggtaggttccacttcaatagtaactccttcaatgtgagtaactatccccaggttaagtctcatgaaatcctcaacaatctcatcgggtagctgggcaacaatagctgaatgaacgtgctcctttcgactcaaggcatttgcaaccaaattcgccctgcccgagtgatagtgaatttccaaatcgtaatccttaataagctccaaccaacggtgttgcctaaggttgagatccttctgagtgaatatgtacttcaaactcttatgatccgtgtatacttggcacttagttcccataatgtagtgtctccaaatatcccaagccttggccacatgcatcaccataaatgtcaaatcctttctgtacatctggcataaccaacactgggatgacatcaatctcaacttcagttggttaaaactatcttggtactttttgtcccacttaaactctcttcccttctccagaagcgaggtcataggctttgcaatcttataaaatccttcaataaatctccgataatatcctgcaagtcccaagaaactctgaatctccataactgtagtgggtatgctccaatccactatctccttgactttagcaggatccactaatatccctccattagaagtgatttgtccaaggaatggcaccttgtcaatccagaactcgcatttactgtacttggcgtagagttgattatctcgtagcttctgtagcaccaatatcagatgttcctcatgatcactatcactctcggaataaatgaaaatatcgtcgatgaaaaccacgatgaatctgtccat

SEQ ID NO: 55404 - DNA, 1689 bp, Zea mays
  Clone ID: MRT4577_150523C.1
atgccctcaagctattcgtcctactcttcgcttcgtgtagcgccgttaggtttgatgttggcgctctgtgtggcgggagcatgggacatcggtgtgctccccgtcgggtgttcgggcggtggcgccgtcctgggatgcttggggcggatgagctctcggaccgttgattcgaactgggcggccgagattagatatagggtcgcggttgtgagaaccgttggatctggatcgtgtgtagggatggcagcgggtcgagttgtgttcgggtatgataatacccgacccgatatcatagccgacccttatacaaatatccatacccatcaagtcaatcgggcgcaggctcgcagctcgggcctcggtgatgggcggacggcgcaggagccgaggagcgcaggcgcagctcagacggtcgggcctcggatcggacggctagaatacccccgtaccacttcggctagcgcagtttgcaaaagagaccccacagtcttagaaaggcaaaggcagtttatacactgtgctaagagaaccgtagaactcaccagttccaaaggagaaagatttgaagttgaaattgcagtaactaccaccatcagactagcgacattcttagtagatgagaagtttgttggtggcaacatccgtgcggttggagattttccggatgtctttccagaggagttaccagaaataccactaggaaggagagttgagtttgtcattgatctcttacctggaactgctcctatttctaaacacccctacataatgttcgtaaaagagctaaaggaacttaagaagcagataatggaattacaagaggctgggtacattcgtccgagtttctcaccttggggagtgtcgggtgatagtgatcatgagaaacatctgagattggtgctacagaagcgacgagataatcaactctacgccaagtatagcaaatgcaagttctggattgacgaggtgccattccttggacatatcacttctaagggaaagatatcagtggatcctgctaaagtcaaggagatagtgacgtggagcatacccactacagttacggaaattcaaagtttcttgggacttgcaggatattgtcggagatttattgaagaattttctaagattgcgaagcctatgacctcacttctggagaagggaagagagtttaagtgggacgagaagtgccaagatagcttcgatcaattaaagatgagattaatgtcatcaccagtgttgttgcggaaacatgaattgaactaccccactcatgacttagaactggcagccgttgtgcatgcgcttaagatttggagacattatatcatgggaaccaagtgtcaagtgtacacggatcataagagtttgaagtatatattcacgcagaaggatctcaaccttaggcaacaccgttggttggagcttattaaggattatgatttggagattcactatcacccgggcaaggcgaatttggttgcaaatgccttgagtcgaaaggagcacattcattcagctgttgttgcccagctacctgatgagattattgaggatttcaggagacttaacctagggatagttgctcacactgaaggagttattattgatgtggaacctaccttagaacaggaaatccgcaaaggacaaattgtcccctcgctttattggaccattcagagtttttag

SEQ ID NO: 55405 - DNA, 316 bp, Zea mays
  Clone ID: MRT4577_150524C.1
gggggaaagggccacgactttactgaacaaaccgaaggggggcagatccgaatcgtttgcgaataggcaattgttccaaatcctaaggaatcttaaatctaccgggggggtacatcaccagaaaattgcaagcaaaggctgcaattttagaagggcccccttaaaaaggtttcaggtcatccttttttggatctggcttttttggcccttcctgggagctgatacctccctttttgccgaatatcatcttggccagatcattaagggtttcatgatccccacctgaccttgttttcggggcagctggttttttgac

SEQ ID NO: 55406 - DNA, 389 bp, Zea mays
  Clone ID: MRT4577_150525C.1
ggccgacgacgtgctctgcatgttcaccccgtcctggacctccaccaccgagaacctctacctctggtgcggcggctggcgccccaccgccgcgatccagctgctgtacaccaagtccgggatgcagctgcagcaccagctccccgccttcctcgacggcgggggcctcaaggacgacctcggcgacctcggcgccgcgcagctccaggccgccgaccagctgcagcgccgcaccatccggagggagcgcgagatcgaggacgcctccgcgagcgcacaggtgagtcagtagaagagtgaggtgaaaagaaaagaaaaactcaccgtccgctttctttccccttcagttgtaggacttcgcgacgacgtaaaatatccagggaggtaaa

SEQ ID NO: 55407 - DNA, 349 bp, Zea mays
  unsure (1)..(349): unsure at all n locations
  Clone ID: MRT4577_150526C.1
gggggggtgtttttttttttttttttttttttttttttttttttttttttcacagggaaaacaaaagcagtaaagttgggcttataacacttgcgtgggaaacagggcgaaatgaacgggccccgtcttgttttttggcctacacgtgattttggggggggggggaactcgncgtggcgttctccggggtaaccggtgaagttccccatttgttggtggtgacacatgggggggggctgttgaagtgggtgaggcggccaatgcccaccggggcatggggccggagcttggctgactgggatgtggtgaggggttgcggtggtggcggttgaaggggctccgggtttgg

SEQ ID NO: 55408 - DNA, 531 bp, Zea mays
  Clone ID: MRT4577_150527C.1
gtgggatgggggaggtcaaaggggggggtcagaaaaaaaagggggggggaagattggcaacaccaaagccacggcgggaggggggggggaagggaaacggccaaaaaccccaacacccgggaggggcacagaaagcacggggcactggggaaaggcgaacaaaagagggggggaagggaagggggaaacccccgggcaacgggggaaaaagaaaacaaagcggggcaacgacaaagcacacaacaaacgggggagaaaaaaaaaaagaaaccagaaaaaggggaacacaaaaacagaaaaaagagaaaacaaacgggaggaaaaaagaacgggaagacaaaagaaacaaaaacccaaaagcggatttgcaaaaaaggaaaaaaaacaaaaagaaaggagaacaaaacgtcaacgggggaaaaaggcaccgaataagggaagggggggcccaaagcggggccacctggcccgaacccggagaagtccgacaaagaagccgggaaggagaaccaaaggtcctaacagggagaa

SEQ ID NO: 55409 - DNA, 421 bp, Zea mays
  Clone ID: MRT4577_150528C.1
cagacgcgtgggggcgacgggaaggccaggtctagcaagtcgcgcggcgatgatctcctcaccctctccgtcgctgtcgccgtcgccgtccgggacgccttcgcccaagggcgtctccgctacgccgcggcagggcagcagcaggtggcgcagcggcgcggtgcgcggggcgtacgggcggcgcctgctggacgcgctccgcgccacgggcgacggccagccgcgcccacgcgccgtcaaggcggcggcggactcggcgctggcgctgaccgcgcgcggccagacgcggtggagccgcgccatcgtgctggccggtgcggtctgcggcggccgacgccgcgtcctcgtcaagggcggcggcaacgtccggcggcggcgccggcgccgcccgccggttgcaggccagtagacgaggcggcgg

SEQ ID NO: 55410 - DNA, 244 bp, Zea mays
  Clone ID: MRT4577_150529C.1
aaaaccggggaaggttaatcaagggggggggtgtaaaacttacataaaaatttgtttggataaaaggggattgaaggggatttaaaaaagaaataatctgattgtgatcaaaatttttgtgggctgtaacaatccttgttaaaacaaagaggcggtaaaaaaggagccttactgaaaaatgaacgtagccattcaaattatggtcggcttttttcaaaactcacaggacccatgtcttggaaat

SEQ ID NO: 55411 - DNA, 432 bp, Zea mays
  Clone ID: MRT4577_15052C.1
gccactccaaaatgtggtgcctccaccacctacttcggctacttacgcctcacaacaccggcggtggcgccttgggccggggctagggacttctctacctatctacctcaagcaccctgaccgcggccggctccctgggctacttcctagcgagggcgtttactgggcctttcacgacacgtgggtgctgccgcacgagccgcagagcatgcgtgagctgctgctggtgaccgacaagcacgagtgggcgtttatgcagtcgtctcgcgctctacccgacctgcaccttccgcgccgttggcgaactcttccgctgcctacagccggaggcgctcgttataaccgtctaacagctcgctgggcgctcatttggcgctacccgccgacggcaaggacatcgcattcgacgctgagcgcgcaagtactactaca

SEQ ID NO: 55412 - DNA, 280 bp, Zea mays
  Clone ID: MRT4577_150530C.1
attttggatggttttttttcaaaagattcttatagaagctggctgaaaagctggggcgtttggcgatctgcagcagcttttggtggccaaaagctggaaaaagcctaaacaaacagggcgtgcttgcatgcgtcttgaggcgtgcaagcagttcaggttcctccgttcctgtagttggttatttgtacatctgtgagttatttgcacgacgagtcaatttatgctaccccgtcacaactcacaagttagttatttccttgtctgcctgaggtccaaagtc

SEQ ID NO: 55413 - DNA, 285 bp, Zea mays
  Clone ID: MRT4577_150531C.1
gcgtgcgaacgcagcataccacatcaagtagaagcgtactcgtcgccggaaggaaaggcgcggtgcaagatgtcgtggcaggcgttcgtcgacgagcacctgatgtgcgagatcgaaggacagcatctcagcgccgccgccatcgtcggtcacgacggcagcgtttgggcgctgtccgagagcttccccgagttaaagcctgaggaggttgctggtctcataaaggactttgatgaaccttgtgctcttgcaccaactggtcttttcgttggaggttcaaagtac

SEQ ID NO: 55414 - DNA, 254 bp, Zea mays
  unsure (1)..(254): unsure at all n locations
  Clone ID: MRT4577_150532C.1
acccacgcgtgcgacaatcttggactgagttccaaaagtttgtagttagatttatctctgngaccttctttcctgcgggtgtgcttgatagtttggacctagtccaatcatcactaacaaagagacatctcaaagcttgcttatgtttatatatggactggagagtaaggaaagatgtatcaaatcttgtaactgcaggcctcactaaattaccaggtcttttatcccttgtaccctgacgacagctgctaccc

SEQ ID NO: 55415 - DNA, 433 bp, Zea mays
  Clone ID: MRT4577_150533C.1
gcgcccacgcgtccacggactcgcgggcataaacacacctgacgaagcgcagtatcaacgagctagcaacaatgggctgacgcgacattatgcgtccatgcgctcacagcgctcactgggagtgcagcacatgcattcatcagtccacaatgctaactacgttccaagtgctattatcacacagctgctcaatccaattacttacatgaggtgctaacacccagctgtgcaagcctatccgctgcaacaagcgctcgccgatagcgtgttagaacaaccattcgccccattacaacagcaatgcttggcacatctaaccatacaaaccatgggaacgcaatagcatcatgcgctgagccacctagccgatgcgaaccctatggcctacttgcaacaacagctgatcgcatacaacccacttgctttggcaaac

SEQ ID NO: 55416 - DNA, 646 bp, Zea mays
  Clone ID: MRT4577_150534C.1
gggaaaaagcaaaccccttccccccatttgtttgggtcccaaaaaaataccttttaccccttccccgggccggaaaaaaaattttttttggtccctttgccttttccccccctggcaaaccctgggtggaaacccccagggccggccccgggggggggggcccccaaaacccaaattttaaattttcggccccccgggccccccccggttttgttttttttccccccggattttttttcccgaaaaaagaaatcccgcaatggctggggaaacctgggtgggcccccaagaaaaccttccaattttgggaacccctggggaggggggaaaaacaaaagccccaccggcggggggttggaatcgaattctttcccccccccgggggggtttttgccaaaggcccctaaccaaagggcccccttcttttcttttttttaaatggggccccccggggctggggggggccaaccccattgcccccccccccccggtaccccccaaacttgacccccttaacccaggcgtccccccaagggttgtggccccccccggccttgggggccggaaccccgggaacggggcaaacccccccgggccccaattttaataccccccccccccggggaaactggttccccaccagggg

SEQ ID NO: 55417 - DNA, 621 bp, Zea mays
  unsure (1)..(621): unsure at all n locations
  Clone ID: MRT4577_150535C.1
gagaagggcatcttttttttgagaccagagagggccaattttggcttcatatgtgaacaaagtgttgtgttttctgctcaaaaggtttgttttacctttgtaagttgtaagtttatattattcaaactgcagttacatataccttggtaggctgcatgtttcctttgaggtaagattgctatggagttgatcgagtgatctttcctgtcatattagatgtttttcttcttgttcctttgcaacattatcttgaaagtttctaggaggcagctgaggcatgcactattccttaaatttgttgtattgtgtcttccacatgtgttagttttatatcctagatcaatgggtctatgttctctaaaccttgtaccaccaccaccacttgccgaccttgctcctctcaagctcgccttctggtccgtctgctaccactcactcgtnctcgcctttctcctctccccaatgacatgtctatctttgtttccttggaaatggatttttgtcatgtctatcttcaggattttgtttgggtacactatatgacctgttcatagattatngttcctgttttctaaactggtcttatgactatagtttttaatgagtgttctaactggactg

SEQ ID NO: 55418 - DNA, 227 bp, Zea mays
  Clone ID: MRT4577_150536C.1
tattcgacgcgagcccccggaaccagcaggggagacacaacaaaagggggtgccgggcagcaaaccaacacgccgaccaaacggccctcaacacgccacgaccgaaaaagacccccaaaccacacaaaacagccggcacgaacacaacgcgccagacgcgcacaccccacccggcgaccccacaccaaaagggcaaggaaagcccgcccgcccaggaaaagcaccac

SEQ ID NO: 55419 - DNA, 348 bp, Zea mays
  Clone ID: MRT4577_150537C.1
gcctgcagtcgctgtagagtatccttaggcccttgcgaattcctattccttttttaaggatacagaagcgaaaatgttgtatatgaattggaagtattcgtattcttattatgcctatcctgaagccaaagggaatgagatcggtattccttggggaattccaatttcacattttcaagaaaatacgaggcaaaaatgttcatatatggaatgggaatatttggtatcttattaagcctatcttgaacccaatgaaatgagatcggatttcctcggggaattccaattccacattttcaagaaatatggtgcctaaaaggttcatatttgaatggaaataattggttt

SEQ ID NO: 55420 - DNA, 181 bp, Zea mays
  Clone ID: MRT4577_150538C.1
aggacataacgcgcaccttacatttttcatggttacagcagaaccagggaataaagaaaacactccaaatgaaaaatgaaaaaactagaggggaggaaccaaaagaaacaagaaacataatgatcggggcgaacaaaataaagaactggttacccatgcccccattataattcggtcacca

SEQ ID NO: 55421 - DNA, 599 bp, Zea mays
  Clone ID: MRT4577_150539C.1
gacggacatcccttcagtaatctgatagacttgactagacgatagggcttgtgtgatgaaccccctgcttcctaacctgcagcaagttgtgcactattttactcaataatgtcagccgaggtattcatctagagaagtttcttcttacaggtgttcttgacatgttgcgaaccaacacgccatcagtaaagaagtttgcaacaattatcctaaacaccggtttgatgcactggtttcttgcttagttggcctcccaaattaaattatcagcgtcagaatcacgggaggggaattcactaggagcctgttctactttcaaagaatccatccttcttcctgatgaagagagaatgattcatgatgccatcgaacaagctgatggaaaacaagggattgaactattgcaagatatactgaaatcaagacagtgggtaaagtctgacaaattatctgctgcattaaaaccacctcttatgcgtttatgtgcaaggtatcttgccagagagaagaagcgaggaaaagctctagacgctgttgcaaattttcacttgcaaaatggagcaatgattgagagaattaattggatggctgaccaatca

SEQ ID NO: 55422 - DNA, 276 bp, Zea mays
  Clone ID: MRT4577_15053C.1
ggttcctaaggcctagtttggaaaccccattttcccacgggtttttcattttcccaagggaagttagaacattttcccttgggaaaatagaaatcctttgggaaaatcgagttcccaaactagccctaagtgtgcttaaagccttaaaaaagcctgctgagttttcctgaatggtgtatcaggtaatgagatgggttcataggtttactcctttggccatggtgatgatttgaatacataatatttgtactcatattagttcgcagtgatggcttc

SEQ ID NO: 55423 - DNA, 554 bp, Zea mays
  Clone ID: MRT4577_150540C.1
aaaaaacaaaaaaaaaaaaaaaaaaaaaaaaatttaaaaaaaaaaaaaaaaaaaaaaaaaaggggcccaaaaagcaccagccccgggacccgcgcgggaggcgaaaaagcgcgccgggggcaagcgggggcacccccgcaaccggggccaaatggggatccgcgcacaaccccacacacaatacgagcccgaacccacaaccagaaaagcccgggggggccaaacgagggagctaacccacacgaagggcagaagccccaacagcccgctgaccacaagggaaaccgggcgagccacctgaagcactgaacagaccaccgggcggggaaaggcgcgacccagcatggggcgccctgccgcttgcggaaacacggactcaatgaacccggccgtccggagaccgacaccggtaaaccccaacccaagggccgaaccaccggatgtccacagaagcacgggccagcgcaggaacgaccaggggaccaaaaggccaaccacaggccaggagccaccaaagggccccccggggggggcaaccccataggccccgcccc

SEQ ID NO: 55424 - DNA, 391 bp, Zea mays
  unsure (1)..(391): unsure at all n locations
  Clone ID: MRT4577_150541C.1
gcgagggggcgacgccgagcannnangggggacgagcnagcacnagcaggagccangggnacaacgnggacgccgncgccnagcaagggagggggggcccngggncgacgcggagcngcgggcagnacggcnngnagnagccgacgcgcgcgnncancngggcgggggngnncccgnngcacncgagggcgccgnnganggcccngangggggcgccgaagcccngcggcnncacacggngcacgnngnncanccagaaccagagcgccgncnngaacgcgaccacggcgncccgcgccacccngnnggggncggcgagcccgnngaagccgnngncccncccggcgggcccgnngnnggagnnncccgagacccgcagcgggccgcgccc

SEQ ID NO: 55425 - DNA, 358 bp, Zea mays
  Clone ID: MRT4577_150542C.1
atagttttttttttttttttttttttggtcgggggtttttcaagtaaataagtgggccaggctgcgtccggccagagacgtaaaaagcggaaaatgctcaaaggattgggatatcccatacccaatccctagaccatcccccagttaaaacctttttggccggacccaacctggcccaattttttaaatggcccactttggcccaaaaaaggaaacgttgggacccctgattttggcgcccttgttttcctacctaagctgccggcctttacccgaacggttttttttaaacgggggttggacaccattggagctaacaccgccccgcttaaaaaaaccttaattgggagaaccgggg

SEQ ID NO: 55426 - DNA, 172 bp, Zea mays
  Clone ID: MRT4577_150543C.1
gcggccgcccttgagttttcttacgaatcaactttcactgaaccagagcgaggagccccaatgaacatagctgagacacggccgcctccatctgagcacagacataaggtggcgcccatacacagcagccataacagtatacacgctaaatcagaagacgggggctggtgga

SEQ ID NO: 55427 - DNA, 261 bp, Zea mays
  unsure (1)..(261): unsure at all n locations
  Clone ID: MRT4577_150544C.1
gatcattcacatgcctcattgatgcnaannncatcccagntagtcgtcganccgatnattcaacagtggnaacctcgtgaggatgcnacccgtattggttcngctggtgttgtgangaggcaggccagtggntatgtcaccgctgnngagggtgaannnggngctctaantcctcanccactggtgcagggagagtgntttccggcacatnaaaaccattgaggantgcttgcagctgcnctgattaaccgttgccnaggg

SEQ ID NO: 55428 - DNA, 138 bp, Zea mays
  Clone ID: MRT4577_150545C.1
gaccatctagcaggatataaagcacagtattgtaccatcaatggcctccaaaatattacgattgcttatgctacttgagctttttgcaagggctgataccgcggccattttcacacagtgctcacaagctcctatagc

SEQ ID NO: 55429 - DNA, 2821 bp, Zea mays
  Clone ID: MRT4577_150546C.1
ccacgcgtccgaagcgccgaaccgcgttccaggtgatgggctactgcgtctgcgtcgccaagggtgccgctgagatcctcaagctcaacatggctctcatcctgctgcccgtctgccggaatacgctgacgacgctcaggtccaccgcgctcagccatgtcatacccttcgatgacaacatcaacttccacaaggtcatcgcgctgtccatcgcgatcgccacagcgatccacacgctcgcacacgtgacctgcgacttcccaaggctgatcagctgcccgacggacaagttcatggccaccttggggtccaacttccactacaagcagccgacttacctgggcttgctggagagcacacccggggttaccggaatcctcatgatcatcataatgtccttctccttcacgctggcaacacattccttcaggcggagtgtggtgaagctgccatcgccgctacaccaccttgccggtttcaatgccttctggtacgctcaccacctgctggtccttgcgtatgtcctgctggtggtgcactcctacttcatattcctcaccagggagtggtacaagaagacgacatggatgtacctgattgtccctgtcctcttctatgcctgtgaaagagtcatcaggaaatttcgtgagaacaactaccatgcgggaattgtgagggcagcaatttatccgggagatgtgctctctattcacatgaagaagccacagggtttcaagtacaagagtgggatgtatctgtttgttaaatgcccagaagtctcgcccttcgagtggcaccccttctctataacttcggcaccaggcgatgactacttgagtgtgcatatccgtacgctgggtgactggacatccgaactgcggatgctttttgggacggcttgccaggcacaagtaacttccaagaaggctacccttacaagacttgaaactacagttgtggcagacgcccagacagaggacactaggtttcccaaggtctacatagacgggccatacggtgcaccagcacaaaattacaggaaatatgacattcttctgcttattggccttggaataggagcaactcctttcatcagcatactgaaggatatgttgaacaacctaaaatccaacgaagaggtgggaagcatccacggctctgagataggcagcttcaagaacaatggtccaggaagggcttacttctactgggtcaccagagagcaaggatctttcgaatggttcaaaggagtcatgaatgaggttgcagggagcgatcacagcaatgttatagagatgcacaattacctgaccagcgtgtatgaagaaggtgacgcaaggtcagctctgattgccatggtacagtcacttcagcgtgctaaaaacggcgtggatatcgtctccggcagcaagattcgaacacattttgcaagaccaaactggaggaaggtattctgtgatttggccagcgcacacaagaactctcgcataggagttttctattgtggatctccgacgctcacaaaacaactgaaggatctttcgaaagaattcagccagacaaccacaacccggttccatttccacaaggaaaacttctgagacgacgtgtacccgaagatccgatggactggaaacataattgtatagggaaaaaatacgatagcattggcatagcagatttagttttacaagttttgatgtatgcggggttgtacaaaatatgtgtagaaagctagatgtcaccatcatacatagattctgaaatgcttgcagatatatatattgcattgcataagtgaaaccacttgcttcctaggataaccgagttctagatctcctgctttgaacacgcaaattttctcttttcagtctttctgcccgagctgtcattgcattgcgaataagggtgctattctgcttcctagaagattcttgtgtatcatcttgcactggcacaagtgccacagaacctggtgtgtcttcagcgccctgagaatttccaggtgcattcctgttctttggaggcctgcctctttttttaggctgcttatcagcagataaagatgtatcttttcgaggcctgcccctcttcctaggttgattactagcctgcaagccgtccactctaactatcgccatcttattgtttgtatcatttccctgggatagtgtaactatatgtgatgttttctccatactgtcatccactgtagcatatattttccttggtctacccacctttggtttggagtcagaaactgatcccttaagtttgcacttgtcgataacaagtgttttaagtggaacagctatgtccaatggcagtagaactttctcaagttcacgccattcaagatcttcctggtctccatcatcataaatgacggtgtaccagttgctttcaatgtcatacttggccactttcccgacgaaatatgtgtctccaaaaagcttacgcactttcctcccttctaaccattcaccaaaacgaggatcaacatgagattctgcgtcattttttactgcagattgagaaccagttgtgcaatcaaaaggaaaatctggaacgccattgataatgatggcaggctctttaggaactttgattatagatgtagtttctgactcttgcttgccatcagccccctccatggttttctggcgaacgcgacgaaggccagggaagaaccgtcgaaggcctggaaaactggcgtagggcctagggtttcggcgtcggcggttgtcctgttgtccagcggccgcacgccaggtgagcggcagacgaaacagcaaggcaggtcgagtcccggcccggccgg

SEQ ID NO: 55430 - DNA, 347 bp, Zea mays
  Clone ID: MRT4577_150547C.1
gagatgcacaattacctgaccagcgtgtatgaagaaggtgacgcaaggtcagctctgattgccatggtacagtcacttcagcgtgctaaaaacggcgtggatatcgtctccggcagcaaggtatacgataatttcccttttgctcaactgtaaagtgttttgcatatgctatctgttttggttaacggagcactctgttgcagattcgaacacattttgcaagaccaaactggaggaaggtattctgtgatttggccagcgcacacaagaactctcgcataggtaagccacttgtcagtgaacatcgagtgacacgattttcagattcagtacaatcttttcggacc

SEQ ID NO: 55431 - DNA, 554 bp, Zea mays
  unsure (1)..(554): unsure at all n locations
  Clone ID: MRT4577_150548C.1
cctcgagggctgnccgggcatatagttacactatcccagggaaatgatacaaacaataagatggcgatagttagagtggacggcttgcaggctagtaatcaacctaggaagaggggcaggcctcgaaaagatacatctttatctgctgataaacagcctaaaaaaagaggcaggcctccaaagaacaggaatgcacctggaaattctcagggcgctgaagacgcaccaggttctgtggcacttgtgccagtgcaagatgatacacaagaatcttctaggaagcagaatagcacccttattcgcaatgcaatgacagctcgggcagaaagactgaaaagagaaaatttgcgtgttcaaagcaggagatctagaactcggttatcctaggaagcaagtggtttcacttatgcaatatatatatctgcaagcattttagaatctatgtatgatggtgacatctagctttctacacatatttttgtacaaccccgcatacatcaaaacttgtaaaactaaatctgctatgccaatgctatcgtatttttttttcctgg

SEQ ID NO: 55432 - DNA, 2414 bp, Zea mays
  Clone ID: MRT4577_150549C.1
cggacgcgtgggagacccaaaattttttaatccgcatcctattagttctctgtctccgaaaagtaaaatttccgatgccacttgtgttcctgaagaaacaaagaatgttggatccaatagtataaacacctgctgtacaggtgatgaatcaaaacatgtagtgttggagaaccgacaatattctgttgacaacctaaaaagtggtgacatgggagaaaagatgtctggggaggaaatacccgcagtttcagggaacattgatcaaatgatagagaatgatcatgaagaaaaggctgccaatgctactggtacatccaaagataaggttgacccttctgacagtattgcacttgaaaactttgcagctgacactttcaatgcttcagaggattcagacattccgtcactaaatcataagaggtcatttgaggaacatgaatcttctgctttaggagtggagcctaaaaacacaaatttactccaatctacttctgggcttcaagagaaaatttcagcatcagtgatcagttctagtagtggcatcacacctaccattgttactgacaactttgatatttctgaggataaaaatggctgttcaataggtgtttcttctgttgattctcctgctttactagctgagaaggatttgaatatgtccacagtgaatactgaggagccattcaaggaaggggttaagtccgctttaggagatcaacacaatggtatttcttctggctctggacaaggaggggaaatgccagctgtcccaatggactcaaagattgccgtgtatagtggtactgtttctgctacagaaagggagaaattcaaggagcagcctaattctttgggttgtttgaccgacaggagaaactcaggataaatcagatagtatggatccaaccacagcatctactttgggtggaaaggtggctgtgaagattgtaaaaactcccctctatgccagttgtgctttgaatgcacatatgcaacatatagtgttagatcaaggtacagattgtagttctggtactgtgccatctcaaggaaacgaaggctcaagcttattggaacctggtaatggtgatggaatctgcactggggttacatgtgggtccccttcagtgattagttgtgctgaatcctgtccccaagaaggtggacatggcagcactgctttacttcatcacacactatgtgggcaatctgaggatcctgaagatcatggggcctcagttgatggtatccagagcccaaaacaatgcaataccagaaatatagaatctgcacctggttctcaggagactagtgcagcaggaggtgatagaagcttctcatttgaggtgggagctccaccaaatgttgctgagaaagcccatagccctgtttggagccctttccctaaatacattacttctcagagtagcaagatggccacagaaaatactcaagctggaggttctttgaaggatactagtgatgatagtaagaaaatatctactgtggagtctggtaaagaacagctatcagaaaggaaagtaactgaaagttctgggggtggcctctcagacaactgcaatatagacgacatcattaagggtagaagttcaccgccgcggcagcatccaatccctgagtgttctgtttcttctgcagatttagtgaattttccattcacagatccacagcatttgcagctacgtgcacagatatttgtttatggagctcttattcaaggaacaccaccaggagaggcttacatggtggcggcttttggagaacctgtaggtggtggcaaacctacatgggaggctgcttggcgagctgcttttgaaagatttcagtataaaaaatcacctcatatcagtttagagactcccacaagttcacttataggtagttctgtgcctgagaaagctagcaaaggtacagcaattacaactgtgccagctagcaaaaaagttggtaaaactgtggcgccagcacatcctgctgtaaccctacactctccaacttctgattttccttttggtagttctacatttaatctgcaacgaggcactcatctggattttagccaggcagtatcaccatttgcgtataattcacacatgagacatccgtctcctggtgttgccccctggtatacgcagagccctggtccacgccctgcagcctggttaattccaccacaaaacttaatatttgattcatcaatgcaaccggttattcctacaaatgaaactgcgaagggtgcatcatccaaaaacatatccgtttcacatactgtttcatctggtgttcttcccagcctggcaccttctattgtttcttctccaatagcagttgtgagtgatggaaaacagaaggctgcttctagctctaagcgtggcacaacatcacaaaagtca

SEQ ID NO: 55433 - DNA, 494 bp, Zea mays
  unsure (1)..(494): unsure at all n locations
  Clone ID: MRT4577_15054C.1
ccagacctgaccatgagtaccaccagactggagcatgtcctcagaacacctggggggggggggggagggacttcttaaggaactaccagttctggatgtccaacaggtccgaccacgattctaatctatccaaaaacccttctggagtaccgaaccactataacgatccaagtacatacgatgctggaagctcccattattctgcttgaacgggaagtacatacatgagcgagtgatatatgaagccgcggtggcgcttattattgcgtcacaaaggcatacacatgcttatacattccatctaaactacaaacctacttaaggacctctctatgacttaatctatgacaattcttgcatgctagttcataatacttaacaaacgacgaaggggagtgactgtctgcctggttctgctgttccaccacgaggacatgggcatcccgtacgagatcgccaagctgggcatcaggcaggngatgtgggggtgcgtg

SEQ ID NO: 55434 - DNA, 413 bp, Zea mays
  Clone ID: MRT4577_150550C.1
gatcggacgggcacgggaagaccgcgtcaaaatccaccaccaactcgtcccggcccctgggacggcagaaacggacgcatcgtcgtgctcaccgcagggaatccgcgcgagcttcccccttccctacatccggaggcgcaaaaggcagggcctagtgcttccccatccccagttattttttcttcttcttctttaatttacagcaggaagccaggaactcaacccaagagggggaaaaaaaatcaatccccggagaccggagccctgagcaggtgaagaaatcctagaatctccagcacgtctgccccggtctccattgaccataaccatatgaggaagaaaaaaattgcttttccaggcatggcctgggatttgccgagatctccccttcccggcgtgcccaggcacagcca

SEQ ID NO: 55435 - DNA, 323 bp, Zea mays
  unsure (1)..(323): unsure at all n locations
  Clone ID: MRT4577_150551C.1
cgctcgaggctttcgctgcgcatccgnaattgcgtgcgagtgacagagacgaggcggtcctcagctctctaaacgtacggaccggatccgcagccaggcggtcttccaaccactcgtcaacccatccccttctcgccgccgtataatagcagcccatccccagcttttccccaacctatcttctcccttttgctcgaacgacacaccgccggcttcgatcccgatccccatcccctgtcatccaagagcagatcttcgcaagactctactggaaagactatcaccctcgaggtggagtcctctgacaccattgacaacgtcaa

SEQ ID NO: 55436 - DNA, 463 bp, Zea mays
  Clone ID: MRT4577_150552C.1
cggacgcgtgggcggacgcgtgggtgatcgacaaggcatttgttatgttgagactgctgctttggatggtgaaactgacttgaaaacaagaaccattcctccaatttctgctaacttgtcagtagagcagctaggaaaagtcaagggtgtaattgagtgccccaacccagacaatgacatacggaggtttgatgctaacatgcgcttgttcctccctataattgacaatgaaaaaagtcctttgactatcaacaatacacttcttcagtcatgttaccttcgatacactgaatgggcttgtggagttgcagtttacacaggcaattgaacaaaatctggaataattaggggagctgcggagcccaagttcactgctgctgatgtaataatagacaagctcacttttgcaatattcatgttccaaggtggtggtgtacttggtctggggtattttgggaatact

SEQ ID NO: 55437 - DNA, 233 bp, Zea mays
  Clone ID: MRT4577_150553C.1
ctccctccctccgtttctctttccggcaggatgagctccacggcggccgacgtgctccgggcgctgccagccgatcatgacgagggcacgggcgccggagcccacctgctcaactgggggctcgtcgatggcgccgccggcgccggcgccagtcgcgcagacggaggcggcggacccgactccggagggagtgctgaatcatgccttgaccgatggatagatgatcactgacg

SEQ ID NO: 55438 - DNA, 345 bp, Zea mays
  Clone ID: MRT4577_150554C.1
actcgttcgaatctacttatccccctaattttaatctttatacctgctttgtcttttgaagtgccggggctaattcatcatggatttaatcataccattgcacaaataggtgttacacagtatgtcagcgacctattacttgacctactgctataccatctgtataaccagattgctacaaacaccttgaatcgactggatcctatgacacatgctgtcggtaatgtgttgatacgtgccttcatcatcggttaatcaatcattgcttatggcaacaaaacctgcactcatactgcaattgacacgtatcattgacatatctggtgttgctatgcactcttacat

SEQ ID NO: 55439 - DNA, 403 bp, Zea mays
  Clone ID: MRT4577_150555C.1
ggcgacggtaccgcgccagggcctgcgcggcagggacctgcgggtgatcagctggctggggatgccgtcgtacgacgccgacttcgggtggggcgagccggcgctgctggcgccggcgctcatgtattacccggggttcgtgtacctgttgaactgccccggcaagggtggcgatgttgccgtggccgccgcgctggagcccgagcgcatgcagcggttcaaggagctcttctacgaggagctggctatgctggagtgaacgtacgtgaggcaaaagattcacgcttaacgtgcactttgtgtgcaccagttaatctataatatgtctatgtataactatatttatcggtatatctataatctacatactatatagaaatattcaaaaaatgaaaatttccaa

SEQ ID NO: 55440 - DNA, 1261 bp, Zea mays
  Clone ID: MRT4577_150556C.1
tttttttttttttttttttgcgcagctccaagaaactaacagaataccatacatgtacatatacaaagttgcaagcttctgacaacacagcacagcacacaacaatacaatacactggagttcttaaggtaaccattacaatcaggcagctaatcgttggtgcagtttcaacacatatatagttccgcttccgcataccgcaggaaactatatgcatgcatcgacattatttggggggcatcggaccggagcatctcatatccatccagaccgaccgtgctcgtcagggtccgccatgtcctcgttcagctggtccatgtaggcctgctgatggtaccgtgtctgcagggaaggatcattgccatggtgctgaaggagtccctggaacggaccaagaacactactcccactgtgcccgccttcctcccaggagacgtcgtggatcacattctgcggacttgtttcttgcagctttttccttaggtctttgttgagatcctgcaactcttgttccttgcttttgagatcaaagagctgatcgagtagcatctgattctttcttgacctgatatgcttcagggatacctctatctggttctccagctgctcgagctccttcatgctgagtgggcccagatcttcgccaaggatgtttctttgtgtagtctggagaaaatcaactctggtcctcaacttcaagtagtcctggtagttaatttcactctccagtggagcttttacttcctgtgtgctgtagttggagctgcggtatctctcgagtgttttgtacatgcatgaggagctggagaactcgaagaggcggccgcggccggagaatatgatgagcgcgacctcggcgtcgcacagcagcgacagctcgtacgccttcttgagcagcccgttcctgcgcttggcgaacgtcacctgccggctgatcttgttctcgatccgcttcagctccaccttgccgcgacccatcttccctgctagctagctgcttgttccgtcccccttctctctctacctctccgtcctctcttgctctaaaaaagctccctcgggagtccggcctgggttgctttgagcagcagagagatgcttatattgtgtgatcgtagtcgtcgtaccccttggggcgagatcttttttactcaagcggcgcttttggagagtccttctaacctaacttcttcctcgcgcgcgcccggacgcgtggtctcacacactcaagtaattatcgatcttctccggcccggccggc

SEQ ID NO: 55441 - DNA, 206 bp, Zea mays
  Clone ID: MRT4577_150557C.1
acccaccccaaaaaaaggaaaactcccgcgtctacacagaccgaaagccagactcacgcacaaaagcaaacaaccgatcttagcgccgcaacccgccctatactcccgaaccgagccaaaagacagagtatactacgccagggcaggcaacacgatacatcaactccgtaaagaacacagccttcccagaagacaacccccgcaca

SEQ ID NO: 55442 - DNA, 461 bp, Zea mays
  Clone ID: MRT4577_150558C.1
gtgtatactcccgcctccactgcctagtactctgccgactcaatgagaggggctggtacgtcgagcgcgcgctccacctgcgctcgacactatgcggcccaagtgagaataatgatcacgatgggcgatgctcatgactagacctcggagaatgagggaaatatctaattacctgcatcctgcgacctaggatggcgagcttcacctgcaccatggctggaacacgatgaaatgattgtctccctcttagtatacctgctttgctgtagacatacccaatggataccgtcctttttgattaagtctactatgttctgagactgggcgtatattgccatttgaggtgatctatatcatgctctgacgtcattgatattcctgtcactactatttacatcaatacaaacgggccctatcaccctccagatcctgctcttgttctctttagcgactgactgttg

SEQ ID NO: 55443 - DNA, 324 bp, Zea mays
  Clone ID: MRT4577_150559C.1
gaaacaacaatgcagttattttactgcctggtgggaaatttcaccaaggaacagagttcatcgaaaggcgtttgagcgagcggtaaagcccctccaaagttgctcacggaaactgaaattcgcaaaacaaaatagtataccctgactttaaagtcacttttattaggaacttgaaaaccctagaaaagaaactttggctccatggtgggagcaaaacgctggtcgagctcgcgccgccgcccattcaggggtccttcacgatgaagttctggcggctgatggggttcatgatgaccggcggcccggcgacacggggccaggcct

SEQ ID NO: 55444 - DNA, 107 bp, Zea mays
  Clone ID: MRT4577_15055C.1
gtagcaaaccaatcaaaaagaattgctacttctgtgaatgatttctgggcactagtggagcttttgaatggcaacttcccagggactacctttgtgagtccccactg

SEQ ID NO: 55445 - DNA, 755 bp, Zea mays
  unsure (1)..(755): unsure at all n locations
  Clone ID: MRT4577_150560C.1
gaaatatccgtgagagagacaagtgagatcatgaggaaaatcccacatatagataaacacccaactcctgtgagggcggtgtcatgaacctctccctcgcccttgatctcgcccttgtgacggcgatctctcccgcccccgctccctccatgccctccaccaccgtcaccgccgccaggtcgtctctcatccctgaaaaattgtgggaggaagatgcagagaatggagctaggtcgttcgatgctcaatcaatttctcggcaggcgacttcaattcctgggaatctgtggaagcaaaatcgaaggtacgattccaaatcgcaccatctatcaggatttgttggtaatggggattgctcgaacttgaatcaggaaagtagagcatgcaatggtggttccccgtttgaaattattgataaacggagtatgaaaatcaagcatacccctgtgatgctacgatggaaatttaggaggaatcaaagcttaaatccatggaaaaatcatggagatcagattcctgcatggattacgcctactcggggagatttagactcttctaaatttcgggattcagaagggcctattaaggaaaagtgtaaggatgtcgataaaataaatgatgaagctaaggggtccaggaaaaaaatgtgaacaaggtatattgaggggagtgaatgccgaaccagcacactcacaatgctcctcaaacctaaagagcanaacaccaagttcgccttgctgcatgcgtcaaaacca

SEQ ID NO: 55446 - DNA, 193 bp, Zea mays
  Clone ID: MRT4577_150561C.1
gtcatgcgaattattcgatcgctatcgtctctcaacaatggagggtaacagcatggggttcattcacgaggcaatcgacacattccataaagctgcaatggccatgggctatggcctctgcgtctacaaccaatggccaatctgtcgcctgtcgcagacctgctattcagatcactactttcaatctcaattc

SEQ ID NO: 55447 - DNA, 831 bp, Zea mays
  Clone ID: MRT4577_150562C.1
ggatcaaacattgcttttttatggattcagtttctttatatatactctctctcatatttacataaaaaagattgatgatcagcagatcctctaaaaagtggacgctaatcacaggctgacagacttttgtatgatctatctacaaactaagagaattcagaagaggaccactctgctctggatcaatgtcctgaacagagcttcaactccgttctcaagatcaacaatgtctaattctaactcgtgcaattgctcctcactcacaactctcctcttcggagtgtcttgaagacaagcgaccacttgctagaaagcaattatgatttgtcaagagatgtgacgtttctagcatggagactgcaacctctttggcttcagaaaataggttgacaagtgcaccgtctcctctcttgagagccatctgcatgtccatggtgttcatctagagttctccaaagctcttttgcatagtatggcagagaacgagcaagacaagtgagcgttccagctcttactccactgttttcctctgttgtgtaacttggttgctgggcaagcacgccagctcgcagatgcagttgtagactcctccgagctttctgaaaccaacacacatggttccaatggccacagatgatgaagaaactgttgtcttcacgctctggggctgcttatgagcatcaacccccacgcagagaggactacaaggcacgctagcagatctgagatggtaagccagggtagtaatggaaactgtgatgctatttttctctctagaaagtaagagaagagcagatgctgaactgcttcaatgcccggcccggccggcct

SEQ ID NO: 55448 - DNA, 189 bp, Zea mays
  Clone ID: MRT4577_150563C.1
ctacgactttgaccttctctctttctccgcggcctccgggacttcgttgcatcctccgaccccgcctatgaccccaacctcctccaatctgttaggtgggcgtgcgagatgttcccaacggctaatgaatctaatgactatatggtttcgcagtcgtactctgtgatgggcaagcttatttttagctat

SEQ ID NO: 55449 - DNA, 282 bp, Zea mays
  Clone ID: MRT4577_150564C.1
agaccaactagcaacatagaaagcacaatagtgtaccaacaatggcagccaaaatattttgcctccttatgctccttggtctttctgcaagtgctgctacggcgaccatttttccgcattgctcgtaagcttctatagcttctctttttcccccgtacttctcacctgcgtcgtcttctgtatgtgaaaactcaattcttcaaccctacatgtttcttcatttaatcgtagctttgcaactttcctttattactcttggtcctccatcattcttcactccta

SEQ ID NO: 55450 - DNA, 286 bp, Zea mays
  Clone ID: MRT4577_150565C.1
cttttgcctttcgcacactttaacttactttcttttctcttatgtcaggtccctcaaaatgtgcacttgatcatatgaaatcatgaatctgctgacatcaatgccctttttggcttcctccttgaatgcatcgatagaatgattgaaagtgatggaatattatcttgtacaacattcaatcaactactcaattatcttccactcgctgccatgatagaaaagaaaataatcttcatgcatctaggcataataaggtcgataaacacaacttagcaaattgacaaac

SEQ ID NO: 55451 - DNA, 357 bp, Zea mays
  Clone ID: MRT4577_150566C.1
atggatcttggatgtatttttatttttttttttttgggaggcatgcttttgagcttaacaaataactattcggttaaatggaaacccaccccctaccgttttaacccggaacccttttgccaaactccaaaccaattatgggcccccaaggttctttattgcttacatgaatggaaaatttaaggaaggatttttttgattatgggcctgaaaatttttttgaagatccttgtccagggaaaattcatccagaatgatctgaaaatgatggactttatgcttttttttggattagaactgttttttttgctctggttgaccaccaatttttttttaaaaccccaagacgctaatcaa

SEQ ID NO: 55452 - DNA, 302 bp, Zea mays
  Clone ID: MRT4577_150567C.1
tcgggcccaccagcagctggccccttgctggcggcggcttttcgggcgaccgatctaccggcggcggcaccatgtcgctgatcgccggcgaggacttccaacatattctgcgtctgctgaacaccaacgtggatgggaagcagaagatcatgttccccatgaccttcataaagggtgttgggcgccggttcttcaacatcagttgcaagaaggcccgcatcgacatgaacaagagggccggtgagctgacccctgaagagcttgagcgcctgatgaccgtcggggcccacccttaggcggtt

SEQ ID NO: 55453 - DNA, 359 bp, Zea mays
  Clone ID: MRT4577_150568C.1
cagggctttcaggagactcgtccgggctagacgccgacggcggcaagcggagccatttctccagcatcagaggtgacgacggccagaggtcgctcgacgcagtggtatgtcacaaacatagctcagagctgcgattcgttgtgcagattcattaatggtttctctctcaccccctcttgacaatttgcaggtaaaaacggccggcaaggaggccttccagtggggttagtggtgtgattagtctgttcagatctaacagtacgttggaggtccacaagtagtataaccctgtttctctcgacctcgacatgcagggttggcagccggagtctactcagggctgacgtacgcgctgcggg

SEQ ID NO: 55454 - DNA, 423 bp, Zea mays
  Clone ID: MRT4577_150569C.1
gtaatgagtaactaataatcttaaattatgtttgtttaagtctaatcgtaattagataccaggctagaaattgataccggtctatttaaatttttaccaccggtacttgagtcatcggccatggagtgtaaatcatcaacggcacccaaattcttgtgctgaagggagggatgacttctgaataacgcacgattaaaaagttattcatgccaatcttcctcggtttcattcatgattgttttctgtaggactgaatgtgcactgagtgttgggatgtccgcatgtttttctgcccggcattgtgatgcatgaattattttcagggtttcatttcatgattgttatttctagaactgagtccaccattcagtctcacaaagagggacatattccgccattcattctgtagtgggcgacaatttt

SEQ ID NO: 55455 - DNA, 169 bp, Zea mays
  Clone ID: MRT4577_15056C.1
attccggggggggcagatttagggggaaacatgattttactcatggggcggtccaatatgttgacaaaatcatcttgaacaggtttgtgtgagctgagctgccccctatttacggcacactttaaggtcgcttttccactctcagacaatgaccatacaatgaactata

SEQ ID NO: 55456 - DNA, 148 bp, Zea mays
  Clone ID: MRT4577_150570C.1
ctgtgctcggcttctttgccggccggccgatcacatgcatgttcagtgaggtcaatcacggcatagaccaccttagagcatctgcatcagaattcagacccttgtactctctcatgtccttttaaaaagaaaatttagcggctgcacc

SEQ ID NO: 55457 - DNA, 494 bp, Zea mays
  Clone ID: MRT4577_150571C.1
ccggccgggaaaagtactacccaggcaagcgatcgtcggagcagacagagacttcctcgcctccatcccatctcgacggcggcgtgtcttgagggggtagagtgacagcgtgccatgctgctacgccaatgacgcctagaacgcggcccctctcagcaccaagggcgcaggagcgtcgctgctcgcctcatactgcgcggtgaccgcgttctcggcgcccgcgctggcgctcgtggaccaggtatgtccaccgagggtaccggcctcagcctcgggctccctaacaacctgctggggtggtatcctcctgggggtcttcggactcatctgctccccctacaccatctacacctctgagcccgaccatgacaaggactccgcgcggcctctcgctctacattcacctcctctcctgataatgatctgactgttaacatggttggtggtcatcccgtgtaaatttaaccattgctattcgtatcctaacatccctc

SEQ ID NO: 55458 - DNA, 234 bp, Zea mays
  Clone ID: MRT4577_150572C.1
gggccggccaattaattccactggcagggttttactctgcagtttgagagagcaaaggggggcaatccaaggtttaattttggtgacctgaacgatttatctcccgaacaatgaaactttgaacagacgagcttttctaactgggcccttctactaaaagaaacagggggggcgccccaccgagacttaaaaaacaaaacaggctgggtgaaaaaaatgaaaggctggttactc

SEQ ID NO: 55459 - DNA, 650 bp, Zea mays
  Clone ID: MRT4577_150573C.1
ctcgaggccggccgggatcaaaacctaagggactgatccctagtctagcaggagcaatgccttcacacgatgcggcgccagtaacagaaaaaacaagatgagcagcaagagcaaggcgccttgtatgccgatcaatctcaccaccaccaactctctgcggccggggaggcagcctatcgggcaaagatccttgcccacgagaagacgtacccgcaccacggctcatcgtagctctcctgcctcaaatcctgagcgcctgcatcagaggataggtgtcacagaatcctgcacattcatcctctacatcaacaacatactttcactgcataacccctcagtactggaacacgtgcatgagaagtttgtgtatgcagtgagatctttctgagatcctacatagttgtttcatgagactgctgctaaaccaatagattgtgcgacactacacagtggatgacgagataggagaatgtagctcgagagaaaccgtcatatggttctgatcttaatgatcgcgaaagatctgaatgagctcgaaatgacctatattaaagatgcggaccgaagcgctgcctacttgaccgtgtctgtgaggcatactcatatgtatgctgtgccgattgatgatactctctgtgctgatgatcatc

SEQ ID NO: 55460 - DNA, 350 bp, Zea mays
  Clone ID: MRT4577_150574C.1
ctggccgcggcgctgccgcggcagcagatcggcgtggtgcagagcaagctggggccggtgtgcttccgggccctggcgtacggcgtcgggctggcgctcgccgcgcacctgctggggcgcgagcgcgggtccctggcgtcgcgcgcgcagagcctcaacctgctcgccgcgctcggcctggtcctcgccaacatgctgctggtcgagccgaaagccagcacagtgatgtttgagaggatgaaagtggagaaggaagaaggccggggacgtgacatggtggacattgtcgacccgaccgaggtcaccgcggccacgcctaccggtggcaccaccaccgttccgactgagga

SEQ ID NO: 55461 - DNA, 442 bp, Zea mays
  Clone ID: MRT4577_150575C.1
gggggcggcccccccaattaattaaagggggttgaaatttaaccgggttttccttaaaaaacgggtttaaaaaccgcccgcaaagtttggcttggtggggcggtgaactaaatccccgggcgatttttttaaaacgcccccctccggttggggggggcctttccccatccctttgaccctaaaaaaaaaccaaccgttagggtggggcccctttgcctgttttgtggggcctcaaccttttgggggggtttgcccactgggtttttcccatgccgggggctgacaagcttgcccccctttggtgatccgaatggccaccggcggtgcccctttcaaacccagttgaaagcatccactgttgaaaacgggggggggggggggtccctttggaaaaggggttctggcaccttttggtcgaggggggcgggccccgacccccaag

SEQ ID NO: 55462 - DNA, 304 bp, Zea mays
  Clone ID: MRT4577_150576C.1
aaaaacaatttgggtttcccccctattaaccggggtttcccaccaccatatgggtttttgctccccaaacaaaacaccagccgggggcagggttcaccaagccctcgggaaaaaaaaaaaaaaaccacccagccggaaaaaaaaaaaggaaaaacatcgccgacctaaaaaacatgggccaaaaaacacacggcctattcgcgaatcataaatagaccaagtattcgtatttaaaagggggccttaactaacggggagaaccgggggggggggttatttaaaaccccgcccaaaaaaccccccc

SEQ ID NO: 55463 - DNA, 227 bp, Zea mays
  Clone ID: MRT4577_150577C.1
ttttgagtttatcataagaattttatcagatagagagatgggggtttattattaaccgcaaacacccaaagcatacgtcgcaacatcctatgagtatgcttgttgcacgggagccaactcattttgactaacaaatggcatcaaatgcccccattgaaaaggggagatgggtttcgttcctgcaccggcgaaaaagatgacttttcaggtgacgggcatctgccatt

SEQ ID NO: 55464 - DNA, 316 bp, Zea mays
  Clone ID: MRT4577_150578C.1
cccgttccggtccggacactgtcccggctcgccccacgcgtgtttgttagatcgcgagcggccgaccttgcgacgtagggttttttcccaattcccccccttttcccatttctcaccaccgtcgtcgctcccccggttcaacatcaccatgagggagcgcatctcgatccacatcggccaggctggtgtccaggtcggaaacgcgtgctgggagctgtactgcctcgagcctggcttttaggctgatggccggatgccccgtgacaagacctttgggggaggtgttgatgcttttggcaccttattcagtgagact

SEQ ID NO: 55465 - DNA, 213 bp, Zea mays
  Clone ID: MRT4577_150579C.1
atgaccgcggaggacggcacatctccgtgggcggggatctctacgcaaccctcaatgggttggatcggtcgctcgccggtgactttcggtagtggtgtagtcatgagcgccgccgctcggtctggctcagggaagaagggaacgtcgtggccgttgatggggttaatcaacggtgtgaattgggggctggatatcgggcagcgggggccgtag

SEQ ID NO: 55466 - DNA, 283 bp, Zea mays
  Clone ID: MRT4577_15057C.1
cggacgcgtgggaaaaagaatcaaaaatttcagtttaaagaaaagaaaagaaaaaaagaggaaagggctaagccgaatgaatggaaaaggtaaaaaaaaaaaaaaaaaaggcgggtctacttaaaggtgccacctttacggtcatgataatgcaacgaattacctttttgctactggtcctgaaaaataatggagtctgtctataatctcaactacatggttggtaaaaccttgccgtgaaacaattatctgggctactgttaattacatatttttgaggcta

SEQ ID NO: 55467 - DNA, 500 bp, Zea mays
  Clone ID: MRT4577_150580C.1
agcgtccgttgtttcttagttacgaaatttcctttccttccaaaaaaaaaaaaaaaaaaaaaaaaaaaaaaaaaaaaaaaaaaaagaaaaaaaagaaaaaaagaaaaaaagaaaaagagaggaaaaagaggaaagggaaaagggggggccgttacggaagggccaaggggtggggtcgagcacgggagggggggggggaggcacggggcgggcaaccaaaggcggtatgggggcaggtgggttgagcacggcggcgctggggatgggtgggggggaggctccagtgtgtgagggaggagcacaagaccggtggcatcgtgggtgggttcggcagatagggctgcagctagtgggtggacgacgggatgggcggttggagggggaagggaatcaaggcttagagcgaagataagatgcgcggaggccggaaggattaccagcacgttacggggacgattggcggcgcctatgggcagtatggacacaccgttagtgcctac

SEQ ID NO: 55468 - DNA, 202 bp, Zea mays
  Clone ID: MRT4577_150581C.1
gcgggtgcaggttcgttacaaggtaaatgtcaattggacgggcgatgtgcccttggacagccctctgtgtgcatcaggtgcgccggtgcgctggcgactggttctgaacgaagtgaatcagtgcgctctgagactgctgatctggacgtgttaccatacgtgttggatctcgaatgaggaccgcagcatggtttgagctatt

SEQ ID NO: 55469 - DNA, 1312 bp, Zea mays
  Clone ID: MRT4577_150582C.1
acacgaaaaatctcggcaaccgccgctcctccaaactcccaatcccgctcatccctccctcaaacccacagccgctgtgctttgccctcgtcacacgcccacaccacacccacacagcatccgcccttgcttcgtcgtgtgtcgtcgttgacacgcgccgtcgtggctccgtgtccctcaccattcctcgtagcgatgcgctcgccgcctcttcctgccgtcgtcgtcgcgcgttggagcactaccactcgccggagaagcgccgccctacgcccaagaatgcgatccatctccaagcttcaaggaatcgacagtcaagcttcgtcgaccaagtgatcaagctcctcgagctttacgagattgaagattgaagattctgagcatctgtttggtgaaggttgcctttggtgtgatctatgcttaggtaaaaagaaggcgtcgaggcgaatctccaggagttccaggacttcgacaagttcgaggattaggctagcgacctcccccagtcagctgcctgtgcagccgaggacttcttttctgctatgcttgattaagagggttgtgtctgcacccagttctgcctgtggcttgggctagtgtattttcctactgcgtttcttaatttggctctctcgagcttgtaccccggtattgtaataattttatctaaactctgtactatttgaagtaaggaatgtgtttactagcctcctgggactagtaattgtttcacatttgagtcccaaaggatcaggacgcttcaggcagcaaaccaaatagccccctagtgacataggctcccacacgaatggggtctcggaagagataaaccgaggcaaacctccccccgcaaatgtggagatgctacttcaaacccgcgacttgataactcagtgagccaactctcaccactacaccagggctccctaattattttattacaaagagatatgcgcatacagaacaaatgaacaacatgctatggattttggcctgggaataggactcgtaacagttaaatcttgtgagctataattttagaatgaaaaaggttgtgttctacactaggatataacagagagagacgagatgggaaagaaaaaacggaaggtcccttgggccggagcaccctcttcctcccatgccgacgctcaggtcgcccatggcgcaaatcgggatggcacgcgaatggggggttgtgggtcgtggcctccggctcggctggtcctcaaggcccaaggagttgtctcgacctcttgcatagcttttccgagttccgatcgctctcgttcgccatgggagggttggcgcc

SEQ ID NO: 55470 - DNA, 259 bp, Zea mays
  Clone ID: MRT4577_150583C.1
tttttgatcatttttgtcttcttattttttgtaattgtttttttgtattttccccgcactggaacacaatttttgacattaacgaaaaaatcggccacagaattgggcgcaagggccagcagcgaacataacactggtaggccaaactgttggggctttgttaacttaatttttcgacccttgcaattacaccagcatagggtgccacaacagtgccagaaaagaaaacctgggatccacaaaacaaaccctaacattt

SEQ ID NO: 55471 - DNA, 450 bp, Zea mays
  Clone ID: MRT4577_150584C.1
ttgggtacctcgaggccggccgggaaggattcgaaaaaatactctaacattatccattttccgagaaaaggacacatggcatgggtcgtatcgcttctcctctagcccccgagtcagctccgtcgagacggcacattgcgactccgtagcattcccgcaccggagggtgctcacgcgcgcgccgccaacaacgcaacccctcgtgagctcctggaccccgtgccgaggggctccaacagaaacgacaacacagcgaccgtgagaagcggcagaccgagtcgggggcgcgatcgccgacctatacacctacctccatggaccgcaacagattgcgattcacaacgcactcagttccccttcgatacgcgagctgctaggaccactgggtcacgcgatctcggatattgcagtcaccgcctgtcacgcccttcctcctattcctcacgctct

SEQ ID NO: 55472 - DNA, 1635 bp, Zea mays
  Clone ID: MRT4577_150585C.1
gatgccaatgaagtcacgtgatggtggtaggggcgcgacgacggatgcttattgcgttgcaaagtacggccagaagtggatccgcacacgcaccattgttgactcgttgtgcccccggtggaacgagcagtacacatgggacgtgttcgacccctgcaccgtcatcactgtaggtgtgtttgacaattgccatgttgacggcgcatctgggagtgctgctcgtgacagttgcattggcaaggtccgtatccggctctcgacattggagactgatagggtgtatacccatgcctaccctctgctgatgctgcatccaacgggggtgaagaagatgggggagcttcacctagccgtgcgcttcgcctgtggcaacgccggcaacatgttccatgcctatgcacacccattgcttccgaagatgcactatgcggagccactcctcgtgcgccaggtcgagacccttcggtgtcaggccaccaacgtggttgcggcccggcttggacgtgccgagccacccctcggcaaggaggttgtcgagtacatgcttgaccatcgctcaagcctgtggagcatgcggcgcagcaaggcaaacttcttccgcctcatcaatgtgctctctggccctgttgctatcgggaggtggttcgagctcgtccgctcttggcagcgcccggtgcactcatgcctggccgtgttcacgttcctggtgttcctcgcaacgccggagctggttcttccgacagcctttctggccatggcgttcgctgggctctggaggtacagaggccgcccaaggcacccgcctcacatggagatgaggctgtctcacgcggacggagccaccgcagacgagctggacgaggagttcgacacgttcccttcgacccgcggcgacgccgtgcgtttccggtacgaccgcctccgcagcgtggccgggagggtccagacggtggtgggcgacatcgcgacgcagggcgagaggatgcaggccgccctgagctggcgtgacccgagggcgacgctgctcttcgccgtcgcctgcgtcgctgccgcggtgatcgcgtattgcgttcccacgaaggtgatggttgggatgtggggcctctacgccatgcgtccgccgaggttcaggagcaggatgccttccccgctgatgaacttcttccgaaggcttccttcgagggctgacatcctgctctgatccttcctactgctgtctggccggccggccggctggcagtggatagtcagtttggccctctgattcagttaggcggttttggcaggaaggagaaacaaattagtctgctgatgtggtggttgttagcttgatgtcgtttaccctgttggtgttaggtattgcagtactgtgtgctatgtgatgcgtttggtagtagttagttgtaggctttgcagtaccagcagctgttcttgtgcttcggcttaagttgtgcaatggctagctgagtagaagtaggtgatgttttcggcaaactggtgagatcatgagtttcagtttaactagagaactgcttggatctttatgccctttgctttatctaaaaactgtctgctggatgccggttgcccaaagtatcagtagcaaatgcagaatctgtgttttttctttacccc

SEQ ID NO: 55473 - DNA, 649 bp, Zea mays
  Clone ID: MRT4577_150586C.1
tattcgctccctcccccctctcccgtgatgtcacacgaaatggggggcggtgatgagaacgcgacttcgagaagaaccgaaaaaagagggcgcacatatgcacctcctccaggacgatcacgaagccaagaagcacccatcgaggccgagtgaactgcgaaggaatgcagcaccgccgcttcctcttcgagaagagaccatatcgggatacttcacgaaggaagcgatgtgtctctttcataatgtcgaaacaatgttactgaacccccgcccaaagaccagagcctctgtttcatggggtccgactgcaacgtcatgacggctacttctacaaatcaccaacctatcatacgacacagaaatcatatacttgattgtgttctataaaggggagatgcctcccgaacccattgtcgacaaggacaaactcatctacgaggctcccgatacaaatatcgatgccttaagcgacgctgacttgctcaccggctaggattcaggccatggtcgcctcctgtgtgagaatctatatctgaactgatagcgctttcctgcctcagcaatttgtgttaagaaaacccgtgaggtgtactatatgtggagcctgctctgatgagaagcgcttatgctcactgtccatgtctcgctc

SEQ ID NO: 55474 - DNA, 492 bp, Zea mays
  Clone ID: MRT4577_150587C.1
gtttgccaacgactcccggatccactgtcgctctcgctcccttccctcccacgcaatggggaccgatcgcctccgcctcgcgactgctgctctccgcgtgcctctgctccgcgtgggcgcgcccacgcctctagacgaccatccgcctgccgaccgagcgcacggcgcccgacgaaacggacgacaacgccgccgggacccggagggccgcgctcatcgccgcctccaacggctactacaactaccgacatcagccggacatatgccatgcataccggatcattccgaaggtcgcccataaggacgaaaacatcctctgctgtttagtaaacgacatcgcgcataatacggaaaacccaagccccgcagcccacataaatcgtgcccagggcgtcgacgtcaatgccggcgcggcaaaggattacacagggcgagaggtcaatatcgacacactgcgcgatgaaccgcgaggcaacaaaactgctcccaggg

SEQ ID NO: 55475 - DNA, 714 bp, Zea mays
  Clone ID: MRT4577_150588C.1
gcgggtgccgcctgccgccgccgcgtctgcttcttcgcgcacgccgcggccgagctccgcgccgccgcgaatcccaaggacgggtgctctccgctctcgctctcgctctcgccaaagtccaccctgcaggcggcgctctgggagtcgccgccggtgtcccccgtggagggccgcaggtgggtcgacgagccgtcggaggacgccgacgccgacaccgagatggaggagctgatgctcgcgatgcgggagctcagcttcaggaaggcccaggcgtcgccagcgccggttctgcctgcagtcacagaggacgacgggccggacttggggtgggtgtcggagctggtgatgtaggcgaggcatatgccagcgcctgccccggtgccgaacgcccccgaaatttttttttaaaggcccccaagggggggggggcccccccctttcccaaggggcccccccccccgttggggaaccttttttaaaggggggtttttttttaatttttcccggagggggcgctttttttttgggggaaaaaaaacaatgggggggggattttttataatcccccctcctccggggggggggggggggcccccccccctttttttttttttttgggaaggggggcccccccacaaaaaatttttgtggggggggggtttttttttttttgggggtgttatttataataaaccaaggggggggggtgtgttt

SEQ ID NO: 55476 - DNA, 282 bp, Zea mays
  Clone ID: MRT4577_150589C.1
gtgaaatcgagttccgaatctctaactcgagctatttggctatttgatgcgtactaatttctactccgttttctagatccggccctgggtactagtgtttcgagatagcatctaatctgaattttttcgttagctgttagttatccgttctattgtgcagcaataccgatatgcagatttagctcgtagctctgtatgttcctccgttgctgtcataacggttataattgcgattatatggcgagctttacaatcttagttattatgatactctgctggtcg

SEQ ID NO: 55477 - DNA, 441 bp, Zea mays
  Clone ID: MRT4577_15058C.1
gaccacaaaaattcacatttttattgggaaacccaccggaaaaaaaccagggaccctgggaaaaaaggggtaccggccggccccagaccccaagggaaaccggggggccaaccaaataaaaaactttttaataaccacctttttatttatggaaaaaaaggaacgggggaactacgggaaacacccgttggtttggttttttgggggaaaacctggcccagaactgaacgaaataaaaggaaaaggcggtggggaagcccttgggggggaaccccggggtaaccccctttgccgaaggggtggggaaaaacaagggggaagggaaacgggccccccctgaacggtttttgaaacgggggtccctggttaagggccccacacccgtttttgaatctgggaaagccgccccccaaaccgttgaaacccctctgggccttgggg

SEQ ID NO: 55478 - DNA, 1113 bp, Zea mays
  Clone ID: MRT4577_150590C.1
gccggccgttccgggaaacagatccagaactcctcctgtcggccagagtcctagtagcactctagctagaacgaaggtagctatatatcaagattcaaacaatggcgtccatctcctcctccaaggtgctcgcacttggtgcgctcatcttctccttccttgtcacgtatgcctcgtgcgctagaccggtcaacttcacagcctcagacttcaccgccgatcccaactgggaggctgccagagccacctggtacggcgcgcccaccggcgccggccctgacgacgatggtggcgcgtgcgggttcaagaacgtgaacctgccgcccttctccgccatgacgtcgtgcggcaaccagcccctgttcaaagacggcaagggatgtggctcctgctaccaaatacgatgccagaaccaccctgcctgctccggtaacccggagacggtgatcatcaccgacatgaactactacccggtggccaagtaccacttcgaccttagcggcacggcgttcggcgccatgtccaagcccggccgcaacgacgagctccgccacgccggcatcatcgacatccagttcaagagggtgccctgcaactaccccgggcggaaggtgacgttccacgtggaggagggctcgaacgccgtctacctggcggtgctcgtcgagttcgaggacggcgacggcgacgtggtgcaggtggacctcatggaggccaactccggctactggacgccgatgcgcgagtcctgggggtccatctggaggctggacgccaaccacaggctacaggcgcccttctcgctgcgcgtcaccaacgagtccggcaggaagctggtggccactcgggtcatccctgccaactgggcgcccaacacctactaccgctccatcattcagtactagctctctgctactgcgcctcgaccgattcggtgtcatttggcttcatttgaactgtatgtaattgtatcttcacgtgcacaggattacggtgccttaactagttagtcagtgagacgtcaagaatgacagtaggagatggatgaggaagcaagtttggatgtgtgcttcctctcttacgttactgtcaatgcatgaattaacgtgatca

SEQ ID NO: 55479 - DNA, 1192 bp, Zea mays
  unsure (1)..(1192): unsure at all n locations
  Clone ID: MRT4577_150591C.1
cattgggtacctcgaggccggccgggatcgacacacagatcgaacttctcctgtcgtctgcctaccagtagctagctctaatacatagcagccctcgctcgcaaggtactgcactacgatggccgccacctcctcctcctcctcctccacggtagttgcacttgcggcgcttctcttcttgctccttgtaacgtgtggctcgtgcgcgagaccggcgagctttaacgcctccgattttaccgccgaccccaactgggaggctgcccgggccacctggtacggtgcgcccaccggcgccggccctgatgacgacggtggtgcctgtggattcaagaacgtgaacctgccgccgttctcggcgatgacatcgtgcggcaacgagcccctcttcaaggacggcaagggctgcggctcctgctaccagatacgatgccagaaccacccagcctgctccggcaacccggagacggtgatcatcaccgacatgaactactaccccgtggccaagtaccacttcgacctcagcggcacggcgttcggcgccatggccaagcccggccgcaccgacgagctccgccacgccggcatcatcgacatccagttcaagagggtgccctgcaactaccccgggcagaaggtgacgttccacatcgaggaggggtccaacccggtgtacctggcggtgctcgacgagttcgaggacggcgacggcgacgtggtgcaggtggacctcatggaggccaactcccgggtcgtggacgccgatgcgcgaagtcgtgggggtccatctggcggctggactccggccaccgcctcgccgcgcccttctccctgcgcatcaccaacgagtccggcaagacgctggtggccaaccaggtcatcccggccaactgggttcccaacacctactaccgttccatcatccagtactagctctcnnnnnnnnnnnnnnnnnnnnntagctctgcgtccttgtgcttgattagtttggtagtgctattgtattgctgcatatgcagcatgggactgatgagcactgtgcgaggtgcctcagtcgattattactggtagannnnnnnnnnnnnnnnnnnnnnnncacggcggagttggagactgggaacgaaatggaggaaggccaagttaatttgcagatgctttcccgcccattgtccatgcatgtaatgtaccaggg

SEQ ID NO: 55480 - DNA, 1171 bp, Zea mays
  Clone ID: MRT4577_150592C.1
cattgggtacctcgaggccggccgggatcgacacacagatcgaacttctcctgtcgtctgcctaccagtagctagctctaatatatagcagccctcgctcgcaaggtacgatggccgccacctcctcctcctcctccacggtagttgcacttgcggcgcttctcttcttgctccttgtaacgtgtggctcgtgcgcgagaccggcgagctttaacgcctccgactttaccgccgaccccaactgggaggctgcccgggccacctggtacggtgcgcccaccggcgccggccctgatgacgacggtggtgcctgtggattcaagaacgtgaacctgccgccgttctcggcgatgacatcgtgcggcaacgagcccctcttcaaggacggcaagggctgcggctcctgctaccagatacgatgccagaaccacccagcctgctccggcaacccggagacggtgatcatcaccgacatgaactactaccccgtggccaagtaccacttcgacctcagcggcacggcgttcggcgccatggccaagcccggccgcaccgacgagctccgccacgccggcatcatcgacatccagttcaagagggtgccctgcaactaccccgggcagaaggtgacgttccacatcgaggaggggtccaacccggtgtacctggcggtgctcgtcgagttcgaggacggcgacggcgacgtggtgcaggtggacctcatggaggccaactccgggtcgtggacgcccatgcgcgagtcctggggctccatctggaggatggactccggccaccggccgctgcaggggcccttctcgctgcgcgtcaccaacgagtccggcaagacgctggtggcggaccaggtcattccggcagactggcagcccgacaacgtctacagctccatcgtccagttcgagtagtagtatatgccatgcgtgcgtcgtacatatagatatatatacactacacacacaacgcagtgtcagcagtaagtatatgcatcatcattaattccatggacggatcggatcgatgatatatatgtacgtaaagatacgatagacaggcatcagacgacgtctctacctagctagctagctagctgctgaatacatacatatacttgtcgatcgagacgccgcttgtggcgtccgtccagtgcatc

SEQ ID NO: 55481 - DNA, 1146 bp, Zea mays
  Clone ID: MRT4577_150593C.1
tgggtacctcgaggccggccgggccgggatcgaaaacaacaactcctcttgtcggccaaagtagctctactagcagctagcaactatggcgtcctcctccttctccaaggtgctcgcacttggtgcgctcatcttctccctccttgtcacgtatggctcgtgcgctagaccggccaacttcaccgcctccgacttcaccgccgatcccaactgggaggctgccagagccacctggtacggcgcgcccaccggcgctggccctgacgacgacggtggtgcctgcgggttcaagaacgtgaacctgccgcccttctccgcgatgacgtcgtgcggcaaccagcccctgttcaaagacggcaagggatgcggctcctgctaccagatacggtgccagaaccaccctgcctgctccggcaacccagagacggtgatcatcactgacatgaactactacccggtcgccaagtaccacttcgacctcagcggcacggcttttggcgccatggccaagcccggacgcaacgacgagctccgccacgccggcatcattgacatccagttcaagagggtgccctgcaactaccccgggcagaaggtgacgttccacgtcgaggagggctccaacgccgtctacttggcggtgctggtcgagttcgaggacggcgacggcgacgtggtgcgggtggacctcatggaggccaactccggctactggacgccgatgcgcgagtcctggggatccatctggaggctggacgccaaccataggctgcaggcgcccttctcgctgcgcatcaccaacgagtccggcaggacgctggtggccaatcgggtcatcccggccaactgggcgcccaacacctattaccgctccatcattcaatattaagctctgctactgcgctctgattccctgtccattgccttattcgttggaactgtatgtaattgtatcttctcggtgcatatgattgcggcgtgcctcaactagttagtcagtgagacggacgtcaaggttgacatagtaggagatgcattcccgctcattttgtcaatgtatgaatcagtgtgaccaaggctatatataaattataagcagcttctcaatggcattccgtaaaaaaaaaaaaaagatatgaacaaaaa

SEQ ID NO: 55482 - DNA, 1242 bp, Zea mays
  Clone ID: MRT4577_150594C.1
tgggaccctcgaggccggccgggccgggatcgacacacagatcgaacttctcctgtcgtctgcctaccagtagctagctctaatacatagcagccctcgctcgcaaggtactggcgtactgcactacgatggccgccacctcctcctcctcctcctccacggtagttgcacttgcggcgcttctcttcttgctccttgtaacgtgtggctcgtgcgcgagaccggcgagctttaacgcctccgactttaccgccgaccccaactgggaggctgcccgggccacctggtacggtgcgcccaccggcgccggccctgatgacgacggtggtgcctgtggattcaagaacgtgaacctgccgccgttctcggcgatgacatcgtgcggcaacgagcccctcttcaaggacggcaagggctgcggctcctgctaccagatacgatgccaaaaccacccagcctgctccggcaatccggagacggtgatcatcaccgacatgaactactaccccgtggccaagtaccacttcgacctcagcggcacggcgttcggcgccatggccaagcccggccgcaccgacgagctccgccacgccggcatcatcgacatccagttcaagagggtgccctgcaactaccccgggcagaaggtgacgttccacatcgaggaggggtccaacccggtgtacctggcggtgctcgtcgagttcgaggacggcgacggcgacgtggtgcaggtggacctcatggaggccaactcccgggtcgtggacgcccgatgcgcgagtcgtgggggtccatctggcggctggactccggccaccgcctcgccgcgcccttctccctgcgcatcaccaacgagtccggcaagacgctggtggccaaccaggccggcccggcgggctgggaaccccaccccccgtaccgtccccccgtccaagctctcggcggccgccgcgcaccacgataggacagcgccgttgtgccggagtggttgggtagtgcggtagtgctgctgcatatgcagcatgggactgatgggcccggtgcgcggtgtgcgcggtggctcagtcgaggacgggggggggggggggcggggggcgcgcggggcggagttggagactgggaacgaaatggaggaaggccaagttaatttgcatgatgctttcccgcccattgtccatgcatgtaatgtaccagggcgattgaaattataaattattaatggtgtgtttgtttagggga

SEQ ID NO: 55483 - DNA, 1273 bp, Zea mays
  Clone ID: MRT4577_150595C.1
gccggccgggccggcatcgagacacacagaacttctcctgtcggcctactaatacaactagctgccctcttaggtatactgtgatggccaccttgtcctccacagtagtagttgcacttggtgcacctctcttcttgctccttgtaacgtgtggctcgtgcgcgagaccggtgagctttaacgcctccgacctcaccgccgatcccggctgggatgctgccagggccacctggtacggtgcgcccaccggcgccggtcctgatgacgacggtggtgcctgtggattcaagaacgtgaacctgccgccgttctcggcgatgacgtcgtgcggcaacgagcccctgttcaaggacggcaagggctgcggctcctgctaccagatacacagtagcggccggtgatcctttgtttgcctgcctttcatggaaacggaaaatctggagccgctttacttgactttccagatacgatgccaaaaccacccggcctgctccggcaacccagagacggtgatcatcactgacatgaactactaccccgtggccaagtaccacttcgacctcagcggcacggcgttcggcgccatggccaagcccggccgcaacgacgagctccgccacgccggcatcatcgacatccagttcaagagggtgccctgcaactaccccgggcagaaggtgacgttccacgtcgaggagggctccaaccccgtctacttcgcggtgctggtcgagttcgaagacggcgacggcgacgcggtgcaggtggacctcatggaggccaactctgcgtcgtggacgccgatgcgcgagtcctggggatccatctggaggctcgactccggccaccgcctcaccgcgccattctccctgcgcattacgaacgagtccggcaagacgctggtggctgaccatgtcatccccgccaactgggtgcccaacacctactaccgttctatcgtccagtattagccgctcccagctgctgcgccggccggataataatatacaattctgtgtcattgtgctttactattagtttggtattagtattgtatttctgcatgggactgatgaggcacagagctgaagtgaggtgcctcactccattgctaatttgctactaggtgttaagttggtgtgcggcttcagggagttgaagactgggaagtggaggaagcagtgctttttcccgcccattgtcgtgaatgcatgtaccagtgcgattaagattatataaattatattgacagtaaaaaaaaaaaaaaaaaaaa

SEQ ID NO: 55484 - DNA, 329 bp, Zea mays
  Clone ID: MRT4577_150596C.1
aagaaaaaacagggaaatttgttttattttcgcccgggggatacctggaatctgaaaatttgggaatacggggcctttttttggggggggggttcccactttaaatatattttattggtttcccacttaccggggggggtcacaagggaaaatgatttggggggccaataatttatttctaaaggggccatcttttaaggggatagaccccatttttaaaaaaaaaaaggggggggtgttttggtttgaaaaaaaaacccaaggggcttccgacaaagaagacttaataaatttgggggggaaaaaagccggggaacccttccacaaaa

SEQ ID NO: 55485 - DNA, 437 bp, Zea mays
  Clone ID: MRT4577_150597C.1
ccggatcgacggacgcacccacgcgtccgcggacacgtgcgacgactattcggctgtcgctatggactccgagtctcagggcgttgagcgacttccgatgcgcacttagatgtctccgtccgagtaccactacgcctctctacaagcttacatgctcatgctgaaacttattcatctcaagctaagattctacgaccagcatagggggctgtcggcgctaggcccatacatgggtacatgcatctggcagtgcatctttggaagatttgatcctcaaactgatctagctacatcagactctatcgatactacgacgccatataggtatcgacttgtcacgccatgctgcagatcgagagcactctcgctactatgctgaactgctcatacgatcaggcgtagtatcgaattcagagctgcataatctgactagtcat

SEQ ID NO: 55486 - DNA, 280 bp, Zea mays
  Clone ID: MRT4577_150598C.1
ctgttcttcttttggtggggtttttttttttttggtttctaaaaacaaaagcgaaacggcttggttttttccattctccaaaactaacccctaccttaataacctgtgctgaaaggttttttcggtaaactttggaccttcaattttgctggtggacatgttccgtaacttttttattttctttggccccttccccaaagattgaaatttcccccaccatttatgggtgtttccgggcccctagatttagtggccttgggtcattaaactgccgtccttt

SEQ ID NO: 55487 - DNA, 130 bp, Zea mays
  Clone ID: MRT4577_150599C.1
cccgggcaggcaccggtcttttttcccgggtctaccacacccctctctcatcctctgaagaaaacggtgatccactgtgtcattttaaaacatatgcctgctgtgacaacgttaacccgattggtgttat

SEQ ID NO: 55488 - DNA, 467 bp, Zea mays
  Clone ID: MRT4577_15059C.1
cgttgctgtcgcccaattatacaacggccagcaagcaagtgctgacgtgataagatgacaaacaacaccaaaacctatagcaaaagtaggaaacatgaaggacaaatctgcagcacaagcctggcctaaccctggggcctaacttctcgatgcaactgcagaagagaactaagaagttttttgttgcggtattgttctttcgtttcacgtaatatatgaaggagatttatcaacaagacaagtgagggaatcatgaggtcaacaatagctttctcatgagttcgatctagaagtaattctgtggtagaactcagttcagccccttcatcaacaaggtaatcataactatttgataaacgctcaagcatagacttgcagttcatcaggacaacatatataacagctatggcgccttcttcaaaaagggatgacgccacaggcttatcatccgaaataaatgccaagat

SEQ ID NO: 55489 - DNA, 441 bp, Zea mays
  Clone ID: MRT4577_1505C.1
gctgatcatccatgcacaatggtggtccggacgaagcactggatcataccagactacttcgcttggggagtccacatatcgctgctattcctaaaccgcttcgcagagctattgatccacaagccgggcgaaggcttcctcctttggctcctcgccaccctgctggctcctttggtataactaaccaaataatccatttttctcctgttccttttagaatcttaattacacgcagttgatgcgggttttttttttttttgccagagatggctgttctcgaagttcgccgagagctactacgccatcccgatgaggaagcacggcatggtgccggaccacagtctgttccaggcgttggccacgtgcctgatcgcgatccagccgaaggggttctacgagaggctggaagaaggcagcatcgttctcaagaggtcgaagacg

SEQ ID NO: 55490 - DNA, 306 bp, Zea mays
  Clone ID: MRT4577_150600C.1
ataaataatacatagggagggttttttttttaaggaaactatccaatttttttaatttctatttttttttttttcccgggagggatcaacgttaacaagtttacaataggttcctccaattaacacaaaaaaacaaaacggggtcaaatgtaataaaagctaaccccaacactttgggggtattattttaccagttttcccaaaaattaaaaatcccccagaggcttaaaaaaactctccacgggatttggctaaaattcatggccttcataaaaaccccaaaccccccccccctttttttttttt

SEQ ID NO: 55491 - DNA, 573 bp, Zea mays
  Clone ID: MRT4577_150601C.1
gccggccggtccgggaagcacgtacagcaaaggcactccactcttctatccagcataagagaccgagaggcaggagtcatggccaccgtcagcgacgccgtggtgacctccatcgttgcccgcgccacgatcgtgaggcccaatgctctaaggctgcctgctatgatggcgaggagccagaggttgcggagcagctacgccaaggatgccaagaacgcggccccagacaacaccaaggtggcaggcgcagtcgctgctcgccgcagagggcgcgtggacctcgttggcgaaggcctcgctgtggctcgtggactagcccatgtccacggaggtcaccggtctgagcctcgtcctcaacaaccacctgctgtggtggatcctcctgcgattcttcaggctcatctggtccctctacaccatctacacctctgacctcgactatgacgaagatgccgacggactctcactctagatccacctcctctcctgttaatgatctgaatgtaggcctgagggccgccatcggtgtagaactagacgtgcctacttgcatgcaagatccatcctctcctg

SEQ ID NO: 55492 - DNA, 143 bp, Zea mays
  Clone ID: MRT4577_150602C.1
gccgaggacctggcctccctcaaaagaattaccctatcgtcagcaagtgctatgggtaacacccgaaaagaacacaataattacctgggttaaaacttacaacacaacacaaggggatgggtcctccccaacccggtttaaaa

SEQ ID NO: 55493 - DNA, 1345 bp, Zea mays
  Clone ID: MRT4577_150603C.1
gcaaggcactctcgatctactactggaaaagctcagaatgctgttgtcaaggcaagcagcaaggatgaacctgatagcaccgacaactcaaaagatgaactgggagagcgagcagaggagagaacagacttctggtgacgaacagactatgggcagaccaaaagttcatggtgacgaacagacaccagattcttctaaacagaagcaagaactgacttttcttgacaagcagaccaaaagttctgagcaattggtatcttgtgatgtagaagtacaagaaccagtgacttggaactgctaacagatataagcgcagaattcaaagaaagatcacgaggttggttcttccaccggatctgagatgactgaacaacccaaggttgttaaagacaatgagagtctagtagcatctgagttatccccagagacaaatgatggtgataaaaagcagctaacagagtctggcaatataactgctgacgaatcatcaaaaccaatcgatactaaacctgcttctgttaaaccaaagaggggccgacctccagcagcaaagtctcaggagaaaaagcctgttggaaagaaacaggcatcaaacctaaaatctccaaaacttgatcctgtcactgattctgtagggagagctaccaggcaactgaataatgatgttgcaaagtcttcatcaactaaggctgttgatggagaatctgggaagaagcaacataaaaccagtatgaaatttcagaaagaagatgccgcctctgataaagacaccgatgatgatattagtttgaagacccctgtatcgaagaaaaacaaaatgcttgacaaaaaccttattggctcaagaattaaagtttggtggccagatgacaaaatgctgatgatcaaccttaatttgtcatcgggcgctcgggaaaaaacaggggctggggcgccatggggaagaacctcggctgacagaaaacagggcgccgagggagatcagggagaagctcggcgcacagagctccacggcgagctagagcaagagcatcggggcaagccaggcgcggcaggggaggaggaagaaagagcgcacaggcagccggacttgggcaggggcgagctccacagagaagaagccgagcgccattggacaggaaaacttcggcaggggaggacgctgaacacagcgcgcgcgcagacagagacccaggcggcggaggtagatggaggagaaggggaccgggatagaggagaccgagaaggagatctagcgacggagaacggacggcgacgaggctggggacggaaccaggttaataaagttgttaacctgttaatagagctgtcatttccattttaa

SEQ ID NO: 55494 - DNA, 443 bp, Zea mays
  Clone ID: MRT4577_150604C.1
cctgcgaacaagaagaccatacaacccccttctgactgagcactgtgccgcatcgatgttcagcgaatggtcgaccacacataacgactatgaacgcgtcggcgatgcaccagaccacaatgttcctcagtcaggccctgggcacccgagccttcacagtctatgccggcggctgcatcgccatgcgccaaagcgacaagagagatccccagagcatatgaaacgtacctgaccgaccaaagcaccttggcccgtactcctaacaaacggcaacaaaactgacaggtcagttcccaggcgactatgcgtgctacaactagggcctctcccgcgatgcagaaatcctatagcgcaatcatcaattacaggtaattcaatcccggtgccggaagctgattccgctgatatggaggctcactaagatcctgcataggaacgccgtc

SEQ ID NO: 55495 - DNA, 360 bp, Zea mays
  unsure (1)..(360): unsure at all n locations
  Clone ID: MRT4577_150605C.1
ctatgtaccagttgtccattttctcgactaacccctgtggccgatccgttgtcattccgccctattactgattggtgatacttcgcaagaggtggtgtgtccatcttctttctctcttgcatggggggggggggggggagcctccaccgtattagctgcgatttgtgggcctatgtggggcgtgttcgtctttgtgtatctccctgttgggtagtggcgccttgtacgctcgtttagttttgcggccttgttttcggttggtttgggccgggttcctcgtggagcgggcggggcgtgggtccctccagggcagttgtctttgcgcctcgggcggggccacgcttagggcgcngtctgcgg

SEQ ID NO: 55496 - DNA, 245 bp, Zea mays
  Clone ID: MRT4577_150606C.1
ttttttttttttttttttttaacaggaaaaaatttccgtttggaaaaagggttcagtatttcaagtactccacaaattcactttttgcaaaccatggataatcaattgcactatagaaccattcaaacatacaccacctccgaagcaaacgtgaggacaagcagtgagagagtttgtccttaagatcaataacattattcactgagtgagaaaatttatcacttccagtatcattggcaaccttg

SEQ ID NO: 55497 - DNA, 647 bp, Zea mays
  unsure (1)..(647): unsure at all n locations
  Clone ID: MRT4577_150607C.1
ctggccggggaggcttctcctgtcgactgtcgacgccttcttctccctctccctccggcttccggcgtaggggaggctatgcgctatttcccagggcgccgttcctactggggggttcgggttattaggggtctagaacctttcttcgccgggccccaaaccccatgcacgcgccgccggggggcgcgttcncagggggcgcctgccccgctaccgcggggtgctcgctgtggccctgggtgggctcnctgcgggccgccatcggtgctgcgccggggaggctcctatggggccgccgcggggcactccggctggganccaaggccgcgtggagggctaccggagggggacggggcccacggggcccggccaagggggcggtgctcncctcctatatgggggccgaggagggggggggacccttatcggtgcgcgacgaggaagagctcatttcgcacataagaaaggagcaggataatggaaaacttcctgcggatgtggccattaacgggggggagcgtggttataattacaggaatgcgggcctgcgaaatggtgatcctaatgcgtatgagatcatgcgttcaaatatgacagcgttgtgtgatcgtgtgctactgggtggacagaatccatttacctttcca

SEQ ID NO: 55498 - DNA, 1255 bp, Zea mays
  Clone ID: MRT4577_150608C.1
cctcgaggccggccgggccgggatgcgcgcccgtatccttggccagtggcttcagcgtttgtcctcgcttacactttcccctctccctccggcggcggcggacacctttcccctctctctctccggcggcggcgggcacctttcccctctctctctccggcggcggcgggcacctttccatcgcatttacagaccccactctgctgtgctgtcccggtcaccgcgtcgactgcacggccccctttgccaccggcgtttgcccgttcctcaattccaccgacatcatggaaggaggtcctcgaagccgcagggctaagcccacgcccaacggcaaaggtgtctctccgatgagggattcctgtctggagctgagcggtaaaggtgtctcgtcggagagggattctggtctggagctgagcaagtcgcctccgccgccgcccgctccatggtggactgatccttcggcgccggtgaccggagaccatagctggctgatcctcgaccgcatcgtccaccgcagccggaaagcggtgcggggacgctacgacctcggcgctcgcccacgagtgcgtcggccggccgatccgtgcctccctcccggatcgcggacccccccgcggtgtcccgtctctacgtccactggaccagcattccagccattgactgcatgaaggagcctgtcgtcatcgccgcccaccacaactccattctattccgggtgtctgtccccttcgacgatccctgtttctggagccgaatgatctactttcctgatgattactttgtctactcgtcctcctcggcgccgccgtcccttactcggcttcccccttgcttcacccgggttcccctttgcttcggcggtggacgcaccgaccccgagttggataagtggttacaaccgcaccggcgccagcaacagcggaccatgattgaagaagatatgggcatcctctgccatggagacaagggtgaattcacgggggcggatctcacctaccgtttcaaccaggaggtccaactctgcttgctgcaccatcccccttctgcctctgatgctgaaatgaaatggagtgttgagaagctgcagatccctgccgatatgaagatcaggctctactcgtttaagactgatgccgtcgtcactattggcgagaggtgcttgtgctgggttgactactaccatgggatgctgctcattgatgtcctcgctggcagcaacaacaacagcaggctccgttatataccactccca

SEQ ID NO: 55499 - DNA, 701 bp, Zea mays
  Clone ID: MRT4577_150609C.1
cttgaagatggaacgacggttgctgtgaaggttctgaagagatatgatgaccaaggtgagcgagagttcttggctgaggttgagatgctgggacgtttgcatcaccggaatttggttaagttgttaggcatctgcattgaggagaatgcacggtgtctggtatacgagcttattccaaatggcagcgtagaatcccatttgcatggagcggaccgtgagacagctccacttgattggaattcacgtatgaagatagccctcggggcagcacgagcacttgcatatctacatgaagattctagtccttgtgtgattcatcgcgattttaaggcaagcaacattcttctggagcatgattacacaccaaaagtgtcagactttggacttgccaggactgcaaggggagaggggaaccagcacatctctacgcgtgtcatgggaacattcggctatgttgcgccagagtacgccatgacgggtcatcttcttgtaaagagtgatgtgtacagttacggagttgtattgcttgagctcctcactggtaggaaacctgtggatatgtcacggcccgctgggcaagaaaacctagttgcatgggctcgaccgcttctaacaaatgttctgagtctacgccaagctgtcgatccacttcttggacctaacgttccactggacaatgtagcaaaagcagctgccatcgc

SEQ ID NO: 55500 - DNA, 252 bp, Zea mays
  Clone ID: MRT4577_15060C.1
gtcgaccattccggcgccccgcactaggtgtggctgttgttgctgttacatctgactggactgtgggattagcgacgagtacgtgactgaaaaggttccatttgatgaggcgatttgaagaacggagtatataaacctgtacataactctaggtcatgcaatgcaagtggttgcgatcgtctgagtatgtgcaggtgcagcatttatgttgttggtacttgggtgatgggtagcaggcatatgcttgggtag

SEQ ID NO: 55501 - DNA, 285 bp, Zea mays
  Clone ID: MRT4577_150610C.1
ttcattattgaatccaatgtcacgttcaccgggcttcccaaggaaacatatttcgcgacgaacaaggctaggtttgcgaagttccagcacaaaattgtttaccaattcctgccagatcatgctctaccacagagtagcgacccatgggtcatcgaagctgccactcgggacgcaatgaccgcgctgctccataaccatatcaaggcgcttccagcgaatgtcgagaccatggtcatcatgtcagacgttgacgaaatcccatcacagcactcgatcgcgctcctc

SEQ ID NO: 55502 - DNA, 539 bp, Zea mays
  Clone ID: MRT4577_150611C.1
ttgggaccctcgaggccggccgggttcaacagttcgccgaaactgctgtgtggaatttcacctgaaggagctatgtatctctttcccccaatacgtgtgccaccgagagctatgtgaggcggcaagaagagtcggcagatcagcggacggcttctactgcctcaagctcctggaggcgacaggaatctccactggtccggcatctgcgttctgggtgaaaaggaaggggtgttccaccttcggaccactatcctgccagcggaggatagacttacctgccatgatggccaggttcgagaagctgaacgactgcctcatggaggaggacgagggctactccatgatgtgagctcgaagagaaacaagagtttacagatctgaagaagagattattgattggaagcttgattagatattagtaactcccttgtagaagcaagctgagaggtgattattgtgtattgaataaaaagtgcgccatttgattctactgccataccagtatatatgattggcaaagaaaagaaatgaaatgaggc

SEQ ID NO: 55503 - DNA, 181 bp, Zea mays
  Clone ID: MRT4577_150612C.1
tcggcgattcgctcgctcgatcctagcttcctttccaagaagcgcagcgcccatggcgggggactcactagccttcgacggcacgcgccatctgctggccggcacctgggcagccgtgggtgaaaccgagttagttgaactcttagttagtgcttgcgttaattttcttccgtgggccggc

SEQ ID NO: 55504 - DNA, 327 bp, Zea mays
  Clone ID: MRT4577_150613C.1
attgcttgagcgtggagaacaagcaccttcccatggcgaagtaaaatgcttctggcctgcttgacactgtagaattgtaggcttgacagcacgcttccagtggttcgacataagtgtgcacaattgtagatggcagcaagctttcgttttcgactcttagtaatagtgagaggggccccttttgcacgcacagtactggtcttgatagcttctgagcactgtgtaaatgaccgaacccacccgtagctattagcctcttgcgcttggctcccgatgctatcgcctatgggctttgccacctgctatgctgggttgcaaaggtgacct

SEQ ID NO: 55505 - DNA, 365 bp, Zea mays
  Clone ID: MRT4577_150614C.1
accacgcgtccgagcgaatcaaagggcgctcgacaagcctttcaagtacagactacagaggagagccgggcagcgagacggctgacgatggggatgagcctcgcccaggcggtggccgcgctcgcgggcacgtgcgcgcggcgcctgtcgcgggcggcgcgccggctgcgcccgcgggacggcgtctcggcgtgcttcttgtcccgcgccatcgtgccgttcctcggcggcggcagcaagggcgtcaagaagtcagtctcctcatcagcatcatcctactcgtcgtccaagttggagaggacgaaagcggcgccggaggatgaggacgaggcggtggacaggctgatgctgatggagatcatgat

SEQ ID NO: 55506 - DNA, 210 bp, Zea mays
  Clone ID: MRT4577_150615C.1
tttttgacgcgtgggctctaggcgtgtagcagggtggctgctctcccatccgcggcgagggctcacttgaaccagggagccagggtcttggaggcactcgtgtctgcggtacgtcacggcataagtgccggcgccaacaccctgcacacgcttaaccggggcgctacctagacagtaacatgcataatgtgtttgattgcattgcatgtg

SEQ ID NO: 55507 - DNA, 577 bp, Zea mays
  Clone ID: MRT4577_150616C.1
tctcggccgggctcaagataggagtctaggtcgtcgccgcagatagtgtccctttccccgcctacggtgcccacggacaagccaacaggtttgacgggggaacgtgcgaccacgctaaccaagccactgttcttcataagctcggcggacaacggcacctgacactacaactaatgtgaacggggacgggaaccagaacatagtgcctcttggttctaaacttatgaaaggagaatagacacaaggaactacatgaacgacgagcctccgcagccccttaaacggctgcaacagcagcaatgaaggttccagcgaagccgactccccttactgccaatgctccagccgagaaaggaggcagaagctgaatcagtgacagcattatgtgcggcggttgaggtgatggctacaggaatggaaacagttgcatctaccgaaccaaggtgatcacaccaaacaacaacgataccatcgacttttggactctacaagacggcgccagggcgacggtggacatgctatacccataccatgcacgatgacggtatgccttgcgtgtgcaacaacgacaacagct

SEQ ID NO: 55508 - DNA, 374 bp, Zea mays
  unsure (1)..(374): unsure at all n locations
  Clone ID: MRT4577_150617C.1
tgtgaatattaaggaatataatgngacagangagatgatacagtagtatgtagtaaatagtaataatggggatgggtgggtgggtaggtaggtgngnggtggaagtaggggtgtggatgggggatgattattagtttttggggggaagggggttggtgtgganganggnaggattgggtgagntnangttgttgttggggttgttgtgggggttggtgtttggttggttagngggtggaggaggagggggggggtgggagtttttdtggggggntgtttttttatttgggttattgtwtagtttttttttwttgtgttgttgttgtgnagaattgttgnagnangggggataaaatagttatagagcggragca

SEQ ID NO: 55509 - DNA, 162 bp, Zea mays
  Clone ID: MRT4577_150618C.1
ccaaccctgaggctctttttcaaaggcagtgctgggtgcccaagggtactggaccctggagattgggattggaggctctgggtgagatacacactggaaaagtgatagcctggcaggtaggtggcagaggtaggaacagagttaaggtcattggtagagggt

SEQ ID NO: 55510 - DNA, 1054 bp, Zea mays
  Clone ID: MRT4577_15061C.1
tcgggaaacaaatcacccagacgcccaattcacgcagcaattctataccgccaaatgccaggcactactacgctgaccgcccaacgagaagagctaggccagacgaatccggaggtgggaagaggcggcgcccggggacggacctgcttgtagtggacctcgatggtgtaggagagcagcatgggcgtgatgtccccggcgtcagggcgcgagacctggacgatcctggcccgcggcagctcgtcgaacacccgcaccgactccggcaggcggaacgacgccgacgacgcggcggccaacccctccggctcgggcggctccggaggcatcctgacgtacctgtggccaccgtgctcctgctcctcctcgccggtcatagattcctcgggggggatttatatggatggtttgttttggcgtttgggagtgcgggcgagacacgaagcggaagccgaaggggaggagcggttcgaggaacgaaggaaaggggcggtgagctggactgccgcgccgtggcaggaaaagggtaaacgatcaggtgggatgtgcttcctgccaaatttggggtgcttttgccttttcctcgccctaatgatcttgaaatttttaggcaccgttgagcaaaggttgcacgccagactagtgtttggttgagcgaaggttgcacaccaaattttgagccactgttgagaggccgcgctggaacagccgcgcgcgagtcggagctccacggccgcgcgcctcgagcacgcggaagcggcgctcgtcggccgcgtgcctcgtcgggccgcgcgtctcaagcacgcggaggcggcgctcgtcgaccgcgcgtctcgacgacgcgggaacagccacgcgcgaagcggagctcctcaaccgcgcgcctcgacgacgcggagccggctctacttcggcttcaactccgacgacgatggcgtgctcccctcacctccgagaggaatttggaaaacccgatctggcgaaagttcccacactgccgtgacggtcgtcggttgttgtgcctgtgctgggagctcagcttacccgtacattt

SEQ ID NO: 55511 - DNA, 355 bp, Zea mays
  Clone ID: MRT4577_150620C.1
aaagggggaaacaaatttatcccggggcagttaaaacagattttccaaggaacaaaccaaatagtttaaccaaaactaaacaaatttatggccggaaacactcctaaaaaatatttttagccgaaaaatgcagttgggggggttttacccacagcctaaaaatctcaaccataactggaaaatggggggctgaaaaaacggcccattaaaccagccatggggaacctttttgaacccaatttgggaaatggggatgccgccccagttaacgaacaaaaaggggtgggagaaaacgctcgcgccctgttcgccaaatttttttttaaggttaaagttgtagttgccctgccctcct

SEQ ID NO: 55512 - DNA, 435 bp, Zea mays
  Clone ID: MRT4577_150621C.1
atgtaaaccacactccactccagcactaaacacttgattgattcagtgggtaggttgctagctgaatacaatggatcctaccaagttccgtccgtccagcagccacgacacgacggtgacgacgacgaacgcgggcgctcctgtgtggaacgacaacgaggcgctgactgtggggcctcgcggtcccatcctgctggaggactaccacggtggggagagggtggcgcacttcgcgcgcgagctgatcccggagcgcgtggcaaacacacgcctgtaatgcggcgtggatcattatcactaccaagcgtacaatggcgcggtggttgtgcaataaaagctctcctccttcaaggatgacagggaggaggggggctgtgctgctgccctcgtgtgaagttgacactaggagttatgcaaagaggaggaggaggagaa

SEQ ID NO: 55513 - DNA, 865 bp, Zea mays
  Clone ID: MRT4577_150622C.1
ccaggaaattggtacacttgcgaacatgcaaaggcttgttttggctggtaatttgattgaaatcatcccagctaacattggatacctgcggaatcttaaaatcctcacacttgaccgaaataggatatctatcttgcctgaagaattgggttcactgtcaaaccttcagcaactttctgttcctcaaaattttttactgtgcctgcctaagagcataggagatttgcgcaatatgtcagtactcaatgtatctgaaaacaaactaaaggaacttccagaatcaattggaggttgcagttccctggaagaatttcaagccaatggaaatgctattgaagatgtgccagcgtcaatttgcaacctagtttgcctgaaatccttatcactgaacggcaacaaaattcgtcagagtttatccctgcacgacaacccaatcacaatggaccagttccaacaaatggatggatttggagagtttgaggcgcgcagaaggaagaaattcgacaagcagattgattcaggggtcatgatgggctcgacggctctggatgaaggggttgatttccactgattttagaactcgagtgtctcccattctttctagttggtcaggagtcaggaccgattgtagatttgtagatatcagtctcacaacctacaaagcagggttcaccaaaccggttgtaaggtgaaaaccggcgcccagtgaaaactggtaaaaaccggccgaaatcaaaatcaccccacttttcaatttgaaacggtttgaaaccgataaatcggctcctaggctgattaaccggcgtcatagaagcagaagccgagccatatttatttttgcaaataaagcacattgagatctcat

SEQ ID NO: 55514 - DNA, 1224 bp, Zea mays
  Clone ID: MRT4577_150623C.1
ccggggttccccactttcgttggtatagatccctgcgtcccccgtcctgccgtccctctatctaaagtcgccgacgacgacccagtgaaaagtccacagccttttccaagaggaagggatgggctgctgcagcagccggagctccgattcgccggccagccgcgtgacgcggtggcgctccacagggatcgtggcgctccgagacgccagattgaaggttcgcgccatctctattccaaaggaagtgccaaatgaagttctacaagtgggcaattccttgagaactctggatttgaccaataacaagctagttgagattccccaggaaattggtacacttgcgaacatgcaaaggcttgttttggctggtaatttgattgaaatcatcccagctaacattggatacctgcggaatcttaaaatcctcacacttgaccgaaataggatatctatcttgcctgaagaattgggttcactgtcaaaccttcagcaactttctgttcctcaaaattttttactgtgcctgcctaagagcataggagatttgcgcaatatgtcagtactcaatgtatctgataacaaactaaaggaacttccagaatcaattggaggttgcagttcccctggaagaatttcaagccaatggaaatgctattgaagatgtgccagcgtcaatttgcaacctagtttgcctgaaatccttatcactgaacggcaaccaaattcgtcagcttccacaaaacttactgaaagactgcacggctcttcagagtttatccctgcacgacaacccaatcacaatggaccagttccaacaaatggatggatttggagagtttgaggcgcgcagaaggaagaaattcgacaagcagattgattcaggggtcatgatgggctcgacggctctggatgaaggggttgatttccactgattttagaactcgagtgtctcccattctttctagttggtcaggagtcaggaccgattgtagatttgtagatatcagtctcacaacctacaaagcagggttcaccaaaccggttgtaaggtgaaaaccggcgcccagtgaaaactggtaaaaaccggccgaaatcaaaatcaccccacttttcaatttgaaacggtttgaaaccgataaatcggctcctaggctgattaaccggcgtcatagaagcagaagccgagccatatttatttttgcaaataaagcacattgagatctc

SEQ ID NO: 55515 - DNA, 339 bp, Zea mays
  unsure (1)..(339): unsure at all n locations
  Clone ID: MRT4577_150624C.1
gaaccaccagcttatggggcactggagcattgttcaggggaattctacgtcggggagatggacgtttcattaatccgctgccactccctcagcttttactccagtaactccacccatcagcattagcacaccacgcctgcactggaccattttttggaagaaccggggggaaaaaaccggggggaaagcaaacacacgcgaagccttgtcagaccggccgacattatcgggggggttagctcattacaccaacgccaatcacgcttttattgcgcgcggcctttgatgacgtcgaagcccatctcgggggggtcggnggcctgcaccttgtagggcacc

SEQ ID NO: 55516 - DNA, 190 bp, Zea mays
  Clone ID: MRT4577_150625C.1
gcattaagaatttatgcatgagagataaaatagattttaagattcctacttaaacaaaaactttccatgacagtagcatactgatgagacaacacacacacacacaaaacaacagcaacaacaacagaacagcaacaaagcatgctcagtattgagacactgtacagattaagttataccagcaaaagtg

SEQ ID NO: 55517 - DNA, 121 bp, Zea mays
  Clone ID: MRT4577_150626C.1
atcctgtcaccactctgaaggtccagacagaaggttttgacacattcttagcactgaactcctctgggatctaggatgatctgttccccctctgatgaacatcctctgatgatcaaggctc

SEQ ID NO: 55518 - DNA, 425 bp, Zea mays
  Clone ID: MRT4577_150627C.1
cgttcctttttttttttttttttttttttttttttttttttttttttttttttttataacgaaaaaaatcccaatcaatattttgattatttctaggaaacacatttcggtatgagggccccattgtccagtccatttaatatgtaatctaaaaaatggcccctccaacgatgggttccttcaaggcagggttcatcaaaaaaaactggttgtatggccacaattgttgtttctccttcaggaaggtacccaccaatgggttacccactgccaatggattaacaacctgttgtctctgttgaacgctccccccaaaatttcccccaccccattggttaaatggaaccaactgttttaaataggccccagggtttgccacaactacctgaatcaaaactggaacaatttgttgcaccaactgttgt

SEQ ID NO: 55519 - DNA, 533 bp, Zea mays
  Clone ID: MRT4577_150628C.1
cttatctcttcccttctctaaaccccctccgccgagtcctccccgtctccgagcacctccgccgagtctagggtttaaccgcccgactcgtcggcctccgtatcgcccggggaaaggaggagcgggcggtgatggcggcgccgataccgcgtgagtgggttggtctgcagcagttcccggcggccacccagaccaagctgcacgagctcctcggcaagctcaaggaggagaatgtgagcacattgacgattctggtgatggggaagggcggtgtggggaagtcgtccactgtcaactccattgtcggggagagggtcgccaacgtcagcgcgttccagtctgagggtctgaggccaatgatgtgctcccgcacccgggcaggattcaccttgaacattatcgacactcctgggctcattgagggtgggtatatcaatgagcaggctgtggagatcataaagaggtttcttctggagaagactattgatgtcctcctgtacgtcgatcgcttggatacatatagaatggataca

SEQ ID NO: 55520 - DNA, 214 bp, Zea mays
  Clone ID: MRT4577_150629C.1
ttcgtctaaaagtttacaacttcttctcctttattttttggagcacctaatgaggtactggtccaattttcctagagctagagctattccaaacaaggtccaaatcaatgctcatctcatttctaaataggtatttcacatgcccaccaacgatcttcattgatcttactgctcttttgcgattatcgttcagctatttatcacagatccttta

SEQ ID NO: 55521 - DNA, 590 bp, Zea mays
  Clone ID: MRT4577_15062C.1
gttccccgtccatcgagacgaagcccacctcccggttacgggcaccgccggcatgacgccagctccgacccaccgcgccctagcactgatggacgagcgtcccccctatctccccgaggagaccgtcaagtacgacacgactgatgcaacgacttcctcgctcctccataggagcactgagactatgacgacgtccacgatgggatcttccttaccgtacgacgggcaggctgactcgcacattgacgacccattcctactctttgtttactttgtttcccaactcaagacttgacgccactggatcccactacgagcctggacttaactctgatgctggccgtgctactgacatgctcaaacattgacatatgagatcatatatgtcagtccctctcgtatgccagagtgggagacatcctactttgaactggctatgctctacaatgacaagagctactattcttgccctgcgatactaccacataacatccacctactgctgagcagatttatgcgtgaacagaagtctctatccacctgcgtgctgctgagaggactactgactcttcacttgtcctactcatatc

SEQ ID NO: 55522 - DNA, 426 bp, Zea mays
  Clone ID: MRT4577_150630C.1
ctgctatgctacacctcctctgcagttcattccgttcgatctccataaagaccttcctgagctcctcctccaccaccgcgcggtgcatattgtattaggctccagagaaacaaaggacggagagcaatttcgtcgtaggctgttttcccttcgtttcctcctcgatcggccggtgaacgaacggtgataataataatgagatacccggtcgtcctcacggcggcgttctccgcagcggcaattggattcttgatcggaatctccttcccggtgcaaatcacgcccaaggtatacccgtccagcttcgtcgctgacgacgcggacagcagcaccctgggtctgggtgacagcaatttgctcggaagattctccacggcacgcaatagctgtagccgtgctacttctaccgtgggggcatctcctcct

SEQ ID NO: 55523 - DNA, 395 bp, Zea mays
  Clone ID: MRT4577_150631C.1
attataatgagatccgtacagtaaaaacctattacaatacattacatcaagtggaaatacaacatggaaaatgcacagttgtacatctaaatttgcccttaaaaagcaaaaacagggttaagacaaaatacatatgccagtttgttgcaaacgttgttaaatgtacaaattgtcaaacgcaacgttcccaccatcaggagtttgaaacaatgccccgaaagacaagaagccagatttgtttttaattgaaccacccatcatcttccttgcatgcttcaatattagcaacgagcacgtgagtgttttatcaaaaaaaaaaataaaaccttttttagggagcgctacacaacaataaagggctgaaaatattgccacgagccgacaactagcgaaaa

SEQ ID NO: 55524 - DNA, 329 bp, Zea mays
  unsure (1)..(329): unsure at all n locations
  Clone ID: MRT4577_150632C.1
tttttaaaacagttgcggttctaggggaaaaatatggggttttttcccannaacccgggccaattaatatatgggtacagcagacgcaatcggatcaaccaacatgcatgtagacacacgtccatgagcacaaagactggcgccaaacatgcagagagagatagcaaactgaagaactctggttctttttttttgacacacacaccacacaatacctatgtatgggagccagctcggcctcgcttattattggtcaaccaccaccacaagcttgatagataataaccatttccaagggggtcgatcgatgtgatcagcaattgcagggg

SEQ ID NO: 55525 - DNA, 315 bp, Zea mays
  Clone ID: MRT4577_150633C.1
gggctggaaaatcttgaggttttttttattaaaacataacggggcctcaattttacatttcttttccttcttctctaccaaaaatcagcttttcccccccctcaatttgggtctcggtttaaatacaactgcaacaagttttctggctgaaaatgaaaccaatgttgaaaaatgaacaaaggttaacaattggcaacgaaatgtttttcttaaaacttatcccatccttaattgttgcgggcaactcgagttctccaatcgatttgactattcgagtgctctaaatattttttttgcacattaaacctccaaact

SEQ ID NO: 55526 - DNA, 353 bp, Zea mays
  Clone ID: MRT4577_150634C.1
ggccagaccgacgcgtcacgcctccctttcgttctaataaaacatttttttaggtataaatttcctcttggtgaggggggggctctattaataaactggcctacacacattatctgaaataaaaaaaaaaatattgtctgtcctcctaatgaagaaccaaactttgttatgctccatacaagccactgatttgaaagactgggataattaatagtaataacccgcgcaaaaattgatggtttttttctattaacctaatcctgtgattagcgggaaaacaggccccttaatcaaacttcagtttctactggtcaagctattactttggggcaaaccagagatttaacattact

SEQ ID NO: 55527 - DNA, 1436 bp, Zea mays
  Clone ID: MRT4577_150635C.1
cgttgctgtcgccttgccagctgccacttcgccgtgagtcaaccactgatccaactcgtcgcgccatggccgcctcgaacgctggccccgaggccgcagccactgccgccggccaccgtttcaacttcgacgtcatcgtcgtgggcgccggcatcatgggcagctgcacggcgcacgcggccgcgtcccgcggcgcgcgggtcctgcttctggagcgcttcgacctgctacaccacctcggctcctcgcacggcgagtcccgcaccatccgcgacgcctaccccaaggcgcagtacccgccgatggtccgcctcgcgcgccgcctctgggccgaggccgaggccgagtcgggctacagcgtgctaaccccggcgccgcagctctccttgggcccgcgcagcaacgcctctctgctcgccgccgtcaggagcgccggcgcggaggaggcagacctgacgcggagatggggcggggcgttccgggtccccgacgggtgggtggccgcggtgagcgagcgcggcggcggcgtcctgaacgcgaccaaggcggtggccatgttccaggcgctcgccgtcaggaagggcgtcgtggtcagggacaagacggaggtccttggagtcaggaaggcgctggaggagggaggtgtcgtggtgacgacgagcaccggcgccgagttccgcggcgccaagtgcgtggtgacggtaggcgcgtgggcgagcaagatggtcaggtccatcgccggcctggaactccccatccagccgctgcacacgatggtcctgtactggcgcatcaagcccggccacgagcgggagctcgcggcggaatccggtttcccgaccttctccagctacggcgacccgcacgtgtacagcacgccgtcgctggagctgccgggcctgattaagatcaactacgacggtggcccgccgtgcgaccccgacgctcgcgactgggccgacggtggcggtggcgtggcagagcgggtcgcccggtggatcgaggagttcctgcccgatcacgtggacaccgccggcgggccggtctcccgactgtcgtgcatgtactccatgacaccagacaaagacttcgtcatcgacttccttggcggcgagttcgggaaagacgtcgtggtcggggctggattttcagggcatgggttcaagatggcgccggcggtggggaggatcctggccgagatggccatgtatggcaaggagagcacagcgacggaggccggtgtcgagctcggccacttcaggatcaaccgcttcgagggtaaccccttgggaaacgccgcgaattagcaactctgaggatccttcattaaacttgctcggctaaaagcacccgattgatcgtgcacatgtaaaagagttaccaataacttagggaaatttggatttataccattaaaagtttacaactttaaatat

SEQ ID NO: 55528 - DNA, 2319 bp, Zea mays
  Clone ID: MRT4577_150636C.1
gttaccgcgcatagatcgtgggcatcgcgacaccgcggccgccgtatctcctcggcggttcccccttcctgcccgctcccctgcgcctcgcctttctcgccctctttccgcctttctcacacgtgcccgccttctccgcccctctcctcgccagcggtggcgtcgaccggcagcggcgttcaactgcgccccacgagcaggtttcttggccccgtcgacttccagtgagttcagtatagctcagtaagcatctgatcaacttcgaggtgccagacagatcctatgctgccttactgggatgaaaggtggctgtctgcataggctccttgtccacaagctatgctttggcctgagtgttctcctcactgtgacgattattgttctgttactggaaggagccccagtactcactatcttcagcccaacaccagggcaattaaaagttctctctcaaggttttctacatcagcaggagcaggaacatcttggagatgatggagcaaccctagttggatctccaggtccagcttccttgagccgctcgcgaaaaaattgcaactacgcaaaggggaagtggatagaagatgataagcggcctctgtactctggtaatgagtgcaaacaatggctgtcaaaaatgtgggcttgtcgaatgatgcggcgcacacatttctcttatgagaattaccggtggcaaccacatgactgtgagatgcctgagtttacagggcctaagttcttaaaaaggatgagaaaccgaactcttgcttttgttggtgattcacttggcagacaacaatttcagtcaatgatgtgtatagcaactggtggcaaatacagtccagaggttgaagatgttggttggaaatatggccttgtcaaagccccaggtgctctaagacctgacgggtgggcttatagattcccgtccaccaacacaactatccttttctactggtctgctactctgtctgaattggaacctctgaatacagaacacgcggttaccagatatgcgttgcatcttgatcgaccagttacatttttgaaggagtatcttaatgactttgatgtcctagtacttaacacaggccatcactggaacagagggaaattcaatggaaatcactgggaattgcatgctgatgggaagcctgtaggcaatggtagtagacttgcagacctaaaccgtgcaaaaaatcttacattgcatagcattgctagatggatggattcagaactcgcacggcatcctaagatgaaagttttcctcaggacaatttcaccaaggcactttgtaaatggtgactggaacacaggtggaacatgtggaaataccgtcccctttactaatggaagtgaagtcttgcaggatcattcaattgatatacccgcagaaaatgctgtgaagggaactcgggttaagcttttggatatcactgctatctcaaaactacgggatgaggggcatatctcaaactctagtttcaaaaaggcttccaccggaattaatgattgcttgcactggtgcttacctggtataccagacatgtggaatgagcttctctttgtacagatttagtatcaccctcttgttaggcagatctttttcagagccccaaggatctccgctgttcatagcatagaagtaaagtttaaggaattttgggtcacccatatggaggtgttcacatgatgatactattgatttctatgaagtacgtaatttacagtgtggaacagattattccaacttcctttcggagcagagtaggagatggaggtgttgcacagcccaatctgactatcgagtattcttcaggcacgttgaactttgtttctacgtttaccttactgtaaaatcctaccacggtttaccatgtgcagcatatatccttcagaaaaatgttcatacctgttggtcgtaattatatatgttcattcagatgaaattaaaacttcaacatccgattgatttgtcatttgtgtgagctctaaccctcgactcttcggacggtaaggcgtacagtgatagatgacctgatataccatgcatcttatacctatatgacacacctagggcccggacggacgacctcgtctggatgtagcccgtgcgaaatgggggaccgcatgggcgcatggcatgtgaaaggaggccagtgctgccagcttaccgcgacgactgattcgttattcgagttatttacaagtacctaatatatctagatgatacatttgcaacatgcatcaaaatttgctgaaacatttcgaatgtgtttgtaacataagtatagttattaaaaaaaaaaaaaaaaa

SEQ ID NO: 55529 - DNA, 622 bp, Zea mays
  Clone ID: MRT4577_150637C.1
tcgaggggccggccgggtgcccgccttcatactacctcccctctcagcttcacttttcgaacacctaacgcccaccacactatatgtaccccaataatgacaatagcctcgccgtccggcatggaatccgagcaagatccgatggtggcacctcgaataacatataacatcagcagtctcgcatacctaaacgacaaagcaaacaacgcccatgctgctcgaccaggctacctacgacaagctgctctcacaggcgccccagtacaagtagaatcaccccttcgcatcctctccgagaccctgaggaccaacagctcccttgctccgcagggactagtacacgactctgatggcgcgtgatctcattcgaatggactcggtccactcaatgcaacaaatctacaccaacgcaaccaatacataagcgtatcggggaacaggtctacaaatgcattgactgcacctctctgcaggaggatctcgtctttagaacacctgccatctttgacaagagctgccaatgttatgttactgtggatgagttccagcagaccgacacattctaaagattctgacgattactattacatgacactatggtgtgccaattataagacacttg

SEQ ID NO: 55530 - DNA, 959 bp, Zea mays
  Clone ID: MRT4577_150638C.1
gccggccgttttgacccgacaccaaagtaccaaacgtttctgagctttggactctacaccgcgcatagatcgtgggcatcgcgacacctcacctgcccccctgcggccgccgtctctcctcgccggttaccccttgctgcccgctcccctgcgcctcgcctttctcgccctctttccacctttctcacacgtgcccgccttctccgcccctctcctcgccagcggtggcgtcgaccggcagcggcgttcaactgcgccccacgagcaggtttcttggccccgtcgacttccagtgagttcagtatagctcagtaagcatctgatcaacttcgaggtgtcagacagatcctatgctgccttactgggatgaaaggtggctgtctgcataggctccttgtccacaagctatgctttggcctgagtgttctcctcactgtgacgattattgttctgttactggaaggagccccagtactcactatcttcagcccaacaccagggcaattaaaagttctctctcaagggtttctacatcagcaggagcaggaacatcttggagatgatggagcaaccctagttggatctccagggccagctttcaggaagcgctcccaaaaaattgccactacccttatcaagtgtagtatctgttcttatagatgacctgatataccatgcatcttatacctatatgacacacctagggcccggacggacgacctcgtctggatgtagcccgtgcgaaatgggggaccgcatgggcgcatggcatgtgaaaggagaccagtgctgccagcttcccgcgacgactgtttcgttattcgagttatttacaagtacctaatatatctagatgatacatttgcaacatgcatcaaaatttgctgaaacatttcgaatatgtgtttgtaacacaagtatagttattgcaacaaaacaaaaaaaaaaaaaggccccta

SEQ ID NO: 55531 - DNA, 650 bp, Zea mays
  Clone ID: MRT4577_150639C.1
cctcgaggccggccggggacatatacaatcaacaagacgcctgtggacgacacctttcctcgactcgcgtgaggagcctgcttccgacccgcacatctccctccggttctcgtcatgggcgccggagccgacaaccacgatgagtccaggcccctgcatcccagctgcggatgccgcccccgacggacgagaaacccccgcatgctccggcgccggaggccggcaattactatgccgacagggtcccggtcgtgatgggtgagaccgtgccagaccactgcttctgcgacgctccgcgtgagagctgggactccgagatcctctgctgcctcgctcgtcacgacgagctctgcagcatatacggataaccgcgacttcttggaacgggagaaccatgggtgctctatggaacccatggtgagagggttgctgctggacaaggcacatttgcaaacagatgagtggctcacgctgtactgcagtggcgtgagaactctcgctatgagcggaactgtcttgaaccctgatgctcccctcccgctcatactgctagtccacgacgctacaatcttgagggcatctgtgatgatgtcaccagccaatgagggtgatgcggatatctggtcaacgacgaggatacgatatgagca

SEQ ID NO: 55532 - DNA, 486 bp, Zea mays
  unsure (1)..(486): unsure at all n locations
  Clone ID: MRT4577_15063C.1
gggctgcgagcacacagatgagaaccgccaatcagagaacatctcgtaacaagaagacaagatgacgttttgctcactgcgtactacatactacaaggacactatgtatccgactcgtaccatgagacattccatctttgacagcgtacacatcattacttatcaaccaaacaaagagtgaacatttatatatatacggccatcacacctggctgatgactagagaatgtagaacttctcaaaatgctaataaaaagtgcaactcctgatttgggaggccaaggtctgcaactatggtggagcaaacagacgacggacgacgtgtggcgaagaaggttcactgatgagtgtccggtgaccnagtcgtatctcgcttctgtgaactcaggacgcccatgaactctagcatggcgaggcgaccggtcttgagatcctaagctcgcacctgctttaatttatccggtgagaacatcacacagtccatcg

SEQ ID NO: 55533 - DNA, 432 bp, Zea mays
  Clone ID: MRT4577_150640C.1
gggccgctaaaaagggggcaccccccagggaacaaaaaaaaaaattagaaaaggggtttttaacgggacccgaatccaaaaaaaaaaaaacaaaaaaacgcccctaaaaaagcctatttggggggaaaaaaaaaattaaaaaaaaccccggaaaaaaaggttaccccccccccccaaggatggggggggcaaacgggattccctggggcaaaaagggaaccccctaaagggggaggggccaaagggtggggcccccaaaaaaacccaaaagggaggcccggggggcccccgggagccccaaaacgggggggttttgaaaccggggggttgttttaaaatcctggggaaaattcccccacaaagccctgaaagggaaatttggggataaaaaactccgggctttttggggactgggggattttgggcaaggcc

SEQ ID NO: 55534 - DNA, 283 bp, Zea mays
  Clone ID: MRT4577_150641C.1
cccttccccccaaacctagcacaaaacggggttcacaagccatggtcggggtccgggggggacagaaatggattgtccggggcataagcggactctgggactccggctccctaccccaaactgaagcgcttccgtgaacacccccgtcctccgtacggggaggggagcaggcgggatcctgggtccctcataagcactttggttttaccgcctgcaacctcactgtgcccgccccgcaccatgccctaaccccaggtctaaccggggcccttgcagggggcag

SEQ ID NO: 55535 - DNA, 536 bp, Zea mays
  Clone ID: MRT4577_150642C.1
agaaaaataaaaaaaaagggggaccaaaacttttggagaaacctaaacaactaaacatggaagaaaaacaaaggtgcatacattttttggggcctcggaccacgatcatacacaagcacatgcatacccacacgtttacataccaaagattaccgagccacccttatttgggcataaaaagagggcatacatacgtacccccccacaaaaaggggggggctcgatattactttcacacccacccgtaacacacggggagggaccaccaaaccggaggaacaaacagcccaaaaaggggggcttttttttgccgccggccccctcggcccccttgggggccttttttttttcggggggcccggggaaggggaaacccccggaacccaagggcgccgcccccggaaacttcttcttaattttgggggggggcgcgggccccggggcctttttcgcctcgggcttttcgtaaagggcaaaagcccccgcggcaaaggcccccgcctcaaccgagggctgcttgggcctgggctcctttt

SEQ ID NO: 55536 - DNA, 661 bp, Zea mays
  Clone ID: MRT4577_150643C.1
tttttttttttttatttccgcagctgtattttttttaaaaaaaaatgactcatttacagattacaattttgttgtaaaatacatgctgaaaaaatgaaaaccagaaataacaaacaaatagaactgtcgttcttctttatttgtctctacataagatccttctctctcctcctgtttatttcttttgtttattgtttttcggcgacgtacacgcttctctccccttccttgcttttctccatagcgctgacatctggcaggcttccacgtgcttgtggatggatagcggatgaaatgaagtactctagatttagagtacaccgtacgtgcgctatattttaccgattcgtttgcagtctgttgttagagagataacggatgtctttctcctctaaatttagcgttcagtgtcatttacattgtcttgttggaggcaatctaacgtcgagcatctcgcgtgcgtcgtgcccgggcatcgccgccacggccgtgtccgtcgtcgtaacggacagccgttccccgtgcataggaatccacatcgtgctgcacccccgcagggcgtagcggagctcggtgtggcttgccaaaatggagaagtgactgctgggcccccatttggacagggagcaaagtggagaatcacgatctgtccctgatattt

SEQ ID NO: 55537 - DNA, 336 bp, Zea mays
  unsure (1)..(336): unsure at all n locations
  Clone ID: MRT4577_150644C.1
atcgggataaatcccactcaatatattgattatttttaggaaacacatgccgctatgagggccccattaccgagcccctcccatatggaatctaaaagatggccccgggaacgatgggttgctgccccgacaaggcggggcccatcaaagagaactggttgtctggcaccanttggtgctgctgtcggagggcggcgcccaaggggttaccccccgctggggggttaagnaactgggggcgctgggggaggtccctcggccgcgccccccccaagggcgattccccccccactggcggccggtnctaggggntccgggctcggccccccgccgggg

SEQ ID NO: 55538 - DNA, 202 bp, Zea mays
  Clone ID: MRT4577_150646C.1
attcggctcgaggcgggacgaaattttaattatacgcacatggacgatgatttatggttggtttttatcaagacaagcatggctccagaatggattgaactggcggtggtgcgccttaacacgaaaaatcacttgctcttaactgaaggacccaggaaatatttcggtagggacagatatctcgactaacacccactgagtt

SEQ ID NO: 55539 - DNA, 291 bp, Zea mays
  Clone ID: MRT4577_150647C.1
gagatgatgaccttgatctttaattgctaccctaaccttgacctttaacctgtgatatcctctagctcctcggtgaggtgtcctaatatctcttagagatccaggctccctaagtcatctcctcctcccgatttggtcttgagaaggcttttatgttccctctctgacctgggttctatagatgaggaacaataagttgttttagctgtcacggggatgccattactccccctctttagcccatatttgcaagggtaggagactgtgtgtatgtgtagggttcgtggtggg

SEQ ID NO: 55540 - DNA, 217 bp, Zea mays
  Clone ID: MRT4577_150648C.1
ttgttatgcctacgaggtccccatcgatcctggggagcgtgatatacatccacaagattgacaggatgtacttaacgaacgaatgatctgaggggagggggtacaccatccctttgacttattgcagacacacttattagtcggcagcaggctggtctctcttgggacgcacatatggaactcagtgctcatagcaccagtctcgcagctgttgtct

SEQ ID NO: 55541 - DNA, 210 bp, Zea mays
  Clone ID: MRT4577_150649C.1
aaagagtcaaggccttgagatttccattcaacaaatttgggtctgaaattacaggtcttagtaccagggtttcactttacaaactctttcaacagggaggtccatgttcttcaaaaaaaacaagatattgccacactttttatttagcgcattttttcacaagaaaccacctgacggttccgattcatgtattgataccttgactcggtg

SEQ ID NO: 55542 - DNA, 320 bp, Zea mays
  Clone ID: MRT4577_15064C.1
agtgtcttgaaactttgtgtctgtattccaatcaatatgaatatatgaaaattgggaaatttgcatgccaaaaaaaaaaaaaaatccttcgaccagattgttgtttttcagtctgctgttacagtaagatgagatgcagagtggctcgagcaaattgtacaccggaaagccatcgttctctactccggtatacccttgtatgcttgtattcagatgaagcgacgatggcaattcgcaaaccaacagaaacgtttgcgtacaggccatgggcatgtgacaagagggtgtaaatcatggagcagtgattggcttttggcatc

SEQ ID NO: 55543 - DNA, 230 bp, Zea mays
  unsure (1)..(230): unsure at all n locations
  Clone ID: MRT4577_150650C.1
tctttcccttcccttccttcgcctccgcttcctcctcctcctcctcctgcccctcccccacccgcacccgncgggacgcctccccactttcccctcccccggatccgcatagcgccactgaagcccgcgccgctcggactcacgtagccgacgaaccggtcccggcccaccgtcagatgcgccgagagctggccgttctaagctcatatttggacagagtagatggagga

SEQ ID NO: 55544 - DNA, 767 bp, Zea mays
  unsure (1)..(767): unsure at all n locations
  Clone ID: MRT4577_150651C.1
gccacctgccagacagacagacgccaaccagaactagaaccaccacctatcctttcctcctcagtcctcacgatgcagaccaccgccgtggtggtggcggcgctgctgctcctcctctccgccttcccgcgcttaggctcagccacggccgccgccgacaccaacaccaacaccaaccagacgaccagcggcggcaacggcacgggctgcgcgccggcgcggtgcggggggctgaccatcacgtacccgttctcgctcgtgggcgcgcacccaatctactgcggcttcccggccttccagctgacgtgcgacgccgccgccaaccgcacgtacctcagcaggacgttcagggaccgcctctaccgcgtcctccacatattctacggcaacagctccctggtgatggccgtcgaggccaccttcgccggcgacggcgggtgccgcgtgcccgacttcaacgtgtccgccagcctcgcgctcctgcccgtcgacatcagcgccgccaacaggaacctcaccttcgtctacggctgcgacgtccctccgcggctacggctgcagccggcgtgcgacaacacaactatgggcgcgtacacctccgacgacgacaccaccgagccgctcggttcgatgaactgcagcagcgtcagcgtgccggtgcgctggatcgagcgcggaacggagccgggtcgtcggctgaactactcagagcntgatcggggaagggttcctgctggagtgggcgncgagttcgacggcgaattgcg

SEQ ID NO: 55545 - DNA, 195 bp, Zea mays
  Clone ID: MRT4577_150652C.1
cccgcaggtgccccgccgcagtttccggggggcgccccacgcgcgcttgttcgcgggggcggactctaggggacctagggacgcctttcgaccccataaacagcgtcaagctcggcactctgtacagctacgaactgcatggcgttgcttgtgagctcaacagtccatacacacactcgtgccatattggtgcac

SEQ ID NO: 55546 - DNA, 1063 bp, Zea mays
  Clone ID: MRT4577_150653C.1
tcgacgccgacaagcgcagctgcagaaagcgtctggacgggcacaatcgccgccgcaggaagccacagccagacaccatggcttctgctagctttatcgcaagccagcaaggcacgcgattctcaccatttgcgcatccaagactggaggcgagctggccgccgggggtgatgaaaaccgaggagagtccatatcacatcactcaccaaatccctctgggctccagcagcagcagcaggcagcagcatttcgtggctctgggagccgccacgcctgcctacgccaaggaaggccggcgcttccctttcctgcaggagggcgagataagcttcgccaccggcgtggtgctggagccgccggcggcggctccagcgtgccagccgctcctcaggacgggagcaccatccgagagcagcggcgccggcggcagtaagatgttctccgatcaggggctggctcgcgtgctcgactcggactgtgctctctctcttctgtcagcgccggccaactcctccggcatcgacgtcagcaggatggtccgcccgactgaacacgtccccatggcccagcagcccgtggtcccgggcctgcagttcggcagcgcgtcgtggttcccgcgcccccaggcttccacgggcggctccttcgtcccctcctgccccgccgcggtggagggcgagcagcagctgaacgccgtgctgggccccaacgacagcgaggtgagcatgaactacggcgggatgttccacgtcggcggcggcagcggcggcggcgagggctcctcggacggcggcacctcgtcgtcgatgcccttctcgtggcagtagtcgtcgtcacttgtcagcagccgctgcgttctctcatctttcgcgcttcagacgatctggtagggagatactggctttagtgatcactgatcagcattgatttctgttctttttcctgcattcgctttgttgaatcggctctgctcgccagcattcgtgtggacattttttgaacataattctgtgttcgtttccctccgtcgcgaactagaccaacgcgtccgcccacgcgtccg

SEQ ID NO: 55547 - DNA, 586 bp, Zea mays
  Clone ID: MRT4577_150654C.1
gattcaaagttttcaaatctggattcagacttagccccatttcagcacactgatatttgtgtgattgatctaactttggggtttctttgtagatgatctggggagtattgagccatactctttatagcaagggttgaagaacatatattagtgtgcaagttttcttaaaagaggttggtctggtactatgcaaaataaggagtaaaatgtcctcaaagtcaccatgtcagtctgtgcgtccagagtttatttcagataactgaaattatggctcgagtgagatgtgcctcactttggagtagtataaattgagatctgtgcagtattgatcctagaagtttacaacaaagttaaatactaatattttgtgagtaagtttgatgtggagaggtagctctgtccttataaaagaaattggagaaagagagggatgaacctgactctgcagaagactgaagaagttcagagcagttttggtgcagtccgaaaatatcagaggtgtccccatccactgctcttctagggagttctgggtgtggtatgttaaagggaactggtgtgaaaggggggaatttatctgtcacac

SEQ ID NO: 55548 - DNA, 301 bp, Zea mays
  Clone ID: MRT4577_150655C.1
gggtgctaatttcacaaactaacccgcaaccccagggggggctataaaagataaccccgggtacccaccacaggaaaccccaccaaggggggccaaaaacccacccggaggcccccaagggggggccaagggggggaacccccccgggggggaggggaaacaaaggcggccccggggggcgaaaacaagccaccaggggggaccaaggggggacaaaccggggggggcacaaacgaacccacacacccggggcgaaaacccacgggggccccaacaaagcgagggggggggcccgccgccc

SEQ ID NO: 55549 - DNA, 181 bp, Zea mays
  unsure (1)..(181): unsure at all n locations
  Clone ID: MRT4577_150656C.1
cgcgctcttccgccgcaacgcaacctcgtcctttctcgttgtccgcggaccctcccggctccacgtngggcgcccaggcccagcacccgttcctcacgctcctgggcccgccgttgccgccggacaccgaggcggcggagccctccggggaggaggaggcgccgccggatgaggcgctcga

SEQ ID NO: 55550 - DNA, 1145 bp, Zea mays
  Clone ID: MRT4577_150657C.1
cccacgcgtccgctgctgtttatgctcctgcaacaatgaatatgctccaaactcctccatttcatagcaacagccatgaaaaagagtcaggtgcagttttttcaaatagctttaacatggccccatcagtgacacctacctccccttttcaacttatgtctccaagctcaaccaactacacttccactcaaatcttcgaggaaaccaacaatttagaggacacttcaagagtctttggaggtggggataacgaaagcaacaacagtgaggaaccggatcccaagccggctgtggagatggaagacctaaaccaaggcaatgatcatacttcgaataaaacagctaactgtcaagattaccgtatggtcctgcgcaaggacttgacaaacagtgatgttggaaacattggaagaatcgtgctgccaaagaaagatgcagagcctaaccttccaatcttggaagataaggatggcctgatactggaaatggacgattttgaactcccggttgtatggaatttcaagtacaggtactggcctaataacaagagtaggatgtatatattggaaagtactggtgaatttgttaagaggcatgggcttcaagctaaggacatcctcatcatttacaggaacaagaaatctggcagatatgttgcccgtgcggtgaaggctgaggacatagcgccgccagaatgcgagtgcgtcgaggcaggaaaccctagagaagagtgcggcttctccgtcagtccttcgatcaataagaagatcatcacgtagatggctggagcatcagaaatgtatggtgtaggctgtttgccgcgcaggagcacaccgagaatcggcggttgctgggagccaagcaactgtttcgatcgaggttgtgtcgtcaaagctgaattcccacccaacctgcgtaggcctgtactatactgtttcccttgtttttgtcggccgtttcgtgtagttcgagataaatgatgagtttgcttttgtacctgtatatatttcgtctttggataattcggtgacaaacaagtcaaggtcgttatataccgtctttttgaataattattacgattataagaagtttatttatttattttagatcggtagctaatgccaaattgacaggtccttccccga

SEQ ID NO: 55551 - DNA, 383 bp, Zea mays
  Clone ID: MRT4577_150658C.1
gcgctgcattctctccctccccacttctctctcgtggcgacagcgacgagccgacgactgtgcggccgtcgctgccactctactcgccagttgcccgggtcttcttcgtccccttggaaatcgacggccacaaccagggcaaacaggaagtttcgcaaggatgccctggtgcacgattgatgagtctgaccctggcgtgggcgccgtgcgggtgcggcccgggcgactggttgctgcccccgccagtatcggggccaccttgcctcgccaaccggattccggcggcgtgggctgaccgccctgtcgtcagggagcctcccctaacaagttcaagctaattcaccctctatagacagactaataagactccagcgacagcaacg

SEQ ID NO: 55552 - DNA, 163 bp, Zea mays
  Clone ID: MRT4577_150659C.1
gtgaaactcgcgtgtccctcacgatgcaaatcaatggatcggctcctattcaatgcagggtgggctgtgagacataacccttgtccctaacagagataacgaatgctgtgacatgatgcacagatttgctcattatacagaaaaaaattggccaaaaccatct

SEQ ID NO: 55553 - DNA, 285 bp, Zea mays
  Clone ID: MRT4577_15065C.1
ctgatgaggcgaggccaagcaagacaacctcttctcgcgcagaccggagagatgtgcggaagagagccggagagggacagcggcccactactccccaatccacgcaccattacgaccgccctcctgtctaccactactgctgataggatgatgggtacagggaggggtagttgaaactccatcagtccagtcgttgggtcggtggcgtttcttgacgagcatgcgtgcttcctcaaactagccccagcggcatgttgtcaacaatccatgggccttttggagttt

SEQ ID NO: 55554 - DNA, 874 bp, Zea mays
  Clone ID: MRT4577_150660C.1
tgggtaccccctcgagggccgtgccggggaccaccatctaatagcgccgcaacgcgaagcgcgaagccgcgaggccgcacctacagttccttcgcgcaccggcaccgcggcggcagttcagcatggtggcagcatccgtagccgagcgggcctatgaggcggcgacgcggtccgcgctggtggcgctggagcgcaacctcatcccggacgcggtgacccggcgcctgacgcggctcctgctcgcgcagcgcctccgccagggctacctcccctccgcgccgctccagctgcagcagctcctccagttcgtccactctcttgaagagatgcccattgccattgaaacagacaaagctaaagcccaacactatgagttgccaactacatttttcaagctagtgctgggaaagaatctcaaatacagggataacgagctgtcaaatattgagataattgtagccgacatcagcaagtttgagatggagcgctcttttgacaggatcgtatctatagagatgtttgagcacatgaaaaactacaagtcacttcttaagaagatatccaggtggatgaaagaggatggcctactattcgttcacctcttccgccacaaagcatttccatatcactttgaggataaaaacgatgatgactggatcacgaggtatttcttcactggaggaacaatgccatctgcaaacctacttctatactttcaggaggatgtatctgtggtagatcattggccttgtcagtggcacgcattatgctagaactagcgaggagtggctaaaacgtatggacaagagcatcacctcagtaaggctgatcttcgaggaaacttatgggaaaggatcgactaccaatggatagc

SEQ ID NO: 55555 - DNA, 1444 bp, Zea mays
  Clone ID: MRT4577_150661C.1
gcggtaccctccccaatcactagcctgtggcatagcatagccccaccaaccgcctcgaggccggggcccgaccaatctaatagcgccgcaacgcgaagcgcgaagccgcgaagcctcacctacagttccttcgcgcaccggcaccgcggcggcagttcagcatggtggcagcatccgtagccgagcgggcctatgaggcggcgacgcggtccgcgctggtggcgctggagcgcaacctcatcccggacgcggtgacccggcgcctgacgcggctcctgctcgcgcagcgcctccgccagggctacctcccctccgcgccgctccagctgcagcagctcctccagttcgtccactctcttgaagagatgcccattgccattgaaacagacaaagctaaagcccaacactatgagttgccaactacatttttcaagctagtgctgggaaagaatctcaaatacagttcctgctatttccctggtgattcaagcaccctagaagatgctgaggttgcgatgatggatctgtattgtgagaggtcgaaactacaagatggccaaagtatcctagatgttggatgtggatggggatccctttcactgtacattgcaaagaaatataggaactgcagtgtaacagggatatgcaactctactacacagaaggcttttatagaagagcaatgtagggataacgagctgtcaaatattgagataattgtagccgacatcagcaagtttgagatggagcgctcttttgacaggatcgtatctatagagatgtttgagcacatgaaaaactacaagtcacttcttaagaagatatccaggtggatgaaagaggatggcctactattcgttcacctcttctgccacaaagcatttccatatcactttgaggataaaaacgatgatgactggatcacgaggtatttcttcactggaggaacaatgccatctgcaaacctacttctatactttcaggaggatgtatctgtggtagatcattggcttgtcagtggcacgcattatgctagaactagcgaggagtggctaaaacgtatggacaagagcatcacttcagtaaggctgatcttcgaggaaacttatgggaaggaatcgactaccaaatggatagcttattggcggacgttcttcatctcggtagctgaactttttggatacaacaatggagatgaatggatggttgcccattacttgttccgaaagaagtagaggctactgcttggaagtacccaatcaaaaatcaatgttttcagtaattttgtcatgtacactgacgaacaactccttttctggcacgtagttgtatctcgtaccgacttcgtagtggtttcaaaaacaaaatctggaatccctgttgtgaaatttcatcttggacagcgcctgcatatgctttgcagagttacgctaattcttgcaaa

SEQ ID NO: 55556 - DNA, 602 bp, Zea mays
  unsure (1)..(602): unsure at all n locations
  Clone ID: MRT4577_150662C.1
aattcggcacgaggtttgcctcagatttaaaaatccctatttttaatcattttgcgaggaaaactctagatttaaaatgctccaattcttgagagtttgctatgtggttaacatagatactcgcatatattttatagcttgaaagaattgtgctctagatttcatggctcttcttcataactgttacctgatttttatgattcctggcaaatctatgtatgattgctgactctacctcacgatgggctgaggcattgtgtgagatttcatggagtttgcttatttcaatgatgctcagcgccaggctaccaatgatgctggtaggattgaagggcttgtggttatgaggattatcaatgagcccactgctgcggccttgtcatatggaatgaacagcaaggagggccttgtcggtgaagtgtgttcgtgccggagagcgtggagtgcgaggcctcatgacgcgaagcaagttcggtctgctcgtgcatgtcacccgtcgcgtgcgcgtgtgcccganagcgangaggagtgcaaggcctcacgacgcgctgccaggtccgtgctgctcgtgcgcgtcacccattgctggaacagatgatata

SEQ ID NO: 55557 - DNA, 385 bp, Zea mays
  unsure (1)..(385): unsure at all n locations
  Clone ID: MRT4577_150663C.1
gcgtgtatatacacatatctctttctatgcttttttatatatacactatgnctatnntcccgcccgactatttatttataaaagccaaaactccttataatttttaaattggtaaatatttcttaacttttaactcttcctctttttcacgaaacaaactaatacacacatttcaatgttattaaagatttatctacaaaatcattaattaattaaaaccaaaacccattttacttttacttaattaaactaaattctactattctcttttctacacataacctttaatcttttaaaatacttaataaatttaacctcattcctttataaaaaattatttctttttttttaattaacattcatccctttttttattataaatttt

SEQ ID NO: 55558 - DNA, 555 bp, Zea mays
  Clone ID: MRT4577_150664C.1
cgaaaccatcacgctgcattttacttctacaaatttagatactgctgaattctaaacaataggcgaataatagtagcattcaatactaagaaggtgtcctctaacaaaatatccgagcacattaaccgcgcgctcaaagcacgcaatgtttttctattttgcaacattcttctcaggagcaaccgacgaagaagggcgacttgaggaatcaggagcagcgttcacatcagcccttatgtcgtcggggacaaccacaccaggtctggtcatcaagatcctccccgcgcgaatggctttatccatagctctgtcgcgctgggccctcagagtagcggaagtttcttcagcaaccttgacagccaactgagcggtctctagctcctgggcgacggatttcttggaagcgcgcagttccttgatgacagcatctttagccgatatcaactgcctaaggcgaatcacgtcatccaaagattcctgcagcttataacgatgattgtctaactcttccctggtgaagcggtgactcctctccaaaatgatcaacgagttgct

SEQ ID NO: 55559 - DNA, 1866 bp, Zea mays
  Clone ID: MRT4577_150665C.1
tttcgtacaacttcctccagggcgaggtccccggcacccgcgcgttgcgacggttccccgcgagcgcgttcgaccacaacctcaggctctgtggcgaggttgtgaacgccgactgccgggaccaggaggggctgccgtcatccggtgctccagcgtatggaagcagcagtccggtcgtgaggccggctggcgacggcggtcgggcggcacggaagcacttgcggttcaggctggcggcgtggagcgtcgtggcgatctgcctcatcgcggcgctggtgccgttcgcagctgtgttcatcttcttgcaccacaagaagaagagccaggaggtccgtctcggtggccgtgccagtgccagtgccgcagtgacggcggcggaggacatcaaggacaaggtggaggtggagcaaggccgagggagtggcagccgcagcacggaatccggcaagggggccgagctgcagctcttccgcgctgacggggccagcttcgacctcgacgagctcttcaggtccacggcggagatgctcggcaaggggcggttggggatcacgtaccgggtggccctccaggccggccccgtcgtcgtcgtgaagcggctgcgcaacatgtcgcacgtgccgcgtagggacttcacgcacaccatgcagctcctgggcaagctccggcacgagaacgtcgtcgacctcgtcgcgtgtttctactccaaggaggagaagctggtcgtgtacgagcacgttcccgggtgcagcctcttccagctcctgcatggaaacagaggcgaggggaggacgccgctgccgtggccggcgcggctgtcgatagcgcagggcatggtgcgtgggcttgcgtacctgcacaagtccctgccgtacttccaccggccgccgcacggcaacctcaagtcgtccaacgtgctcgtcttcttctcggctcccaacggcaagcagcagaagcaggcggtgccgaagctgacggaccacggcttccacccgctgctcccgcaccacgcgcaccggctggcggcggccaagtgccccgagttcgcgcgccgcggcggcaggcggctgtcgtcccgcgccgacgtgtactgcctcgggttggtgctgctggagctggtgacggggaaggtgcccgtggaggaagacggcgacctggcggagtgggcgcgggtggcgctcagccacgagtggtccacggacatcctcgacgtggagatcctgggcgaccgggggcggcacggggacatgctccggctcacggaggtcgctctcctctgcgccgccgtcgagcccgacaggcggcccaagctgcaggacgtcatcaggatgatcgacgatatcgccggcggcgacggatcagagctggatcgccgttgagctagctccactgtccacgacggcgaagggtgtgggctggtcgacatgatcttcttgatttcagatttatttgatttctgtgtcataatcgtttcgctttcagtttagcttcccttttcaattgtaacattgcaatcgatgctccctgatcgattgccctggtgcagtcagagaaaaggatgtgaactagtgaacttcatatatgtatgtaagcacaggcagaggcccttagagttgcatctttaatttggttggatgctcactgtttttgtgtttagctggggatgaatgaggtacactggtgcatcaaccatcggatcaaaatattatgccaggatcattgtcatacacattcaagctacaggattaggctgatgtgatttaactgcgctcatcaaattgctatgcgtctagtagattagtttcatgtagagggtatttagcgctgaatatttttggtcagcgtctgtttgtaatgtacattctg

SEQ ID NO: 55560 - DNA, 490 bp, Zea mays
  Clone ID: MRT4577_150666C.1
tgctgactctacctcacgatgggttgaggcattgtgtgagatttcatggagtttggtacgctactcatcttctgtcctcaaatcggtgtctgttaaaataagtaaataacagatagcatattatttataatgtgttttaaaatgtcccagcttatttcaatgatgctcagcgccaggctaccaatgatgctggtaggattgaagggcttgtggttatgaagattatcatgagcccactgttgcggctttgtcatatggaatgaacagcaaggagggccttgtcggtgaagtgtgttcgtgccggagagcgtggagtgcgaggcctcatgacgcgaagcaagtccggtctgctcatgcatgtcacccgtcgcgtgcgcgtgtgccggagagcgaggaggagtgcaaggcctcacgacgcgctgccaggtccgtgctgctcgtgcgcgtcacccattgctgatgggcggttgcttggcaccccaaatgaaca

SEQ ID NO: 55561 - DNA, 242 bp, Zea mays
  unsure (1)..(242): unsure at all n locations
  Clone ID: MRT4577_150667C.1
ataaccaagaccgcgcccaatccaatctgcgctgctctgctaaaggccagaagagcacacagaacacatttacaactagcgcgcgcgggcaatacaantcttttttaaaattacacatttttaaatttaccacaacccaacatattactgttagaaagaacaaatattttttcgcgcactcacggagaggagggaacacctgtctccgatctcctgttggatctctccgcggcgggggaaac

SEQ ID NO: 55562 - DNA, 158 bp, Zea mays
  Clone ID: MRT4577_150668C.1
gaaaggcaccatacttgccaaggaagagcatgctgcgcctgcgccgcatccatagccgcgcttagcgacagtaggacactcgcagagcagtgtccacaggaagccttctccaccgagatgaataccgccctggactaggacaccatgctccggttccc

SEQ ID NO: 55563 - DNA, 461 bp, Zea mays
  Clone ID: MRT4577_150669C.1
gaattgaattgacgcgacactatagatagctatgacgtgcctgctcccttacctagatcctctacagcggagcgccgcccttttttttttttttttttttttttttaggggtgtttgtttaaaaacgaatgccttataattcccaccccaattcgatgcaccatgcaggtcatcatgtctaaaaataacagtatagatccccaaacaccagccacatggttcacaaccaattggttttaacatattgaattttacggccgcaaaaccaacatgagcgggggcccatgggaggccccataatatcttctttattgaagccttggtgacctggtccccggtggggccctttttttggacgctcttgaggactccaacagaacccatttgcctttatgtagggccagcaaaaccccccaaaggttgttccttaaagaaggaacaaacccccttgggcttttggg

SEQ ID NO: 55564 - DNA, 588 bp, Zea mays
  Clone ID: MRT4577_15066C.1
cgaagccaagacgggtcgcattcatatccagcacaggaataaaggagcgtgcatatagagaggttctggtgtactgatgcactctgctctggaggcgagcaaatggttcctgctactgatattgaggagccaggagggagcacatgcggatggaagataccacaaggagcaacagaagcaccgacacctccgccgagctagcgatggaaccaataggcagcgaccaccagcggagaaacctccggttgactctcgggaaacaatgcaatgaaaggcatgaggccacactggatcaagagctagcggactaaagtccttgtggtccgtcatccaaaacactgctgattcaaggaggacaactataatgtgcgctgggcatgcataccgcggctgaaaatgccactacgatacatacactgagcaggaggatgagaagcgcgatggggacacgggacaacggtgcccggtacatgggtgacgactgcgggaacaaccccttctacaactactagcatcatgaaccatacggtgagactgaaggtgcacggtacggttatggtgccctacgtgtgaagaaacaacaggcta

SEQ ID NO: 55565 - DNA, 777 bp, Zea mays
  Clone ID: MRT4577_150670C.1
gtccataaaaccacatattaaatagtagtaatgttaattcaacatctaagtttaaaaaagtagtaaactattgtttttcttgcaacagaattaaactaacgaagataactgggtaccatggcgaagcctggccaagctaatcctcctggtcctctcccatagaggtagcatcccactcgatcgtccaaaccgatggtagggtggagggtcacgtcacaccatcaaccatctcttgtagaatacctaggataacactaggttagtgtttgttagacgacgaccacttaacgttcatcttcatcatggctcttgatcaggccatccatccttaggttcgtccatcagcgtcacctcaagatcaatccaactcttgacctttacatcacgtgatcaactagcgtaccaaaactaaatctgtcttaaaaccacgagatcgacgacgctttctggtcctagcatttcatcgaacacctagggagcgtcgcgctacagctatcttcacctcacactcatgggattcctctcctcgcaaatcacacatacacacataaatccacagctagcaaagtcggcgccggatgcgaaactaaatagagcaagaactgcgggtctcaccgatgcaaacacaaagtgtggacgacgtgcaggtttggcaaggtctccgtgacaagaggagcgaagatgtaaagtgaagtcgatggcaaagacaagatcgacgaccgattcttatattacgtcgagcaggtggcgagcgacgagcatagtagcgtattcaca

SEQ ID NO: 55566 - DNA, 948 bp, Zea mays
  Clone ID: MRT4577_150671C.1
gcacaagaacgcagtttcttcttaactctggactgactggagtactacagctacgtacgtacagtatgtatcttgattcataatgatgatcatatagcagtaattaatggcagcaccagtggcgacatcaccagtaaaacaagcacctagaacacatcagcactctctctaatcctgtccgcccgccggggctactcgtagccggcggcgctgtggagatccgtcatggagaaggacctcggggaccgaaacgacccgttccgcgccatctggccggcggcggcgacgtgcacgctcagccgcggggacgggaacgtgggcggcctcctcgtgccactgagcccgccgccgccaccatgctcctcatcctcgtcctcctcctcctcgtcgtccgcgccctcctcgtcgtcctcctcccctctcgcgctatggcccagactgttgtgctcaaggttggcatgtcctgtgagggctgtgttggagctgtcaagcgggtcctcggcaagatggaaggcgtcgagtcctacgacgtagacatcatggaacagaaggtcaccgtgaagggcaatgtgacacctgacgccgtcctgcaaactgtttccaagactggcaagaagacttcgttctgggaggctgaggccgtgacaagtgaatccgccacacctgccggtgccaccgcctgacaggttcgatgatctggaagtgcccggcaaggcggcaaagaaaaaaaatgtgaatgtatttagcttggatctgttacaaataattgcaaactgctagctcggtctgtacattttacagttgctattcgtgtactgtgatgttctcgtaagtttggggagatgataaaccaatatttgtatgatatatgtgtcgtgttccctaaaaaaaaaaaaaaaaaaaaaaaaaaaaaaaaaaaaaaaaaaaaaaaaaaaactcgagaagggg

SEQ ID NO: 55567 - DNA, 378 bp, Zea mays
  Clone ID: MRT4577_150672C.1
ggaaaagcaaatgacaagcgtgacatgttaattcatggggccggacagccagcgagctatgacgcccttaattaaccaactgtgccaggactccggaacctgacagggaattcttggacaaccataataagttaagggcgccttacgaacccagcccatccggagcttaaacaagcggtggctcactagtccacatgacagagggcacatacaggcaggaggtgcctggtctttgagcaactggacgcatgctaaggacatgtcctgctccactttgaactcgaagaccatcacatgctgctggtacggggggatgtcctactagtgctggacctacgggttgacacatgccgaacgcgtgcgatctctcaccatata

SEQ ID NO: 55568 - DNA, 333 bp, Zea mays
  unsure (1)..(333): unsure at all n locations
  Clone ID: MRT4577_150673C.1
gaagtgtacctctctctcactcttggtcattttctgcacgcaccccctctgtatgatcgtagatactgccgcggctctccttgctctgctgtgatgtgtgtaccccaagcccactgccccccgaagcccactctggggatgcagggtgtgtggcctcggcgtcttcagaactgggtgcttctgctctggagttacccggccaccctcctcagaatggctgttccagctatgatgagttacgtcacatttattttgtatcttggttgaataaaattaatgactttganaaaaaaaaaagggcccnccnntngtgcncctgacccggggaataat

SEQ ID NO: 55569 - DNA, 151 bp, Zea mays
  Clone ID: MRT4577_150674C.1
attacaggccggggaggttttaacctggacgcaaactggttaatttgagtggatctctgggaggcattctgggccaagcagggatgataccaaggcactcactggccattaagggggaaacccgggaccaaataatacagggtgggcccag

SEQ ID NO: 55570 - DNA, 472 bp, Zea mays
  Clone ID: MRT4577_150675C.1
agttcccactagtttagtagatgaaccaaaacatacatatctcacgattagtccacgaccaaataacagtataaaaagcaaaagactctacgacaaaagagtatcgaagaaacgaatcaaatggtaatgggttttcttcttcctcctagatactgccggttcgcatgcattgtcagcgaacctgcgctcacgatgaccgcccagtgaaggactttgccggcctgaacgaccggggcccgcgtcgcgtcccccgcgagccggaggcgggggctgggctgcgcaacggcgcgatcgtcggggaccgggtcagcgcctccgctacctctggctggagcgcctgcgaccggttgagcatgttgaccatggacggcgtctggtaggtgtggacgaggcccgtgagctccgtggagtcaccgcgcgccgtggcacgctgccacgagtgggagctgagcccggacaggatgtaggcgcg

SEQ ID NO: 55571 - DNA, 1810 bp, Zea mays
  Clone ID: MRT4577_150677C.1
caaggtgtgcacgcgcagccgctgctccatcatggacatcatcgccgggctggacgccgccgtcaaggacggcgtcgacgtgctgtccttctccatcggcgcctactcgggcacgcagttcaactacgaccccatcgccatcgcggcgttcaaggccacggagcgcggcatcttcgtcagctgcgccgcgggcaacgcggggccagagcccggcacggtcggcaacggcgcgccgtggatgctcaccgtcgcggcgggcaccatggaccgcgcgatacggaccaatgtcaagctcggcaacggcgaggagttccacggcgagtccctgttccagccgaggaacaactccgccgcggacccggtcccgctggtgtaccccggcgcggacggcttcgacgcgagccgcgactgcagcgtgctgcgcggcgccgaggtggctggcaaggtggtgctgtgcgagagcaggggcctgagcgaccgcgtcgaggcgggccagaccgtggcggcgtacggcggcgtgggcatgatcgtcatgaacaaggaggcggaggggtacaccaccttcgccgacgcgcacgtcctcccggcttcgcacgtcagctacgagtccgggtccaagatcctggcctacttgaactccacggccaacgggacggcgagcatcgacttcaaggggacgattatcggctcgtacccgtcgccggcggtcaccttcttctcgtcccgcgggccgagcaaggcgagcccggggatcctgaagccggacatcacggggcccggaatgaacatcctcgcggcgtgggcgccgagcgactcgcacacggagttctcggacgcgtggcggggccgacctgtccttcttcgtcgagtccgggacgtccatgtcgacgccgcacctgagcggcgtcgccgcgctcctcaagagcctgcacccggactggtcgccggcggcgatcaagtcggcgatgatgacgacgtccgacgcggtggaccgcacggggctgcccatcaaggacgagcagtaccggcacgccaccttctacgccctgggcgcgggctacgtgaacccggcgctcgcattcgacccgggcctggtctacgacctccgcgccgacgactacatcccctacctctgcgggctggggctgggcgacgacggcgtcacggagatcgcccaccgccccgtcgcctgcggcggcctcagggccgtcaccgaagccgagctgaactacccgtccctcatcgtcaacctgctggcccagcccatcgcggtgaaccgcacggtgaccaacgtggggaaggcgagctccgtgtacaccgcggtggtggacatgcccaaggacgtgtcggtgaccgtgcagccgccgatgctccggttcacggcgctggacgagaagcagagcttcacggtgacggtgcggtgggccggccagcccaacgtcgccggcgccgagggcaacctcaagtgggtctccgacgactacatcgtgaggagccccctcgtgattccagccaagggagagtagtagcgcggagcagcggcctggcggcaacgctctttgtgctgctcggggttcaagaaggctaattttgcgaccatggtacagagtatgtctgtatagcgtctctaggctacggcacttgcacaccgcatgtttgtataggctacgaaactatggagtatgaactggagttcttctcgctcgacgtgtgctatgctatctatctcattcccagctgcgattttgttctgtaaaaaaaaaaaaaaaaaaaaaaaaaaaaaaaagtactctgcgttgttaccactgct

SEQ ID NO: 55572 - DNA, 124 bp, Zea mays
  Clone ID: MRT4577_150678C.1
gcgggctaaaaaacccaggcaaattgtattgctacatttgacgatagagactggggaacctaggtcatttgactcatggaaaaggcttctcacaattagcgctaggcctatccttactaaaaga

SEQ ID NO: 55573 - DNA, 588 bp, Zea mays
  Clone ID: MRT4577_150679C.1
gggtgtcaagtctcagcttttttttttttttttttttttttttttttttttttttttttattttttaactttcttttttgttttttttttttttttttttttttttttaaacaaaagaacccccaaggggggggaggggaaccccccttccgacccaaaagaaaaaaaaagaccaaaagaccacctccaactcccaccaaaaaaaaaaaaacccgcctaaagaacaaaggaaaacttcggcctgggaggggggcttggctccaaccccccaaaaacccccagaattcggcgcaaggcaaggaataacttgggttttcaacaaaagccccccggggccttacgccacaaacaaaaaaacagtggagaccccatgacccccggcttagccagaatttttccgcgctctaccactgggggggaggaggaggataagctgatgcaaaaatctcccggggccccttttcctttttataagggggaaaaatggggggccccttcccccccgggggccccccccccccaaaaaggacgtgggggggtttcaccgcccaaggagcagcaccaacctcccccccagaagaggggggg

SEQ ID NO: 55574 - DNA, 573 bp, Zea mays
  unsure (1)..(573): unsure at all n locations
  Clone ID: MRT4577_15067C.1
gggttggcggggggaannnaaaccccaccccttttttgggggatttaccccaaaaaaaaccaaagggggcgactttttaagtcaaaacctcaaccttcaaaagggttcaacccatcctggtgaaaaaaatttttgggtccaacaaaaagaacccaagggggggggggaaaccaacaaaccctcttccccggtttttgacccccaacccaaaaattttttttaaacgaggagttccttttagggggcccccaaggggccccaaacaacccaaatccccaggaccagaaacatttaaaaaaaaccatggtttactcccccccccggggggggagccccaggggaaaagggccctccttttggggggggaaccctgcaagggggcggccttcctccagttggttgccaaaaaaaaaaaaaccgtgggtggttgggggggagcccctttttgccccggatttttgccttaacgtggcgaggggggcggggccctcacccccccagggttgggccttcccagccagggccttcccaaaattcggcccccccctcacggggggcgccccgggggggggg

SEQ ID NO: 55575 - DNA, 831 bp, Zea mays
  unsure (1)..(831): unsure at all n locations
  Clone ID: MRT4577_150680C.1
ccagtggagtcgccgcagtcggaggagaaggacgtggactccggcgcggctgctctaccaaagctgaagccgctgcactgggacaagttccgcgcgagctccggccggccgacggtgtgggaccagctgaaggcgagctcattccgagtgaacgaggagatgatcgagacactgttcgtctcaaactccacgaggaggatgcccaagaacggattcaaggaggcaaatggggcaccctgcaaccaggagaacaaggtgctcgacgcgaagaagtcgcagaacatcgcgatcatgttgcgggcgctcgacaccaccaaggaagaagtgtgcaaggccctccttgatggccaggcagatagcctaggaactgagctgctggagatgctgctgaagatggcccctaccagagaggaagagctcaagcttagggaatacagggaggatgctcagtcgaagctcggctccgccgagagcttcctcaaggcggtgctcgggataccgttcgcgttcaagagagccgaggcgatgctctacatcgccaacttcgattcggaggtcgattacctcaagaccgccttcaaaaccctcgaggctgcgtgtgaagagctcaggggcagcaggctgttccacaagatcttggatgccgtcctgaagaccggtaaccggatgaacacaggcacgaaccgcgggaacgctcacgccttcaagcttgactcgctccctcagttggtcgatataaagggcacagatggcaagacgacgctcctgcacttcgtcatcgaggagatccccnagtccgagggtgccacattgtagccacgagccaacgaa

SEQ ID NO: 55576 - DNA, 196 bp, Zea mays
  Clone ID: MRT4577_150681C.1
gcaacctggcggagagcacttgttcatatgttacgccggggttcagattgagagatgcacgtcgtagcttcaggctgacctgtgggggttttggtttttcaagagctgatcactaagttgccatgatttcattacctaggcgcaatttatgaacctttgcttagtcggctagataattgcggccactttttaaagc

SEQ ID NO: 55577 - DNA, 370 bp, Zea mays
  unsure (1)..(370): unsure at all n locations
  Clone ID: MRT4577_150682C.1
atnttgcgcagttccaacttccaagaagcggagagagagaggggcttgagcttcgatctatgtgtccgcagccgcgatttcgaaagggagtgcaagagggggaggcggcgagtccaagattttagttggagtgaggggagaaagctgcgcggcgacgacgcccatgcgcgcgagctcggccgctgtgtgaggagtggtggtggaagcaacccaggaggagagaggatgacgggggtggtggtggtctccacggggtgcaagggcggaagcgtggggaagaagaggggcggcggggaggaggcggaggagcgggagaggcagcagctgtcggtgctggcgctgctgctcgcggccgtgcggaggtctgtgt

SEQ ID NO: 55578 - DNA, 377 bp, Zea mays
  Clone ID: MRT4577_150683C.1
gtgcaaaagaaggtctttagtttcaccaagatcggcagatcgccaacatccgtctgcctctcctctccggtgccggcgactgacacaccacagggtcatctgcacaccaatagggtctgcgacaatgtctggacattcattctaacagatgcaaccttcaagagcgctgagattcaagaaacaccgagcaagatgggtctcaatgcggtggtagccgcctgctacgtctttccagtacttgtctctgtgctcgcagtccgcttcttctacgtactgtggcacagtggccaaccagagtcaaggttgtgcgccaccagattgcgttgtctcattgtccttggctccggagggcataccgcagaaatgatgaacatagt

SEQ ID NO: 55579 - DNA, 379 bp, Zea mays
  Clone ID: MRT4577_150684C.1
aattccaaaacattttggggatgggaaagccaagaacaacagacagaatacacgtttacacgatcactggttcaaggtccaaacaaaaaagatgggttccgggggacaacattttatggtcttcagatcgcaaacgatttgaagcctggttgggaataccgaaatactcccttttttattttttcctcgggcgcgtacgggggcatttcctccttttgggggttttgccttttgggaccggggggggcctcctcctcactcctcaaaaaatgggcaggggcttgccgtcccacttcttgagggagtcgagcatgggggcgatgagcttgcccttgctgggggccaggaacaccttgttgcacttcttgccgggggactt

SEQ ID NO: 55580 - DNA, 301 bp, Zea mays
  Clone ID: MRT4577_150685C.1
accgtcgtcgctacgttccaggggctctaggacaccggcaggctccccgtcttccttcgctggtccataagcctcggcagcgtcagcaacgagatggaaggatccggtgcatgcatgtgtgtacgttctacggtaacaagaagttttagacgctgtcatacctgccggcgctttcgatagacgacctgctgaaccatgctgactacctgctgttcaacagttggataccctggcttgagttcaccaaggtcagcttcttgtaccgtcgagaacgttacctatattgagctactaccactgg

SEQ ID NO: 55581 - DNA, 446 bp, Zea mays
  Clone ID: MRT4577_150686C.1
gaggggagtcgtattttcgactacagatgtacgcaacatgcaatccagggaagcaaactggtcttcacaccgtgcctgcctgcaacatggggggggggataagggccaaccacccgctgacaagaccacacaacatggggaaaacgctttcaacactttgttaagaggcactgaaggtgggagacacgctctacccgctacgcgtggcgaccgagacctcactgacctcgataaagcgatgactgcctcctacgcgccgttagtccatctttatcaacatatccaggaccgggtcagatgctcaccatgcaactcgctcgcggagcctacaccattgatgatgtcattctggaactgagtccatcaccaatgaccgagccggggattaattgccctcagctgcaagggtgcatcatgttaagcgctaacagaggaggacctgtctg

SEQ ID NO: 55582 - DNA, 289 bp, Zea mays
  unsure (1)..(289): unsure at all n locations
  Clone ID: MRT4577_150687C.1
ataaaaaaattccgaacagaattctggttagctnataaanattccgacttggacactttgtagtaagggaatatgtttgcacccacaaactggcatgaaatcccccccaaaacaaatagcaaaactttttaaggaaaaaaacctcgggacaataaaagggccccttgaactttaaacgcaaaatcccaaaagaagggcaccaatagacccggcaaaaaaccccggggagacccgaaccttgtccgggaccggggggaacggggaataaaccgggaaactggatttcaaa

SEQ ID NO: 55583 - DNA, 523 bp, Zea mays
  unsure (1)..(523): unsure at all n locations
  Clone ID: MRT4577_150688C.1
cgtccgtatcccggtcgaccccgcgtccgccccgcgtccgcccacgcgtccgcggtcgcgtgggcggacgcgtgggcggacgcgctgtgaagaaacgagtgtcccaacggaccgatatccggcagtgcgtcgcctgcctactcgtgtcatatgcacgattggtgaaacttcttcaggttagctattatagcaagtctgtgctctcagggctcgtgatttctacaggtggtttgcaggagtctttgaagaaagcttcaatgtcagctttggtagggtatctccaagattcagacatcaatactaattgtgaagggaaaagtagagagtatctattgagttgtgatcttctatggggcctccagcactaccagaaatgngaccgngtaattactcccatgtncaagactattgaggctctcttcagtaaaaaggttttcttgaacaaggaggggnacagngagttctacagnggactgggagatnccgngagctctgaactgaagggatccaaggattttacaaa

SEQ ID NO: 55584 - DNA, 330 bp, Zea mays
  Clone ID: MRT4577_150689C.1
accccccaggaaaacaaggggccacttaacgggcgcagagtggcccgcatcgggttgggggtttattgttaggccaagcctgctccctaccaggcagcaattacatcgacctactatgaccgacccttaggtggctgcttttgcaacccgctcaactacctggactgataaatacggggagactactggttccatcaattctgtggttggaattgcctttagcgccactcaaaaatgggcagatcaaacggctaattcttgggcaggccttaagtgtgttttgacaatgacgacagggagagcgcacaaaacgcctttgctggcgatttt

SEQ ID NO: 55585 - DNA, 480 bp, Zea mays
  unsure (1)..(480): unsure at all n locations
  Clone ID: MRT4577_15068C.1
gctgngaacgaggcctgcctgttgccggcactggccgtggccgtggagggcgacgccagctccactatctccttgcccgcgcccgacactgagcgtggcgccgggaacgcgaagccgctgccggcgtcggagccagacgggaacgccatccacttctccaccatctcggccgcttgccttgacgatgactccgccatggatgcttccccccgaagactacgtacgagactctcgcgatcaacggcggtaggacaggtgcgggagaacgaccatctgccgaagcaagcaccgcttcaaaactagcttgacgccgctctctgtccctcccgtgaaccaatcaatcacgcggctatggtacagtttgctcaggggccgcggggaggagcctccggacaggcgaccaagaaagtagagcagagacggaaagaatggcggaagaagcagggcaggcacagcgagcggataatgcaatccggcgcc

SEQ ID NO: 55586 - DNA, 252 bp, Zea mays
  Clone ID: MRT4577_150690C.1
agctccgaataattcttttgtttgacaaacacaatattatttcacccgataggctatcgctctggtggggtggtttcaaaacagaaacggggaacctagccgccatctctcctcctataccgagagatctcctctgccgatggatgattattcaaaccaaatggtttgtgatgctgtagaagcggaacatttcttttcactctcctttagatgccagatgcgcggcagttattgcatgtaaacatagcaagg

SEQ ID NO: 55587 - DNA, 546 bp, Zea mays
  Clone ID: MRT4577_150691C.1
acaagcttttttttttttttttttttttttttttttggtttttttttattttttgtttttttttttttttatttttctctttttttttttttctttttattgttaattcctttaaaaaggccccccgggccggagcaccccaaaggggaaccacaccaaacggagggacggccaaaggggaccccagcgggaaaccaaccccggcgaaaaaaagcccaaaagccggcccccccgaagaaaaaagttccaaacccaaggggcccaaaaaaaaaaaccggaaacaaaaaggggaaaccccggggggcccaaggaaaaaacaaacaacccaaaaagggggggggcccaaagaccccccccaaaccgggaaaaagggggaaccaaaagaaaaaacgaatcggccaaaccgcggaaaaaagcgggtagattaggggggcccccccccccacccctaccaacaaaaaaaagggcgggggcacggggtttcagggagcgggaggcccccacaaaaaggagccccgaaacaaagcccaccaaacagccgaaaac

SEQ ID NO: 55588 - DNA, 1074 bp, Zea mays
  Clone ID: MRT4577_150692C.1
cagagaatgaggtactatgcacgtgcagtggaagtaggcatcttcccttctctgggccgcacccgcagtcccgcaccgccacgcgccagagaccatgtggcgccgcgccggagccgggccgctcctccaccacctcgctgcagccgcctccgccgccgccgccggccgctgcattaatggacggccgctacctcctatgcccaccgcctcttggtcccccctgttccagcacaatcttggaatctcgtggggttccgcttctgtcggggctcccttccggagcctgtcgaaccagtcaagcggcggcggcgcgtgctggagctgcggtgcgacgggcgcgttcctctcctgcgggtcctgcgggagcgtgcagcctgtcgaccccgccgtcgactacttccaaatatttggcctaaaaagagagtataatataacggataataacttggaagggaagtacaaggactggcagaagaagttacatcctgacctagttcactcgaaatctgagaaagagaggggctatgctgcggagcagtcagcacttgtgatcgatgcataccgcacactcagcaaacctttatcaagggcattgtacttgttgaaactcgagggtatacatgtggatgaagaaaagactatcaatgatccagaacttcttatggagatgatggagatacgggaagctgtcagtgatgccagtgattctcaaaccctggagaagatccaatctcagattaaggcaaagctcgaaacctggtccgattccttccaggaggcatttgacaggaaggattttgaccgtgcgatggaagccacacagagaatgaggtactatgaacgtgcagtggaagaaacagtgaagaagctctgagcctctgatcttctgttacagctgccaaaggtggtgaggcttgtgtcttttcgtacggttccttgcagatccccctgtgctcacgcagctacattgcaacagtaacatagtacagagtaggtcttttttttacttatacgttgcaatgtattatatgactacattggaatatgttactgtagctacattgcaccagtaat

SEQ ID NO: 55589 - DNA, 312 bp, Zea mays
  unsure (1)..(312): unsure at all n locations
  Clone ID: MRT4577_150693C.1
actctatctttgctcgaggcaagccgtatgctgattcaccaacccataaacacggtgctaatagcagctattaaagaaaaaccgggatggacagatcncttttttattcttaccagattaaaaaaatcttatccatcttttaattacaggtgcacagagcgacactactcttctcaatgacatgacctccactcaataattgacatttttattcatctctactccatacgtacatgaagctcattcattctatatcctccctttcatttctttgatgaactcaccaatgctcggggaatctcgacccacaac

SEQ ID NO: 55590 - DNA, 432 bp, Zea mays
  Clone ID: MRT4577_150694C.1
gagtatccccttcccttcatcctcgcgaggaggcagcaaagccgagcaagcaagcaaggaagctccttgctgctcctccagatctaggcgaggtcggagcctcggagggggagggcgcgctggggtcggcgtcggagatgaaggcggcgctgcggagccggcaggagccgcggcgggtcagcaacggcgtcatcatcgccgccatgctcctctccctctgcgtcctcagcatcgtcaaggccagatactgctccacccccttcggcaagccggacgaccagctcaaggagcagatgaactccagcatccggatggagaccgacgacgagcccacgcccgccgccaccacggtcggaggctcacaggaggacgcgcactacgatgccccatattaccgtatcatcccatcaatcccattgcctatcccccacc

SEQ ID NO: 55591 - DNA, 702 bp, Zea mays
  Clone ID: MRT4577_150695C.1
cccacgcgtccgcggacgcgtgggctaagccacttatgcagctctggaaggactgcactgaggtcaagtccacaaaagcttcttcaggtcacttcataatttgagggcagcgatcatcatcacaagaaccacaaccgaaaaactcaccacctcaggctgggggagagtatgagatggaaacaggtggtctgccgatggatttaacagatggcacccacgcgtccgcccacgcgtccggtgcaaaatatgacagagcttacaatattcttcacagtgaccatagtgttactcctggaagtcctgggttaagtcgcaggtctgcttcaagctctggtggctctggatcggcgtttatacaattggatccagaagtacaattgccatcaggaagtggaaggtgactgttgacttatagtaacagcagcatgtcacctatatactgaactatgactatgtgatattttggtactgaaagaacttgtccatctaaagttgttttcgtcatcacaacagaacctcttattgtatatgctcgtaactagtgagtgcagaaactaaagtgtgtaatctccttgatgaagtggcaggcaaataaaaaaaatgtctagctccccactgtccttcagtgtctttgttagtttcttaaagtgaccatgtcatggttattgaacacaggtccaaaagggggcagcattcatctgc

SEQ ID NO: 55592 - DNA, 240 bp, Zea mays
  Clone ID: MRT4577_150696C.1
ccgacgcgtgcgctctctcctgcgttccatggtctctcaaaagcgctaccgggggtcgagacatacttaacggtcacatgaaatgcaaccgactatgatggggattctgctgaactgtatgcgttcaaaaggacaactatattgatccgccccaccactgtgcttgtgatcaacctgcttggcataatggctggcgttgcacttgctatcatcacgttgttccaatgcatcacttccact

SEQ ID NO: 55593 - DNA, 864 bp, Zea mays
  Clone ID: MRT4577_150697C.1
actttgagagatttgacatagcagatgatgagaccacagtcaatatcactcctgatgagtacccacaagttccaagtacgctgattccgtcaccacctaggcaggaagacatttctcaacaagaagaaccgtactacgctgacccctcccctgttcatggagaaccgcaacaggggggaccagaggaccaagcggaacagaagatgaagcaaccaccgaaagcatcaaagcggaaagcacgttgggaagtcccacgagtaattatggacaataaccagatgatgatcccaggaaacatatatcagacatggctgaaggatgcatcaagccttgtctcaaaaaggcgtaaacttaacagcaattttaattttattcgatcaacgccatcaagtgatctcatgcacatccccccggttgctctaatatctcatgacaacttgttctcagaattatgttatcctaagccacttatgcagctctggaaggactgcactgaggtcaagtccacaaaagcttcttcaggagggcagcgatcatcatcacaagaaccacaaccgaaaaactcaccacctcaggctgggggagagtatgagatggaaacaggtggtctgccgatggatttaacagatggcattgaaaaactcagggcaaacatgagtgcaaaatatgacagagcttacaatattcttcacagtgaccatagtgttactcctggaagtcctgggttaagtcgcaggtctgcttcaagctctggtggctctggatcggcgtttatacaattggatccagaagtacaattgccatcaggaagtggaaggtgactgttgacttatagtaacagcagcatgtcaccccaaaaggggg

SEQ ID NO: 55594 - DNA, 332 bp, Zea mays
  Clone ID: MRT4577_150698C.1
aatacgcggccgcaccttttttttttttttttttttttacttttttttgtaatagatttttagttttttaatttttttttttagttttttttttttggttggtgcaaaatactttttttttataatttttgtatttaaatctatgacactaattatgatagaagagatcagaagcgatgaatggtttcagaaaaatatgaacctatcaaagaaatataaaagaaagaattaatgtcgatgatgaaaatgcagattaagatgatcctgaggaaataatgaggatgctttaaaagatgaaaaaggtactttaacaattaatggataaaacctaa

SEQ ID NO: 55595 - DNA, 2152 bp, Zea mays
  Clone ID: MRT4577_150699C.1
actgagcgttgtctgcttccctgcctccctccccttgcccagatggccgccttccgtgtcctctaaatcttccgccgcagcaagcttctctcacttgccggctgtcctgctgctccttccaatggcgaccaagagagggaacgcgaggggcgtcccggtgggggtgctgctggtggccgcgctcctcctttgctccttggctccggcttccgcgtcctcgtaccccgcaagggtggtgagcgggttcctctccaatgcggcttcggcggtggtgaagcggctgtggtcgctcaaatccaccaccaagatagcagcgagcgggggcaagtcgatggtgaagtacgagggtggctacaccgtggagaccgtcttcgacggcagcaagctggggatcgagccctactccgtggaggtcacccagggcggcgagctactcgtaatggactccatgaacagcaacatctacaggatggcgctgccgttgtcccgatatagcaggccaaagcttgttgctggttctccagaaggatttcctggtcatgttgatgggaagctgcgagaggcgaggatgaaccatccaaagggatttacagtggatgacaggggtaacatctatgtggctgatgccatgaacatggccattagaaagatcagtgatacaggggttacaactattgctggggggaaatcaggcagaggagggcatgttgacggaccaagtgatgaggcaaaattttctactgattttgaagtccgttacattggcagtagctgctcccttctggtgattgacagaggaaaccaagcaattagagagattcagctccactttgatgactgtgtgtaccaatatgaagctggttttcctctaggagtcgcactacttctcgctgccgctttctttggctacatgcttgcactgctccaacgccgagttttagggatgtattcaaatggagatgaacaggaccacgagagcccagtaaaagcaaaattagccagcattccacctccataccagaagccactgaagccttatgttcaccccttgctaattccaaatgacgacgaacctgtgaaacaagaggaggaagaagggctctttacgtcaattggcaagcttgtgggtggagcaaaatcatcaattgcagagatcattggcgccgcattctccagaaagaagcgagcgaacgttcatcatcatcagctgggtaggccaacctcctggccagcacaagaaagctatgccatcccgcgggacgagaccccaccgccgctggacacaagggcgcccacccctcgcaaaaactacgccttcatgtccaaggagccggagaagatccaccacatccggcacggccggcctcagttacatggctggaccggagaggcacagcagccgccgcagccgcagcaggtgcgtcaccaacagtacgtgcaacaccacaggcagtactcggccgggccgcagaccttctacgagccgaactgcgatgcaactaaggagatcgtcttcggagccgtgcaggagggggataccagccgccgtcccgtggagatcaaggccgtgaaccatggggacgcggcgccgtacgagcagaacgggctgcgattccgcagcagttatagcgtgcgctacaatggcaataactagtcgagtcgaggagcacttctgtagctgtaatgtaactgtaaggagaggagcgatagagagagcagtcgaggggagtacaatctcctcattgacaagtgcaacagaaaagctggaattttggtagaagagcttggtgataatggtcattggactctttactggcggtgacatatataaatatagcgtgtatttttcttgttcttcttgggtctacttctatttttaataaatcaccttgcgtataggcctatctttaataaaaaaaaaaaaaaaaaagcggccgccgagtccaagctcgtctcctacggatctgtatcacgggaagcacatctgctggcctacaccagattcttccatggttgtattatcacaatgtcattggtgtttcacatttctttctattagttgaaggagaggctgcaaagccagctgtcacctctgttcttgaatctattcagccgcatttggaatgagacttggctagcaggtttcttttac

SEQ ID NO: 55596 - DNA, 392 bp, Zea mays
  Clone ID: MRT4577_15069C.1
gcgattgggccgagctcggcgtgcggagccgccagcgggaacgggcttttttggggaagcaacgcctgcttctggaacctcccgttcgccatcatggcgttggcgtggtgacccaaactcagtgaaagattaaaaattcaagcgggattgctgcggctccggccacagatctcgtgcaggaaccaccgcatgtgcagaaaaccgaaaactagccgcgaattcgaatcaaggacgcatacacaacggcactgaatagtcgcacgtcagacccaagatttcccgagaatgaaagcgagaaaaaaaataaaccgcgggaaacaaacgaagctaaagcaatctcgaagaaatccgcggttgggaaaaacggaaaaccggctggaattgcgccaact

SEQ ID NO: 55597 - DNA, 789 bp, Zea mays
  unsure (1)..(789): unsure at all n locations
  Clone ID: MRT4577_1506C.1
tactgatgttttttgcaagtcctggacaactacataaaatggtgtaggtacttgggcaggcgtgttgcatggaccagccttgaagcagtaaataagaaccggaaaatatattggttgccctctactttctgatttggggtgaagctgcgaatattcgttttctcccagaatgcatatgctatattttccacaatatggcaaaggaactcgatgggattcttgattcatctgttgctgagactgcaaagagttgcactactgagggttccacttcatttcttgagaaaataattacaccaatttatgataccatggcagcggaggctgaaaataataaagatggaaaagctgcacattctgcttggaggaattatgatgacttcaatgaatatttctggtcacgctcatgctttgagcttggttggccacctgcagagggttccaaatttttgcgcaagcctgctaagaggaaacgtacaggaaagaccaattttgttgaacatcgcacttttctgcatttgtaccgcagtttccaccgcttgtggatttttctgctattaatgttccagctcttagctattattgcctttcaccatgggaagatggacattgacaccattagaatactacttagcgctgggccagccttttttgtactaaacttcattgaatgctgctttggatgtcatactcatgtttggtgcatataagacggccagaggttttgctatctcaagaatagntattcgatttcttttgttaactgcagtttcacatttgtaacctatc

SEQ ID NO: 55598 - DNA, 185 bp, Zea mays
  Clone ID: MRT4577_150700C.1
ggtcctttttctgagtccttgctgccttctttatagagacaggagccttggtagtggttaataaacgattgcatgttgtcggcgtaccaaatgcaactgtaattgggccctgactaacaccccggggacatagccaacaaaatggaccctgccagtaatggaggatgttcactggcacaaattgg

SEQ ID NO: 55599 - DNA, 766 bp, Zea mays
  Clone ID: MRT4577_150701C.1
ccggattgttctctccgccggcactgctccccacaatgctgctgctgcagcctcacgacggctccccctgcgagttggccgggctcgccccaaggcgaagccgtcgcctacaccgctgctccagccacgaacgtcgcaggtggtccagccctccactttgccactgctcgccacgatgtcactgctccttgcaacggcgccccctaccctatgcccgccggccggccccgctgcttctccagctctactgcccctgtcagacacgaccaatgcctcgcaggcggagacagcatccgaccccgcgaacataggcaccgagggcttcacaccatgcttcaccagagcgcaaaactccctcatcagtccaggggagggactctagcaaacgacggatctgccaatgggaaggaatggtttcatacaggcttaaaggttgatgggtggccaccctcgtcgagctgacagtgaggatagtgtgtgacaaatagtctgtctccgacattgaccagcatgctccactggcgctgctagaggtgacgctgctagaggagcagttgccgcaagacgcaggaatgggcgagcagccaccgccaggttctaaggccggagggtacgagcaggtcagcatgccgaatctggggaggaccttgtgttcgaggtactgatgtgtgtggaggtctggacacagacggccccgaccccgtgtgaactaatttgcgagacaacaccctgcatcattatcccacccacaatgttaagcccttac

SEQ ID NO: 55600 - DNA, 1006 bp, Zea mays
  Clone ID: MRT4577_150702C.1
ccacgcgtccggacgaggttctagcacaaccaattccgaagggccaaactgttggaaaacactggaggtgcgtcgctgatgtgtggtcatgtggagtaacgctgtacgtgatgctggtcggtgcatatccatttgaggacccagatgagcctaagaatttcaggaagacaattcagagaatattgggtgtgcagtactcaattccagactatgtccacatatctccagagtgccaaaatcttgtctctaggattttcgtcgccgacccagccaccaggatcaccatccctgagataaggaaccatccatggttcttgaagaacctgccagctgacctaatggatgacagcacgatgagcaagcagtacgaggagcctgagcaaccgatgcagagcatggatgagatcatgcagatcctggctgaggcgaccattccagcagctggtccccgtggactcaatcagttcctgaacgacggccttgacctcgacgatgacatggacgacctggactcagataccgatcttgacctggaaagcagtggggaaatcgtgtatgctatttgacagcagcgaggcaatgtgtatcatcagtcgtgctcagatcgtttgttgcgccgcaggttaccgagataattagagagacaggggggaggtatctgctggagatgctgctcgtgtctgatgccgtgatgccccccttttttcatcctgttatgtttggctgttgtttggttgtggtgcacctccagtgttttacaacagtttggcccttcggaattggttgtgctagaacctcgtccatctgagaagaccctttgtttttgcatccccagctaagagagtgaagtacttgtataattatactgtttgtgtcatatgtatttggtgtaggaaaataaagaaactccattgcccgttcttgttcaaaaaaaaaaaaaaaaagcggccgtgtctcacgaattttttgagaaccctctcaattttagtgtctttttggctgctgt

SEQ ID NO: 55601 - DNA, 261 bp, Zea mays
  Clone ID: MRT4577_150703C.1
cgagtacttttttttttttttttttttttttttttttggattttttttttttttggttttttggttttttttttttttttttttgataaccaaaataaaaataagattgggaaaacatttacagtaagggaaaaacactgatattatcaacattaaggacgcaacatttgttttcttgtaggtttgggtgaccaaacacttaaacagttgccatagacggttgaatttttgatttacttgaaaaaggggttacttatatat

SEQ ID NO: 55602 - DNA, 206 bp, Zea mays
  Clone ID: MRT4577_150704C.1
cggacgcgtgggccagccgtgggccgaggccgccgctcgacgacgaccgggtacaacatggatctctctccgacccttgactggatcgggcgaggagctacagctatggatccggtcctggctccgagcacggccatgaacctgtcccgcgacagcccgcgggcaggtgtttcgactacaggacgtacgctaacatcagcggctac

SEQ ID NO: 55603 - DNA, 1823 bp, Zea mays
  Clone ID: MRT4577_150705C.1
ctcgaggggggcctcgagcggggccgggccgggaattcaccctcaccccttcggctattcctcgcccccttcccttctcgaggattcgcgtaatcgtcaccatgcgccgcccgtggaggcactcgggcccagggtccgccgtcgcggcgcgccacggcgccgcggacctctgcctccgcgaggtcggggacctcctgccgcgacgcttcgcccgccgcgcggccggttccgaggaccttgtaatgcggctccagattcaccggaagcttgacaggcacacgggctgcgtcaacacagtgggcttcaatgaggtcggtgacaccctcatatcggggtctgatgatcagaaggtgatgctgtgggactgggacactggcaccgtcaaattagagtttcattcaggacatggcggcaatgtgttccaggcacggttcatgccctgctcagacgatcggaccattgtcacttgtgctgctgatggcgaggtgaggcttgccaagatacaggatgctggagacgtgtccacaacattgcttggtgaacatgagggaagggctcacaatttggctatagagcctggtagtccttacattttctacagctgtggtgaggaaggctttgttcaacattttgatctcagaacaaacacagcctcaaaactatttctttgcagaaactccactaaatcagtatactcatctcttgttcacctaaatgcgcttgcaatagatccgaggaacccaaatctttttgttgttggaggaagcgatgcatatgctcgtgtgtatgacattcgcaagtgcaagtgggatggatcatctgattttagtcacgcatctgactgctattgcccaccacatcttgttgacaataagagtgttggaataacagggattgcattctctcacctgagtgagttgcttgtatcttacaatgaagagaatatttacctattctctaaggatggagggctgggacctgaccccaaaaaatctgttaggattggagcaattgaagggtgcaaatcaacaatgctagcatctggacatgatgtttctcaacctgcacctcagacatacgtcggtcatgttaatcgtgaaacggtgaagcgtgtgtctttcattgggccaaatgatgaatatgttgccagtgggtcagactgtggccggatctttatttggagaaagggagatgggaagtttctacgagccatggagggtgatgagtgcattgtgaattgcattgagcctcatcctcatgctatggcaatcgcgagctgtggaattgataatgatgtaaaagtttggactccctctgcgattgagcgggcacctatgatacatgttgatgagctccagttgagacctcgcaagagaagagccaagctctggcgctttggcatacgagacctgttgatccaacagatactggtatcggaaaataggcaacagtcagctgaagaaggctcatcagaggaccatgaggacaacatagaattacttgatctagtgctacaggctgcagttgaaggtgtatcatcatcatcagacgaggaggaggaggacgacgacgacggcgataatgaggaggcggcggcctctgatggctctgaatagtagtcaaccgatctttcagggttgtttcaaattgtaaatatacaataataagccatcactcttctcatgtattatataatagaactatgatttattagcttgtcatttctatgttataaatctgcttttagtatgctactttaatgaaaaaattgggctaaccaaattgtgtgctatgttatgaaaatctgaaatggtgttgcgtct

SEQ ID NO: 55604 - DNA, 468 bp, Zea mays
  Clone ID: MRT4577_150706C.1
gtactcttgttacaaccgtccaatttcaaattctgccacaagagcaatcgtgtcacattctataaggatatagctaggtttaaagccgcaccaaatcatttgctgtccacaaccatggggcaaaaaaaccaacgcataagctttatctacaactatggttatacttttaggcaagccaagacattttgtagccacctcgtcgcctttgcgaggtccccttgggcccaagctcccatttggcatgtactcatacattaaatctatgaaaaccttttgtacatgaaccactattgaacaaaaaactacgatgggaagagcatttcaatgctgaaggcttctacatgattaacactccgactagaaggttctttatggtcctctaatctctaggcaaaaacaatttactgccacttacattctgctttccttcagcttccgttgattcactgaaccttaacttgctctccc

SEQ ID NO: 55605 - DNA, 281 bp, Zea mays
  Clone ID: MRT4577_150707C.1
gttctaaattaatacacccgagcatctttattatatgtattattacaaggcacatacatacaactgcaataacgtatacatgaacaccctttgtctcgctcttgctttatctatgcaactgctggcatgcatgcaaaagacggcacggaagataagacccctgttattctgctagtacgtatgcatgcgtacgtagatagtagactggcatgcatgcatgtgcacgatcgatgggcgcgatggtcatgtcatccggtggttcagtacttcagtagtagggc

SEQ ID NO: 55606 - DNA, 433 bp, Zea mays
  Clone ID: MRT4577_150708C.1
gcagcagagctagttcgttcaggcagctttatttgagcagacatatataggagaagatccgaggagaaagatattagcttgctaagagatctcgccatggcgtccatgatgggaggagacttggtggaggcgtacgtgctcaagaacgcgtgcaaggagaagctccggcgccacccgaaagcggcgctgaagaagcagcctcgtcttcttgattcagctccgtccaacaaattcgctgcccaccattgccggacgatagatcagccgtgtgggagacgaagacgaagcacgagcacgtgcgtggcctgctcgaaaccactcaaacagagacagagtgcgtgcttttctagctaggattgtgttgttgtgtactacttgtgtagccttcgttcgttcgttctttcgttctctgttcactcgcttgagatcgatc

SEQ ID NO: 55607 - DNA, 384 bp, Zea mays
  Clone ID: MRT4577_150709C.1
cctttatctttttcttgttaatcaacacataactggcttgcgtacgcaggcatcaagacatgattcctgtacttgtacccatgctcaaaacatcaaagagcccgccacaaagacctaacagactgagaagttccattcaatacaccaaatttagcattggggaacctttatttcttcagtcagttaactggacaagggggacgaccctgactcttacagggggaccgagaacgacttgtttagcttgctacctgcacacaagctgtagagacaggcaagaacctgcagaaatggctcttcctcacagcgttgctggcacacttgagctttggaatgcgcatgatcctctcgttggccagccttcgtacaatacctaagcgggct

SEQ ID NO: 55608 - DNA, 461 bp, Zea mays
  unsure (1)..(461): unsure at all n locations
  Clone ID: MRT4577_15070C.1
cggcgcggctgggggtgtgtgtttatataatataacacatgcttgcttgtgttccaagttgggtacagcgacagatgatgccgcaagcacaccttgttcaggtgggaagaaacgttgagcgccaactctggttgggaaatcgcttctggcaacttcggggggggggagttgctactttctagttgctgctgcacaatcatctccgggttctctgatcgatctgtcaaaatcgccgaaccactttccagctgggtttcctgcggacgttgcttctgccagtgaaaatgcacgcaccaaccgcatctgcctgccggattttcttcagatacacgctttcttctacatctgtccgacagggggcgccgggaggtgcagtgagtactttgtccattgaacaaaaaagaaacatgccgctttcagcctcccatgattttattgtttaactgaagacttnnntagcc

SEQ ID NO: 55609 - DNA, 767 bp, Zea mays
  Clone ID: MRT4577_150710C.1
tcgagcggccgggccgtcctggaaacgtccgcacgggtcacggagagaccgcgcagcagcagagctagttcgttcaggcagctttatttgagcagacatatataggagaagatccgaggagaaagatattagcttgctaagagatctcgccatggcgtccatgatgggaggagacttggtggaggcgtacgtgctcaagaacgcgtgcaaggagaagctccggcgcatggaggcggcggcggcggcggccgacgataagacgagcaagcagggccgcctcgcggagaagaaggtctcaggcagaggacgacgcctgcttgggctcctgaagaagaaggtgcacccaaaagcggccgcgtcgtcgtcgccacccgaaagcggcgctgaagaagcagcctcgtcttcttgattcagctccgtccaacaaattcgctgcccaccattgccggacgatagatcagccgtgtggtagacgaagacgaagcacgagcacgtgcgtggcctgctcgaaaccactcaaacagagacagagtgcgtgcttttctagctaggattgtgttgttgtgtactacttgtgtagccttcgttcgttcgttctttcgttctctgttcactcgcttgagatcgatcgtgttgtttcattggtaagtggtaactcagtgcaagttacgtgaaatggcaaaacgtattggccaagcgcccaagctatactatataatttacttcagctataatattgtcaaaaaaaaaaaaaaaaaaggccccta

SEQ ID NO: 55610 - DNA, 432 bp, Zea mays
  Clone ID: MRT4577_150711C.1
cgggccggaatacccggtccgggcacgccgtccgctaaattggaaaaatgttggaaagattgaaatgaggtttggttgcaaccaaatatcaggtgctggagttgaggccacacacggctcggcctgtgagaggtcacttatgcaactgccccgcgaggccctggccgggaggtgagccacacggtcctgggatcctcggcccccatgcgggtcacattcatagagacagcctggcccactgggtacagcaaggcctgggggcttgtgaggtgcccccggcctcctgtggaaaccctggcaaagcatcctgggcttgcatgttgtctgccttggtgcaggtcatctgctggaccggtgggtcccgggcatgataggaagggcgcgagggttactgtgcggctgttagattgcattgacagtgatgccgcctgc

SEQ ID NO: 55611 - DNA, 560 bp, Zea mays
  Clone ID: MRT4577_150712C.1
ctgtgcggcgctcgaggcggccgccatctgccatcgccacacaattccatcctgcttccacactgctccaccggaccatctgcacaccacaccacaccacaccatcacttccgccgccgattctcgttggactgtccgttccacttccatcgaccgatcgagaccgctcctcatggcttccatcgtgctcctgctgtcggagctgctgggcggggagagcgcgagcgtgctggcggccgagcgctacatgggcggccaccggagcctgcgggagttccggccggccgtgacggaggcgccgcccaagcgtgcccaaaggctggcggagggccagcgcgcggccgggacagagcgggcgcgggaggagggcaaggatgacgattcgttcgaggacctcgcgctgcccagggtcgcggtcgacatcatgtggccttgagagggaggggaggcttgagcgactcgagttctcgtctcatgccatgtatatttaaaaccagcctattgtttatgtctatacacatctataattgcgacaaaaaaaaaaaaaaaaaaggccccta

SEQ ID NO: 55612 - DNA, 236 bp, Zea mays
  Clone ID: MRT4577_150713C.1
gtagttttagttttggtcgtcgggtggtgagcctgtcatttttgcaatgttatgttactgctagtattcatttattgtgtcgatttgaggttaatagcctttttggggctgttggaataagtgatattttagagtagttaatactagtagctagggtcaggatttacatgtggggtttcgatatggggacgccaaaggattcggtctttatactgataataaaccgctattgattt

SEQ ID NO: 55613 - DNA, 257 bp, Zea mays
  Clone ID: MRT4577_150714C.1
actttctgttctttttgtttttttattttcggcccaacactgcaacaggagcagacaaaacaaactgacctgtcaaaacccgcttacatgtgttacaacttttaagggtggatgcttgcaaagacaatttatctactcttgacatggacaacaaaagaacttccaacggggtattcttgtactcggatatatggcacaaccatcgtaatttaaatattctggaaccattagagggccacccctaaggctttttttca

SEQ ID NO: 55614 - DNA, 213 bp, Zea mays
  Clone ID: MRT4577_150715C.1
actggggggggtcatttttttttatttttttttgattaaaatattcttttctttttaactgtatttgttaacaaaatttaagttttctaagatgttaggttaatgttgtggcgtggtgtgaggtatgaaaaagagaaataaagacatcccccaccaaagggtagggacatgaatatgccggaagggaattaatgacaaacacaggagcgaggg

SEQ ID NO: 55615 - DNA, 294 bp, Zea mays
  Clone ID: MRT4577_150716C.1
atattctgctgccacaaatactgtaaagtgctcaatgtcaacagctgaggcaagccaagtgatcattagtagagcttttcgtggatccttcagtggtgttggtagtaaaatggaaggtgtcttgctgcaggtaactaatgaagaagtggtcaaccacagagtcttcaagaaataagaaattctgtaccatctgaaagtagttcttgttggtgccttcatttaaaaagcactctttaagataagagggcaatgttttctgataaaacaaacatttagttgaggttcgtgatataa

SEQ ID NO: 55616 - DNA, 391 bp, Zea mays
  Clone ID: MRT4577_150717C.1
agccactcgttttagtttttggaaattctctaaacttgagagtaatacttttaagttgtacatgaagtatttgttaggtttaatattgggtgccgaaaagaattgtttttgcaagttactttatacaacactacttgtctcacagtaatgcttctgcaatctactaaggtccactatactctgaagggatgagctgatgatgtgtttcctcttcccagacaattggctcctttcagaagaagtacaacattggatcatttgagctgctgagcaaaactgcgccaattcaggcactttcactcattatactgggcccctttgtggactactatctaaatgggcggtcattgttgaactaccctttttcaggaggggcaactttcttcatact

SEQ ID NO: 55617 - DNA, 341 bp, Zea mays
  Clone ID: MRT4577_150718C.1
agaccactgataccggggcttgttataggagcagttgcgttttactttttttgaatatgttttttttttttttggggggcactaacccagtttaaaaccctttttttttttggggaaagcccgctttttttttcaccaccgggaaaccccccgcccagcacttgatgggttttgggggccaaccccctgcccaaaattttgttaaaaccatgttttaattcccttgcctgggccggggggggggaacagcttacgggataaaagcctttattcttcggggggacttctggggccttttcaaaccctttttaggggggggagcctaaaaaaactgttttaaa

SEQ ID NO: 55618 - DNA, 476 bp, Zea mays
  unsure (1)..(476): unsure at all n locations
  Clone ID: MRT4577_150719C.1
cctagcctgcacccctctcccgcggcgccgtcgcctacctagccgccgccggggcggccccccctcgccgcccgatgctgatctttgtgatgactctggcggggaagaccgtcactttggaggtggtgtcctccggcgcctttgacagtgtgaaggccacgatccgggacatggagggcctccccccggtcccgcggcggctcgtgttcgccggcttgctgctcgcggccggtcgcaccctcgccgcctgcctcgttctgacggagtccaccctccacctggtgctccgcctccgcggtggcgccntgnngcgtgcgatgntgacgttcccccagccnccgtcgctcctgccctngctcccgaaggtgtagctctccgtgctgcngttcttttgggtgggcgtcgcccctggcanggggccccgcctcccgctggagcgccccnncccggngggcggcgcgggcgtcttcgtgggc

SEQ ID NO: 55619 - DNA, 376 bp, Zea mays
  Clone ID: MRT4577_15071C.1
tgtttatgtatgatactagaactaaggactgtactgtgctgcgacttgctaagtggttaaccgcgtggtcgcccctcagagagtaacacatgtagtaatgtttaatgataatatcgtgactgtacttggtactaaaaaaaaaaaaaaaaaaaaaaaaaaaaaaaaaaaaaaaaaaaaaaaaaaaaaaaaaaaaaaaaaaaaaaaaaaaaaaaaaaaaaaaaaaaaaaggcgaacggggcctaacgagatggaaaacgggggtttccattgaatgaatgctcgccctggccttaaaaactttccatcttttcttaacgtaagatcttgttgccttaatggaattattttaatacttggttaaattgagaactattat

SEQ ID NO: 55620 - DNA, 904 bp, Zea mays
  Clone ID: MRT4577_150720C.1
tgggtccattaaaggcatcttttttaaaaaatacggccacattaaaggcattggttcctggtcaggtgttaagggtgaacataaaaacccttccaactgctacaattttttgggaaagcctgcatgattaatcgtactaccttagctgctaaagtttagctactgatataacccacccaaatgttcatagattagcacctggtgtggcaattgatttacattaatcttactactatacaccaatgtcttgtgcgcatctgagtaagtttagctttcaacttcatttgcagcaggaatcggtgaaatcctggggtttccaatccagttcaatgaggtactgcctgagctccagcaggccatccccagaaacaatcgtgaaatctcacttgcgttgattgatacaggtacatcaaatcagcaggaacatgtctttcttatgcagtcagagaccaaaactattctcaccgtcttgagcagcatgttgaaatggtatcttatatgcctctttgcgtgactgttttgccgcttttgcactggctgctgtagtggccttaccagcatccttgaattcaccagtaacccggtcatatgtcaggaaagcatctcctatttgcccaaccactttattccgcaccttcctcacacatacctgcacggtatcaagggggccagcatcacggtccctgtttctatgtatacggtttcacggacgccagggcttggctccccgcttcggtggatggctattcctgtgtcccatttgttcctgcccggtgccctgccgcccagctcgtgggtccctggtgcgccgcatgacaattccattatcacatttgtttataaaatgtgcgcttccacttatgtcgtacatatttggtgggcctccattccagcgacagcaacg

SEQ ID NO: 55621 - DNA, 264 bp, Zea mays
  unsure (1)..(264): unsure at all n locations
  Clone ID: MRT4577_150721C.1
cccctcgaggaacacgaccacaagatactgctgctccatggaaggctcaacccctcgggggtcacggccccgcgggtcgcctgcgccccgcgcggctcaagttctcgcttggcccgggcccgcgggggcccgcgcccccgcgcgctcatggcgcagggcgacagcgcaccctagaggtggcatgcacggtttggccacctcaactttcgtggattgcgccgactagctgaggagaacatggtgcgagggctgtcntaaattgat

SEQ ID NO: 55622 - DNA, 1452 bp, Zea mays
  Clone ID: MRT4577_150722C.1
aatttcctcatgcattgacaccagctttgattcatgtgcagccattttagccaacatttcagcagactcatcacgcaaccggaccgcatcatctttggcctggttcagtgagctggcaagccaactgatctgggaatcaagttcagaggttaagacagaatgtggaatgtcaacagagctcaagatttctttaactttctgatgctctgagaagatcatatctgcaattttcttctgctcaactaaccatcccaacctatctgtcatctccaaggaaagaagatcttctggaaatgttgcctctgacatgatatcttcaatgcgttcaaaaaccccatcctttagtgaaagggaagcatgcagggcactttttgattcatttaattgctccatgctggtcttagcagcttcccatgcactatatgtgtctcgaagctcatccaagcacttttcatgctcacttgtcttttcatctaaaaaaatctgtagctcatcaaccctgctctcagctgcttgcagggcatcagacttcttttgcaattctgtcatgcaactctgaagctcacccgtcttttcagccaaggcctgcttcaaggaatcacggtgttgcaccagtgacttgcccttcgtaacagccatgctgagcttctccttagtcgttgataacttttgctccatctgctcaaactctgcctttgctttgcttgcctcagcattcactgcattcctagcagctttcacttcctcaagttcatcagcaatagccttcttctcttcagcaaaagcattcatcttctgcagtaaatccacctcatttctcttgctaccaaccaattcatctgaaagaacacttaaagtggtagcaaggtcaccgtgccctgtggccgcgaaaccaggcttcacctcagctaaaatttgctgaagctgttcaatacccatcgaggcctgcctgtacctctccacaagcaatgaagtcttcctttccagaatagaaatcccatcctggtcagcaccctcaaagctggcatcatcttgcctaaccacagcatcaattgatgcaagcatccgcccaacagcttgctcagacccttctctccacgaacccaggtatacatgagcaacctcacttgatacctctgcctctgcagccctggcatgtaggctctcaatctcttgctccctggcccgtgccatcgagttaagttcaagcacaagcctcgagcagtcgtccagcattgaatgcaacagtgtctcgtcagcgtcctctccatgcaacgcaactgaagcttcctgccccaccatctcctgtagcaacctccggagtgccactgcctcccgagcaaatacagccttctcttcctggtacttgcggagctcggcgctggtgctggaaacctcagggaagtcgatgacggctatggactcgtccagcgagcgtgcggagagcgagcc

SEQ ID NO: 55623 - DNA, 548 bp, Zea mays
  Clone ID: MRT4577_150723C.1
cataaagttgggcctgttgccggtcctcgaggaaattgctacactacagatgtcccaatttttgtggaagatatggcagcagcatcacgcctcctgagatgcccggacggaaagttcttgctattggccgccagcagggaatataatgggataaagatagaccagcgtgctagagaagccacacggaaaccagagcgcgcgtagagcatcctcgtcgcaactaatactagtacttacagagccagaggaggagggtcaaatcgaaactcaatcaaaagcttgccgcctttttggggcgccagaaatcttccactgatgagatgaccagggccgatgatctgcttacctgcttatcgataagagccatgggaaaccgatcgaacttggttttgcgtacgtgctcctccctcttttcaccgacctgacggtgactgatttcccctccgctgcagtacatggtgttcgcctgctccgactcccgcgtgtgcccgtcggtgacactgggcctgcagcccggcgaggcattcaccgtccgcaacatcgcctcc

SEQ ID NO: 55624 - DNA, 1118 bp, Zea mays
  Clone ID: MRT4577_150724C.1
acccccagtctccacagtccacaccacagcccaacgcagccacagccagggggcaacgagtgaagaccgcggagcgggtgaggaccctttgacttgtttttcctggatgtgacgactgacgcgcgcggcctcggccctcggccggcattcccgcgtcgcagcagcgcggagctgcgtgtcccacgagcccggcctgctttgctccaatccgagccagcctttgccccctccgtgcgcccacacaaggagagcggagaagaagtgaagaacccactgggcgcccggatttccgccgcgagagtgatgcgctcaaggatccgcatccgcgacaatggcttcgctggtgccgggcgtcctggtgaagctcctgcagcacatgaacacgggcgtgaaagtcggcggcgagcaccggtcctcgctcctccaggtggtcagcatcgtgccggccctcgccgggagcgacctcttcaccaaccgagggttctacctcaaggtgtcggattcgtcccacgccacctacgtctccctgccagaggagcagcacgatctcatcctgagcgacaagatccagctgggccagttcgtccacgcggaccgtctcgaggcggccactcccgtccccatcctcagaggggtccggccggtccctggtcgccacgcctgtgtcggcacccctgaggacctcgtgctgaccgcctccccgtcgaactctcacggcggcggccaagaacaagaaggcgcgaccgtcgaatgcgaaaacgaaggacgccaacgccagcgtcctgtcgctagacaaggaatcgagcaagctggagaagataaacgcctcgcgcaagcctaccggggcggaaaataagaagccgacgctcaccagatccaactcttcgctgccaagagaagctctggatgggaggatcggtgtcggtgataacaaggaagcggcggttaaatcaaaaaaggtgaagccaggtggtgttactaggtccacaccttcgtcaccaaccagcgtctattctctgcctgcgtcgttcgacaggttctcgaatgatctgaagcagaggaacagagtgaaaggagcggagaagaaagcttcgtcttcttctagttctagcctttca

SEQ ID NO: 55625 - DNA, 145 bp, Zea mays
  unsure (1)..(145): unsure at all n locations
  Clone ID: MRT4577_150725C.1
tgagngatatgtggtccttcaaaactgggatgntagcntaactnanntagagntgtgctnaatgntatcacagggcggtgntgtaacaganccacnatctcacantantgatgaatgctggnntttacgtcgtcaattattgatc

SEQ ID NO: 55626 - DNA, 289 bp, Zea mays
  Clone ID: MRT4577_150726C.1
gctatacatgtcctctctcgtggccttctatgatttgattggtaccgtcgcccgtctgtcttcgatgggtatccacctgtttgcgttcgatgcgtcgatgttcttccttcatgcggtccatgtttcttctccgcttctgttgccgctcatcctctggctgctgctctctctccacctgcactaggccttctccgccttctactacgccctcttctcgcactcttctagcttgctcgctaccgtccggctccgtcgtctcgacacatggtacgccctctactagtacctc

SEQ ID NO: 55627 - DNA, 381 bp, Zea mays
  Clone ID: MRT4577_150727C.1
tccacgcgtgaggccacacgtacgaagacgcgtggggttaagtctacgcaactaagtttattgtacttataattcagaccaaatgatacatggtcataaagccctacagccggcttccagaacatagcagcactatataaaatataatagtgtcggcctcaacataaaaacttcctatcacacaaacgagcgctgtatgcttggggatcactaaagaacagccatcacgtctgaccccctgagcacgatgtgactcaccagggctaggccttgaaatcacttcccgcatacttggaatacatcaacgggcttccaggagtgatccacaggggattcctgctgtcgtgcctcgccaacggtcctgggccaacagctaccact

SEQ ID NO: 55628 - DNA, 325 bp, Zea mays
  Clone ID: MRT4577_150728C.1
gggtcacaagagtcacactagtttcatgtttctacctctcacaaattgacaaaggtttcaaatacataagtggacggattaaaacatgaacacatccacagttcacattgtttgttcacaagtgcaggcacgcaagttcatacttatattaactcgcggtggcagaggaccaggcaatgttgacgcgccctgacacggctagcattgggatcacggtaaaaaatggcaacgtgaggggatgagggacttgatgagagccggaatcccgcctatacaaggaactgtgtcgtaattgcacagcttgccttcaactgcaggtacacaa

SEQ ID NO: 55629 - DNA, 1385 bp, Zea mays
  Clone ID: MRT4577_150729C.1
ccggccgggctgccggggcccgccgtgatggcgcgtctcttcttcttcctcctcctcctctttccgctcctctactcctccgtcgccggcctcaaccgcagtgacttcccgccgtccttcctcttcggcgccagcacgtcgtcttaccaggtggaaggcgcatacctagacgacagcaagggcctaagcaattgggatgtcttctcccatgttccagagggtcgcttcggaggtgttaatcaggcaggcgttaaattctacaatagcctcatcaacggactgctagaaaaagggatacaaccatttgtgacgatcaaccactatgacatacctgaagaactccaagaaagatacaattcttggttgaacccagagattcaggaggactttacctacttcgctgagctttgcttcaagatgtttggtgaccgagtaaagcattgggtcacattcaatgagccaaatcttattgtaaagcttgcatactccagtggggcatttccacccaaccgttgttccgagccatatgggaaatgtgattcagggaattcatcaactgagccctacattgcagcgcataacatgatattagctcatgcaaagacggtcaacatctacagaaataattacaagtccaagcaaggtggctttgtaggaatttcattacatctaagatggtatgaaccactaaggaatatcacagaggaccacttggcagtaagccgagccctgtctttcgatgctccatggatcttggatcccttgttctttggtgactatcctcaccagatgcgccaaattttaggtccaaacttgtcaaatttacagatggagagaagaaactactgaagaaccaaattgacttcatcgggaacgaaatgggatacccattggaaaaccgacacctgttgcaaacacctatgtcgttccaagctccatggagaagttggtcatgtatttaaagcagagatataaaagcatacctttgtacatcacagagaacggttatgcccaaatagccaatattagcactacagcagaagaaataattaatgatattgaaagatcaacttacattcgtgactacctcacttacttgagctttgcaataaggaaaggagcagatgtgagaggttattttgtgtggtctttgatggataacttcgaatggatctctggttacaccgtaaagtatggtctttgtcatgtgaatttcaagtcactaaagcgaacaccaaaattgtctgctaaatggtatagcaagtttatcaagggctatgaacagatagagatggcctctgaagaattgcctaagcatatggtttcctagtacagaaatacagaattctcaaagtccttgtttctacattactcaatgatttgtt

SEQ ID NO: 55630 - DNA, 195 bp, Zea mays
  Clone ID: MRT4577_15072C.1
gttattgtttacattggcggtgggacatgggagacgggatacagaggttcgtgctctaccggctgcatacaataacccttagagagctatacactacctgtattctgcaattcctgagaatgtggaggctcatgctgttgcccaaacacactgcttctagacaacaaacaaatcagcaggccatatcacccgctc

SEQ ID NO: 55631 - DNA, 401 bp, Zea mays
  Clone ID: MRT4577_150730C.1
gccggccgggaaacgccacttgttctccctccctctctgcctgaccaggctacgatcaggcggaagcagcaatggtgatggcgacgtcgaccgctctgaggatctgcagcgccgtgggcgtgaccaacctgatggctccgtcgtcccgagcctcacgactggcgccgcctctgcgccaacgcgcaccaccgtctggaccgcatcgaccatgttccgcaggaccggatgagcgtgcagccacgcccagcccacctcgacggctcctctcccgggctacttcggattcgattccgtggactctcgagaccctgccccaaaagttccagcgcttctaggagtcagaggtgtaacactgtcgctgggccatggttgccgaagccgggcatactgtgggcaaaacc

SEQ ID NO: 55632 - DNA, 2162 bp, Zea mays
  Clone ID: MRT4577_150731C.1
cattgggtacctcgaggccggccggggctcaggctgcccgccgtgatggcgcgtctcttcttcctcctcctcctctttccgctcctctactcctccgtcaccggcctcaaccgcagcgacttcccgccgtccttcctcttcggcgccagcacgtcgtcttaccaggtcgaaggcgcatacctagacgacagcaagggcctaagcaattgggatgtcttctcccatgttccaggaaatattgacgatggaagcaatggcgacgtggctgctgaccattatcatcgatacaaggacgacatagaaatgatgcattcgattggcctcggctcctacagattctcattgtcatggtcgagaattcttccaaagggtcgcttcggaggtgttaatcaggcaggcgttaaattctacaatagcctcatcaacggactgctagaaaaagggatacaaccatttgtgacgatcaaccactatgacatacctgaagaactccaagaaagatacaattcttggttgaacccagagattcagtaagtcaaattcagttagtcacctatattatagctttatttacgaagatgccgtaagttcatatgtgggtgtttctttatttctattcagggaggacttcacctacttcgttgagctttgcttcaagatgtttggtgaccgagtaaagcactgggtcacattcaatgagccaaatcttattgtaaagcttgcatactccattggggcatttccacccaaccgttgttccgagccatatgggaaatgtgggatcaaaagggagtggggactaaccgtgtgcttgctcttaaatactcatgaaagttgtataatttgttttccttgttccccatccttctcagtccaagcaaggtggctttgtaggaatttcattacatctaagatggtatgaaccactaaggaatatcacagaggaccacttggcagtaagccgagctctgtctttcgatgctccatggtatcaattgattcagtaaccttccatcatactagcattttacgattggaactaacttttggtcttcacgattgaatgctcacttgatgatatatgctaaaacaggatcttggatccctttttctttggtgactatcctcaccagatgcgccaaatcttaggtccaaacttgccaaaatttacagaaggagagaagaaactactgaagaaccaaattgacttcatcggggtaaatcactaccaaacattctacgtcaaggattgcatatattctctatgtgatatgaacgcctacccttctgaagctttagtttctatatcaacagaacgaaatgggatacccattggaaaaccggtaaaaatcggcattgtatattgcattattctattcaacaagaatcctagttacaaattaattatgcacaagctaacacaactaaactaatattgcagacacctgttgcaaacacctatgtcgttccaagctccatggagaagttggtcatgtatttaaagcagagatataaaagcatacctttgtacatcacagagaacggtgggttactaggttccctaaaatctacaaattagatacaaaatatatgcctttgtgcataacaatgattcacttccatgcttatttacatatattacacttgtagtacactggtaccataaaaaatatctgtatggatctcttgatcaccctttttttatctttcaggttatgcccaaatagccaatattagcactacagcagaagaaataattaatgatattgaaagatcaacttacattcgtgactacctcacttacttgagctttgcaataaggttgttgcatgcctcaattatcttttcatgtaaactgctctccagccaggtaataataaaactttgctacttttgtgcaggaaaggagcagatgtgagaggttattttgtgtggtctttgatggataacttcgaatggatctctggttacaccgtaaagtatggtctttgtcatgtgaatttcaagtcactaaagcgaacaccaaaattgtctgctaaatggtatagcaagtttatcaagggctatgaacagatagagatggcctctgaagaattgcctaagcatatggtttcctagtacagaaatacagaattctcaaagtccttgtttctacattactc

SEQ ID NO: 55633 - DNA, 568 bp, Zea mays
  Clone ID: MRT4577_150732C.1
ggtacctcgaggcggccgggccgggaatttgtcccggacagccgccgccgtcgccgtcgccgggaggactgagggacgctcacgacctctcacaggccgcgccctcgaggcgccactgacttcccttgcctacccttccgctgaccgtcccgcccgaatcctccctacgacgatgcacgttgagaagaaggccctgaatactataatgccgatgaacaacgcggcgcacgaacgcacggcttacacctcgtagcatcgccagtcgacgtcctcactgctggagctcgttctcgaaagggttaaacaagagcatctgaacatgtgtacgagctgagaacagaagagaaatgaagacatgcagagatacaacgaagacatctcttatgcacatagtttgcaacaggtaactacttcgcatgatgctctatgggtctgctcatgacttctgtggaggatgacaaatagatccgtgtagcttgcgtagcctcttattttgagaaagcacatgatctatggtgaaggaaaaaagttgcactaataagaaaaacaagcacttaaaaattgatcc

SEQ ID NO: 55634 - DNA, 524 bp, Zea mays
  Clone ID: MRT4577_150733C.1
ttttttttttttttttctttttttttttttttttttttttgataggagttacattttcagtttcagttgaccggctaaaaccagattgaaacatacatttgttcactctttcagttacaaccagtttgaaacaaacatctagttcacagtttagttctttccataatatgtttcacagcttgaggagagcattgctgcaattgaatcatgtggaaaaaaagagaaaggaatagaggaagcaacttctcttccaagatttaatggttctgcacaggatgctctgcaattgctcgactcactgcagttccagcttaatcttctagctcagcggctacccacttttcatgaagtgcagtcttgaattccacacctattagcttcagacaaagttgtcgatgaggctgcgctcaccggcgatgtctaagactttcaaaatctccgcaacccggatcacgatgtggaaggaacaaatacacgtaaacagcttagtttgtttgaacaaagtctcttccacctgatgactc

SEQ ID NO: 55635 - DNA, 223 bp, Zea mays
  unsure (1)..(223): unsure at all n locations
  Clone ID: MRT4577_150734C.1
attctgttctagatcgcgagcagccgcccttagttttttttttatataaggaggggggnnnnaacncaancaaacaatcaccctctgctcttctatttaaccaatctttaaacagaaataccaagacagcccctcatttacctcaaaaaaggcccacataataccaaatctaaatcttggattccctaaaccatcaaaacaccccccctccataccccaaatt

SEQ ID NO: 55636 - DNA, 386 bp, Zea mays
  Clone ID: MRT4577_150735C.1
ggcggctcgccctttttttttttttttggtttttttttttttttttttttttttttttttttttttttttttttttttttttttttttttttttttggaaaattccccttccccgattctcagtaaggaaaaatcactcaaatatggggcagggcccttacaggacatgccccaccctttgcatttgggattgcagggcaaaacacttttcttccaattttggggaagaaatttaaatctaaaagtctacccctccccgggaacaaaaaaaaaaatgtttttttttccccggcccccggggagactctaagggacatttcgggggctacttcagccctcatcctagggggggctatccatatattcggggggggggccccccctct

SEQ ID NO: 55637 - DNA, 823 bp, Zea mays
  unsure (1)..(823): unsure at all n locations
  Clone ID: MRT4577_150736C.1
ccggccggaaaaaccctatttcctcttttagcccagccgccgcgcacccacgctcgtacactcagctgctgctgcgccaagaagaagctgtgccaaggagaagctgtgcgcggtccaagcacaggtgcaggggaacaggaggcggcgacggcgctccagaggagggtggatgagctagagagcggcagagaggagagggctggtgtgttggcagtggagggcgtggagctgcgtagggcgaacactgtgctagaggagaacaacagggagcttgccttgaggctgcaggacgcgattgagcaggctgctgcatccgcctccgctaatctagctcctaaggtaattgttatcttaattcctatcttcagtataatctagctttacaaatcagcttgtatagttaccaaatgttagttttggtaaattattttatttgatgagctaatctgcctccgcggttcgtatggatggttcaaaattcttgttcttttttgcactgcatattatgctaggaataaataaagctcctacaaaacggaggctggaacaaggttccaaccgcagtctgaaatttgtaacaaggttccagtcattgatttgagaaattgagcttgtatattctattgcaagtagtagctcaatcactttcttgtgcatcatacaccgaatgaaaatgaaatattaggcaattactgtttncacattcaataaattgggagtatatgtattttctatttctaaataaggtgagaccccatgggatgtgaagcgttttggtaagcaattgaactaccaagaagttattacaggatgtagatagtta

SEQ ID NO: 55638 - DNA, 224 bp, Zea mays
  Clone ID: MRT4577_150737C.1
tgcaaggctatccaccacacacacgccgcaacagtgcccgcctcgcacctgtcgcccgcccagcacaggacgacacgagtcctcccccgcccgcgccagttccggcaccatacatggccagggcctgctgctgtgcagtgcagtgcaggcagacgccgcgccacggccacggccacggccaccgcgcgtcgacatgtcacgagccatgtggtggcgccggctgc

SEQ ID NO: 55639 - DNA, 1405 bp, Zea mays
  Clone ID: MRT4577_150738C.1
tctttggtgacctttgggacaaacaccatgttgaaactgatcatggccaagataatggtctggaccaagccgggatgtccacctagaaaccctagttcgaacgcgccgccgtcaccgtcgtctctcgctcgcacgcgctctccgcccgtgagtactcccacggatcggagcgagagtaggggcgtgtcggcggtgaaagcgaccgcgtcagccatggcggacgaggagcattcggaaaggagagaggaggcctccgagcttgcccccttcgacccgaccaagaagaagaaaaagaagaaggttgtcatccaagaaccttctgatgaagtggacaagcttgcagagaagacagaaacactggcagtcgcagaacccgctgaacttaacttcactggaatgaagaagaaaaagaagaagccggtggatcttgattcaactcttgatgagcttggagatggggaagacactcaagatgatcaagctgtagaggaacaaggggaaggcattgtgctgggaagtgtccctacatacccttgggagggaactgaccgggattataaatatgaagagctgctggacagggtgttcaacattcttcgtgagaacaacccagatcttgctggggataggcgtaggaccgttatgaggccaccacaagttcttagggagggaacaaagaagacagtttttgttaactttatggatttgtgtaaaacgatgcataggcaacctgagcatgtgatgatgtttttacttgctgaaatgggaacaagcgggtcacttgatgggcagcaaaggttggtgatcaaaggaaggtttgcccccaaaaactttgaagcaatcctgaggagatacatcaatgagtatgtcatctgcaatggatgcaagagccctgataccattctgtccaaggaaaatcgtctgttcttccttcgctgcgaacagtgtggatcttcaaggtccgttgctccaatcaaaactggattcgttgctcaagtcggtcgtcggaaggcatgagcatctatatgtggatggtgttggggtcaataccaattcaacaatagttgattatttgttgactagagattctgcggcgcaatgttgagcaagatatatcaacgatgccctttgtctgcaatgttgagcaagatatatcaacgattcatctattgatgtcgcaagcctgtgacaactgaaaagtgtgaatcctgatctacgactccctgcaatcataatcttgtgactgctggttagtgtcatatgcagtctgttaaacttgttgatgcggtcactaatacaagttcatcaaagattagtccgaatgccaaaattctgtcataaaatttgctttctctgtaatgtaacacaataaatctaaatgtttacttcattattcgatccttgg

SEQ ID NO: 55640 - DNA, 1464 bp, Zea mays
  Clone ID: MRT4577_150739C.1
aatcaatggctcaggttgacactgagaggaggaaaagataagaggaaaggatctccaccgagaaaaccctaattcgaacaaccgcgccgccgtctctcgctcactcgctcgcgctctccatccagatcggagcgctcggttcggataggggcgactaggaggtgaaggcgggcgcgtcagccatggcggacgaggagcacccggagaggagggaggaggcctccgagcttgccccctttgatccaaccaagaagaagaagaagaagaaggttgtcatccaagagccttctgatgaagtggacaaggttgcagagaagacagaatcactagcagtcgcagaacctgctgaacttaacttcactggaatgaagaagaaaaagaagaagcaggtggatcttgattcatctattgatgaccttggagatggggaggacactcaaggtgatcaagttgtagaggaacaaggggacggtattgtgcttggaggtggccctacatatccttgggaaggaactgaccgggattataaatacgaagagctgctggacagggtgttcaacattcttcgtgagaacaacccagatcttgctggtgataggcggagaaccgttatgaggccacctcaagttcttagggagggaacaaagaagacagtttttgttaattttatggatttgtgtaaaacgatgcataggcaacctgagcatgtaatgatgtttttacttgctgaaatgggaacaagtgggtcacttgatgggcagcaaaggttggtgatcaagggaagatttgctcctaaaaactttgaagcaatcctgaggagatacatcaatgagtatgtcatctgcaatggatgcaagagccctgatactattttgtccaaggaaaatcgtctgttcttccttcgctgcgaacagtgtggatcttcacggtccgttgcaccaatcaaagctggattcgttgcgcaagttggtcgccggaaggcctgagggtcctttgcgctgcctgctctgttttggtcgtgtatttcttgtttttttttttcgtgtcatgttaatgcagctgaggttcggtttatgattgtcctatctctgtgtggctgaaatttgaggccataccaattcgacaatattagattattttgccggatggacattctgctgtgcaatgttgagagcaagatgtgtcaacagttacattttgtcttgcattcaaaagatccatcgaatgatggcgcagtcctgtggcggctggcgagtgtgcgagtgtgattccggagcccagactcgcttcgaggataatcctgcgactggtggttagtgtcaaatgcagtctgttaaacttcttgatgcggtcactaatacaagttcatcaaagttttgtccgaatgccataattctgtcataggattatgatcgcagggagtcgtagatcaggattcacactcgccagttttcaaggcttgtg

SEQ ID NO: 55641 - DNA, 359 bp, Zea mays
  Clone ID: MRT4577_15073C.1
ccggtcgcccacgcgtcgttatgagactgaagcacaaaaccctgctattggatggtcagagaagtattggggcccaatcacaatcacttaaaaactggtgaacaaccggaaagctactgctcgctgaaagaaagggcgggaatgctgataaccattactcatcgcagtcttaaaaggcgggaggacaactttaccccctgagtgtgatgactgtctatcaaaggtggagctgtgagcccgcagactgacaaatccagcagagttcccaccacatatggttccattcacaatcctttgtgacccggcgctttatttcaccatgaagagtgcgggcagatcttcaaccggaaaccacgaag

SEQ ID NO: 55642 - DNA, 1009 bp, Zea mays
  Clone ID: MRT4577_150740C.1
ggtccacctagaaaccctagttcgaacgcgccgccgtcaccgtcgtctctcgctcgcgctctccgcccgtgagtactcccacgtgaacatctcgcgtcgatccagtggaaccagctcccggctctggatctaaccggcttcgtgccgtcgcagggatcggagccagagtaggggcgtgtcggcggtgaaagcgactgcgtcagccatggcggacgaggagcattcggagaggagagaggaggcctccgagcttgcccccttcgatccgaccaagaagaagaaaaagaagaaggttgtcatccaagaaccttctgatgaagtggacaagcttgcagagaagacagaaacactggcagtcgcagaacccgctgaacttaacttcactggaatgaagaagaaaaagaagaagccggtggatcttgattcaactcttgatgagcttggagatggggaggacactcaagatgatcaagctgtagaggaacaaggggaaggcattgtgctgggaagtgtccctacatacccttgggagggaactgatcgggattataaatatgaagagctgctggacagggtgttcaacattctacgtgagaacaacccagatcttgctggggataggcgtaggaccgttatgaggccaccacaagttcttagggagggaacaaagaagacagtttttgttaactttatggatttgtgtaaaacgatgcataggcaacctgagcatgtgatgatgtttttacttgctgaaatgggaacaagcgggtcacttgatgggcagcaaaggttggtgatcaaaggaagatttgcccccaaaaactttgaagcaatcctgaggagatacatcaatgagtacgtcatctgcaatggatgcaagagccctgataccattctgtccaaggaaaatcgtctgttcttccttcgctgcgaacagtgtggatcttcaaggtccgttgctccaatcaaagctggattcgttgctcaagtcgtcgtcggaaggcatgag

SEQ ID NO: 55643 - DNA, 1732 bp, Zea mays
  unsure (1)..(1732): unsure at all n locations
  Clone ID: MRT4577_150741C.1
aaggagtgggattgaaatgcactgttttatcgtgcaatctctgccctaatgccggcaacgagcggtggtgttatgatcaggagtgaaagaacaggtcagggggctttgagtgcacaggcatagcttgctctcccgtgagttgcgctttgttttgcaagtggtggtgccagaatctgctgattgttgcaactgcagttgtaattaaagggatgctttctaacaatttctccttttggttcacgtcgaatctttgggctgcaaaggaaaccctagttcgaacgcgccgccgtcaccgtcgtcgctcgcgctctccgcccggatcggagcgagagtaggggcgtgtcggcggtgaaagcgactgcgtcagccatggcggacgaggagcattcggagaggagagaggaggcctccgagcttgcccccttcgacccgaccaagaagaagaaaaagaagaaggttgtcatccaagaaccttctgatgaagtggacaagcttgcagagaagacagaaacactggcagtcgcagaacccgctgaacttaacttcactggaatgaagaagaaaaagaagaagccggtggatcttgattcaactcttgatgagcttggagatggggaggacactcaagatgatcaagctgtagaggaacaaggggaaggcattgtgctgggaagtgtccctacatacccttgggagggaactgatcgggattataaatatgaagagctgctggacagggtgttcaacattctacgtgagaacaacccagatcttgctggggataggcgtaggaccgttatgaggccaccacaagttcttagggagggaacaaagaagacagtttttgttaactttatggatttgtgtaaaacgatgcataggcaacctgagcatgtgatgatgtttttacttgctgaaatgggaacaagcgggtcacttgatgggcagcaaaggttggtgatcaaaggaagatttgcccccaaaaactttgaagcaatcctgaggagatacatcaatgagtacgtcatctgcaatggatgcaagagccctgataccattctgtccaaggaaaatcgtctgttcttccttcgctgcgaacagtgtggatcttcaaggtccgttgctccaatcaaagctggattcgttgctcaagtcggtcgtcggaaggcatgagcatctatatgtggatggtgttggggtcaataccaactcaacaatagttgattatttgttgactagagattctgcggcgcaatgttgagcaagatatatcaacgatgccctttgtctgcattcaaaggattcatctattgatgtcacaagcctatgaaaactggcgagtgtgaatcctgatctacgactccctgcgatcataatcctgtgactgctggttagtgtcaaatgcagtctgttaaacttcttgatgcggtcactaatacaagttcatcaaagttttgtccgaatgccataattctgtcataaaatttactttctctgtaatgtacacaatgaatctaaatgtttacttcattattcgatccttggaattcagctgattcattcaaaaaaaaaaaaaaaaaaaaaaaaaaaaaaaagggatgcggtcactaatacaagttcatcaaagttgtgtccgaatgccataattctgtcataggattatgatcgcagggagtcgtagatcaggattcacactcgccagtttncaaggnctgtgactncaatagcccgg

SEQ ID NO: 55644 - DNA, 411 bp, Zea mays
  Clone ID: MRT4577_150742C.1
tcgagcatagaggaccacagcctgatgatctgttgaatgatcggaactttaccgatgagccattgccggaacctatagaaggattacatagtaccggcatcgtaggatgaggatgatgactgctcaacataagattggggactgtacagggatggtgtctatcggattgactctgatgagtttggtagtatggatgccaccaatactgagaagggttgcagcatacggtcctcgcgatgacgaatgacttaaacgtacggatcatgcgcgccatgcccaaactaagaccatgtcatggattctatctacctgggagttgaattgctgagaacctacacgaacgtcattacgcgatcatagagtgggccttgcagctttgggattaacagatgccgtaacatgtatggaact

SEQ ID NO: 55645 - DNA, 338 bp, Zea mays
  Clone ID: MRT4577_150743C.1
acccgaaaaaaaaaataccgtatcacttaagggttgccaggagccgggataacattgaaccgaccgactattacgggggccaaaaaaaaacccccacaaaagtcccaaccaaccacaaataaagtttaagggggcacaccgcaccaactggcgataactttcgggaggaacggggccagccaggaactggagcacactcaagactgacaacaaaccggttaggccacctccttaaacttggggccagggccgccgctgccgggaggggcgtccttaaccatgccgccggggccgcccatgggttaacccgcgccctgtgccattgggggaaggaaggg

SEQ ID NO: 55646 - DNA, 913 bp, Zea mays
  Clone ID: MRT4577_150744C.1
cgggaaaaaaaaaaaaaaaaaaccctaattcgaacaaccgcgccgccgtctctcgctcactcgctcgcgctctccatccgtgagaactcccacgcgaagatctcgtgtcgatccagtcgaaccagcgccccgcgttccaactaacctggttcgtgccgtctcagagatcggagcgctcggttcggataggggcgactaggaggtgaaggcgggcgcgtcagccatggcggacgaggagcacccggagaggagggaggaggcctccgagcttgccccctttgatccaaccaagaagaagaagaagaagaaggttgtcatccaagagccttctgatgaagtggacaaggttgcagagaagacagaatcactagcagtcgcagaacctgctgaacttaacttcactggaatgaagaagaaaaagaagaagcaggtggatcttgattcatctattgatgaccttggagatggggaggacactcaaggtgatcaagttgtagaggaacaaggggacggtattgtgcttggaggtggccctacatatccttgggaaggaactgaccgggattataaatacgaagagctgctggacagagtgttcaacattcttcgtgagaacaacccagatcttgctggtgataggcggagaaccgttatgaggccacctcaagttcttagggagggaacaaaaaagacagtttttgttaattttatggatttgtgtaaaacgatgcataggcaacctgagcatgtaatgacgtttttacttgctgaaatgggacaagtgggtcacttgatgggcagcaaaggttggtgatccaaggaagatttgctccttaaaactttgaagcaatcctgaggagatacttcaatgagtatgttatctgccatggatgcaagagccctgatactattt

SEQ ID NO: 55647 - DNA, 300 bp, Zea mays
  Clone ID: MRT4577_150745C.1
gagggaacatatgccgatgcccaactataggacggcttaggacgacgcgggtgaggggacatggcagctggcctctctaacagctgaactgctcttacgcatccaggcacagcttgtgtaagacaggtttctccggcagctgacgcattcctcatgccaaggcattttgtgtctattccggctagggaacctccttgctcgaatgggagagtcgcttcacagatacatactaccagatgtgacattggacggctaaccccaaagcacggagaacttcaaaatgcattatggcctgctttg

SEQ ID NO: 55648 - DNA, 578 bp, Zea mays
  Clone ID: MRT4577_150746C.1
ctcaacgtgcgcatccagtcattgccatgctttgagcaggaaggaatggtctggatttggcctagggatgacccaccaaaggctacaatcccttctcttctgcctccttcaggatttacagttcatgcagagatagtgatggaactgccagttgaacaaggactactcctggtattttcttttttggaccttgctcatgctccttttacacacacatccacctttgctaagggctggagtgttccaaggtcttgaacgaggacctccggcttgttcttggtcagcaagaacggatgatcaatggcgccaacgtctggaactggccggtatcatatgacaagctcggggtacggtaccggttgtggagagacactgttgagaggggctctgaacggttgccattcagtaaccaagctgagagtggatcatagctggccggtgggcctcttaatttcttcctcgtcacatttattcgcgagacgatggccagaattagttacataggtgtgcgtctctgtgctctgctccctgatgctgctgcgtctatctggaaggcgaaggttgatgggcaacatcat

SEQ ID NO: 55649 - DNA, 188 bp, Zea mays
  Clone ID: MRT4577_150747C.1
aaactccatttgaggccttatttttagtctcatatgggaaaacttaacccacttttcaattccattggccacttccctttcaaaatggtccccccaccccaatggacaaaatcaagactttcattactcacacacacctttaatttttttttaatggaatgcgggtttttaattttaaaaacaaaaat

SEQ ID NO: 55650 - DNA, 181 bp, Zea mays
  Clone ID: MRT4577_150749C.1
ctcagccacacggagcgaacgttctactttcgacaccgtcaggctcgacatcgcggttcggttgtacacccaagcgagcaggggcggacagtcagttcatctttcgacatggactcatcagcagtgatacagaggacccggagccgtagaattagacagttgtacagacgagaactcatca

SEQ ID NO: 55651 - DNA, 403 bp, Zea mays
  Clone ID: MRT4577_15074C.1
gccagtggccgcgataacattgaaccggccgactttcacgagggccaaaaaataaccaccacaaaagttccaaccaaccacaaataaagggtaagggggcacaccggaccaactgacgataacttttgggagcaactgggccagccagcaactggagcacacttaagactgacaacaaaccggttagtccaccttctcgatcttggggccagggccgccctttccgggaggggcgttcttgtccatgccgccagcgccgcccatgtttttacccgcgccctggtacattttggcgatgatggggttgcagagggttttcaactcctttattttgtccttgaactcgtccccctcggcgagctggttggcgtccaaccagcttatggccccgttttatggggtc

SEQ ID NO: 55652 - DNA, 498 bp, Zea mays
  unsure (1)..(498): unsure at all n locations
  Clone ID: MRT4577_150750C.1
ccggccgggatcacaactacaaccaacaatggatttatacacaagcaagaatcacaactcctccctacacaggataatgacgcatgatgcaccccaacatgcgcgaggggtgcctgctgcacatgtcgcagatgaggcaacgggctgggcaaggaacctctgacgtgaaaaccgccgccaccaccagagacaagaccaccaacatcgccgcgtctaccaccaaagccagtgccggaacgttctaggcctccaccaaggcatccagtggaccacagcgagaccagcaatcgtaccaccagatgattgtgcacctggtgcacaagtcacatgacatgcccaanaacggtcatgtcatatgagagtgcgagatggatgatgatcaccacgagatcgataaatataacagcgtcgagcaggacatactatgctgcattgagcaccctgcaatatcgactgctcaatcagtacctccccgccatgcccggtgctttcgaccac

SEQ ID NO: 55653 - DNA, 281 bp, Zea mays
  Clone ID: MRT4577_150751C.1
ttgccgggccgctctctttatggtttcccccaccgaccgggggggggccgtttgctgatgggttgcttttcggtttcttggttaattgcttcgttgtgttgggtcttttccctgcgctgggtgggttactctttttgatgggcggttttccggttctccgcggattcagggctttccccgggaaaaacccttgtttcaacgggcctcgggaaggccggggcccgaaaaaagggcccgctaaggggcggtttttccttaggttccgccccctggccgggttt

SEQ ID NO: 55654 - DNA, 331 bp, Zea mays
  Clone ID: MRT4577_150752C.1
tatttttttttttgttgcaaatagacattatattaaagctcgtcacctgttacatataaattctctaaaatgtccactatagtttctcgaaacattcactggtcgtgcatatccactaattcacgaaagcaatttgatggattcccatctaggcaatatacataaacaagagatgaattatatatgtccttttcgtctactctccatgcgaatgctggacaggaaacaatgcatgatataactatgaatctttctatctatctacagggaggagatgagatccacgcacaaaagttggatctgaaggcgcaactattcacgcgcaccaacc

SEQ ID NO: 55655 - DNA, 292 bp, Zea mays
  Clone ID: MRT4577_150753C.1
gtaggcggatacggtggccgggacggatacgtattggttggcctgtaccaccacgcagggggagctcaccatgcccatgtctacgttgatgcccgcgtgtaacactgagttctcacgtttaggcagttgttcgaacacatgactaacctgttgcgtattaactcctgcacccacgacagcacgttcgagctcaccgctagagtgggcgtacccggcgacacactccgagtcatcgttcgttatttggacgaacagctgctggatctgcgggagctggaatgggccggggtag

SEQ ID NO: 55656 - DNA, 114 bp, Zea mays
  Clone ID: MRT4577_150754C.1
gtgtttagcagttcaccctgcgaacagtacaatctacaaacaatacaatctatagtactgttcgcaggggggatttttgaatatgagtataagaatgtgtaagctgttgaagat

SEQ ID NO: 55657 - DNA, 250 bp, Zea mays
  Clone ID: MRT4577_150755C.1
ctttaaagtccacccacccttccgttgcaatggtggtcatcccaatggctgtcggggctactaactacttcggcgagaaacacaacactgaccatcttatttccaaggatgataacatcgatgcttcaaacataatttcaggcgatactctcgatgacctcgtcaagtcctttgtttctcattaccctatccacgcgatcgaacatccatatgatcatcgatgactagaacacttatgcctaactcactg

SEQ ID NO: 55658 - DNA, 398 bp, Zea mays
  unsure (1)..(398): unsure at all n locations
  Clone ID: MRT4577_150756C.1
gtcgccacacacagtttacctgcgccagcaatggatccagccaccaaactgcgattcgactcgccgctcctccgcgtctacgaggacggccgagtggagcgtctcttcggcacagaaaccaccccgccgggcgtcgatgctgccaccggcgtcacctccaaggacgtcgtcatcgacgccgccaccggcgtcttcgcccgcctctacgtccccgacctcgtcgccgccggctccgattcccagcgcaagaagctcccgatcctcgtgtacttccacggcggcggcctggtcctcgactcggccgcctctccgacgnaccacaggtacctcaactccgtcgcctccaaggccggcgtcctggccgtgtcggtcaactaccgcctcgcgccagagcaccc

SEQ ID NO: 55659 - DNA, 472 bp, Zea mays
  Clone ID: MRT4577_150757C.1
cacggaaagtgaagaaggcgtggacggccaacattgtcacccgacgacgttgacgaatatttcgagaagcatgcgcgccataaacaagcctgcaccgacaacatacgttctattcctttggacttggtctacaatggcgacaagcccgggagctaggcctctacttttgccgacagcgcctggaacacacccaccaattatattgccgtcaaaaggtaaatcgagaacaacatggagaaagatctttattatgacaatgaactgaagcagaattcgcttgttcagccaatcccaacttatttgacgggcacgaaggttaataggatctagatcaagaaatggctggagacacagggagagaatagtgtttctatggaaaatgattctgtggttaagaactatgacatctgagctgtggatggtaaagtgattccaacgccaaaaagagatctactatatcgagtatttctgc

SEQ ID NO: 55660 - DNA, 518 bp, Zea mays
  unsure (1)..(518): unsure at all n locations
  Clone ID: MRT4577_150758C.1
ctaattttcacaacgcatggttatttaagtgtagaatatgaagagaactcttgtcaaatacttaaaacatagtctcacggttacatagatacgagagcttggtcataaaggaaaaggtttgtacacgatttcatgtgtttattataggcaatgttatgtgtcaatttctgtttacatatttcatcgactaaatatatgtgatgatcagaactagctcctcaaaactgatgaagtcgaagggctcaacccaaaactcaaagaactatgaaaacaaaacatccacagccgcactatgaatctagagttcagacgctactacagagtggaaatgatatcccacacctcaagtggtatggtgtcgatgaggagtatcatgttatggtgattgatcttcttggcccaatcttggaaaaattgtttgcttcctgcaacaggaaattttctatgaaaatagtacttacgcttactgatttacttatcaactgtcgagttcatccattccaaannaaaaaaaanaa

SEQ ID NO: 55661 - DNA, 991 bp, Zea mays
  Clone ID: MRT4577_150759C.1
tactcggtgccgtccgataggaagccagcgttccaagcagcacgccgtccccgccagaccgtggccgtccagcaatgctaggcacccactggatgccaagcaaagcaccgtagcaagcagggccaaggcgaggagcgggagcatgagtcccagcaggttaaggaggcagtccacttccaaggctaccgagacaagagcaggcaacgccaaggctacagaagcaaggggtgggaacgcgacactcggagataacaacgtggctgatgagctcactctcaaatgcgcagtggccgatcataacaggaatgcatccacagggaagaggccggcggggagctcgaaggtcaggatcatcccgagccgctacagcctcacgcccggctcgtccctggcagctcctgtgacacaagggaagctatgcaagcagtctctctcaggatccgctcgtgctgcaatccacagggaggagatcagagcaaaactcactgagccgtctaacgacgagttgtctcctgaatcacttgccaaggttgcagagctgctcccaaggatcaggaccatgccgccttctgacgagagcccgcgtgactcggggtgtgctaggcgtgttgcagatttggccgggaagcgatccttcttcaccgccgcagccgacgatggcaatcccgttacaccctaccaggcacgggtggtagaccttgaaacacccgagacagcagcagcagcagaagcatgagtgtttgaagcatggtttcgatcagacagcttagcttggctccccttcgtcatgagtgtttgaagtgtctgcttacttgagcttgcatctaggtgagaggcttttttgcagtgtgccactacataatctactgctacaatcgtatcatatctcatgtcctatttttttcctttccccttgagacctggctagcaattcatcttgtctgctggtgctcttgttttggattgtaagtatggtcttggtttgtgaagc

SEQ ID NO: 55662 - DNA, 300 bp, Zea mays
  unsure (1)..(300): unsure at all n locations
  Clone ID: MRT4577_15075C.1
gtagtcaggtagtagtcggattcggtcaggagagagtaactcgtcgagtcgacgagcttgagcggtcgtcagggcgctcatgnagtgcgacaacgangagaggatngaggcgagggagaatgccgacgagatgcatgctgagtgcagaatgacgtcgacgatggagggtcgtcgacggtcacgctgacgaagctctccaacgctctctgtcgtaatgactagcggtgcgggtgaggtcattctttcctnagattgatctatgaaatatgatcagtgagctccgttttgganaattatatc

SEQ ID NO: 55663 - DNA, 860 bp, Zea mays
  Clone ID: MRT4577_150760C.1
gcacgagcagagggagaaaaacgagagaccactgccgccgccatcgaaccgcaagatcaccgctgctctgctcctgtaacctggtcccgggcgttcggacgagtacgcggatccctgcggagactggattggcgcctgcggagccatagtgcgacgagaattgttcaccggatccgggagatcgcgccgtgaagctacccaccgtggtccgacctccatgcgacacctctgccgaagagcctgtggccgaggattccggtgttcagcaggtagaagttgctgagcaggagtcattgaaggagaagaacaggtggtccaggaggagccgtacaataaggagtacaagttgatctaggtggcgtctactgttcagctttatggcgccatggatggacatttagttcgcttttatatctatcatttattttcgtaagacttctgctatgtaataatgacatttatgatatttgtgacatttatctctaaaaaaaaaaaaaaaaaaaaaaaaaaaaaagaagaaaaaaaaaaaaaaaaaaaaaaaaaaaaaaaaaaaaaaaaaaaaaaagaaaaatgttaaaaaaaaaaaaaaaaaaaaaaaaaaaatttttcccttccccgggggccctttaaaagggctaattcaaaaaaatttggggcccttttttggggaacccagcccggcccccaccttgggggaaaaagggggaatgctttttccgggggaaaaattttattccttgcagaattcccccacaaaccccggcccggagaaaaaaggtgaaaacccgggggccccaatgggggggccaccccccattaaagaggggggggccctttgccgctttcccctggggaaaccc

SEQ ID NO: 55664 - DNA, 876 bp, Zea mays
  unsure (1)..(876): unsure at all n locations
  Clone ID: MRT4577_150761C.1
ccttcgctccaacagccggaatagagcgggtaaccacaaccgaacaagccgacgcacagaccccccgaaccccccggaaaggcgggagggcaccccaccgaacaccggaacgcacgaaaccacagggcgggcgggaagcacgggaaaacaagccgggaacaaccggaccaccggagcggaggaaacaacggcccgggcgcgcggggacaaaaggcgcaccgcaggggggaaaaagggaaaaccaagcccggaagggcggaagaggaggtggcggggttggggcgcgccagccgcggagtgggggaggccgcgccccggagacccgccggcccccgcgcgggcaatctcgcccggcggggcgggcctcgcagcgtcccccgggggcccaccccgggggcgccggccccccggcccccccgcgtccgcgccgcgggcgcccgggccgcccgccccggccgggcggggggccaggggcggaccccgcgggccgcggggcgcgggggggggcgcgcggcgggaaggcccggccgggccccctggggcccccggccccccgggggggggggccccgggccccccgggggccgggcggcgcggcctccgccccgccccgccccggggcgcccccccccccccccccccctcccgccccccccgcgcccccgggcggcccccccctctccgcccctgtntcntgttccgttcctgttgtcntttgcggccccgcgtcgccggggccggcggcgccgcgggcgcccgncccgnggggggcgggcggggggggggggggggtggngggggggggggggtggtntgtgtgggggggggggggggngggggggggggggcggggtgggggggggggggggggggggg

SEQ ID NO: 55665 - DNA, 397 bp, Zea mays
  Clone ID: MRT4577_150762C.1
gacagcttcatcacgcacagggccttctgcgacgcgctcgcggaggagagcgcgagggcggtgaccgccgccgcggcggtcgcgggccagcaccatccgggaccggccgggatgctcttctcgcaggccgccggcgggggtgacggcggtgcggggttacacctgccgccaggcgtgcttgacccgtcgcagacgctgggcggcggccacgcccacggcatgtcctttcaagagctgtgcctgaagagagagcagcagcagcagcagttcgcgccgtcgtcgtggctcacggcgcaacatcaccagcaggagctggagctgcccggatcggccgtgttcggattggcgaggccgctagaccagcaggagtacatggggaactccacaacggaaagca

SEQ ID NO: 55666 - DNA, 190 bp, Zea mays
  Clone ID: MRT4577_150763C.1
cttggacctggtgcaaacttactccattttatattcaggtgttctaatatctggcaggtctatgctaagttaatgacagaatatgactggtctaaacacacaaatataaaatggagtaagtgtgaccagggcaagttttaggatatagttgatgttctaaaatctggctggtctatgctctgaaaccgac

SEQ ID NO: 55667 - DNA, 395 bp, Zea mays
  Clone ID: MRT4577_150764C.1
gatccacaaagccggcctcatgataatactaccttacctttattcggctgcatggaatatgatcacaaaaagtttatcacatatccccatgccatggcaccccttcgtacgcccatacatatcgccaatcatatgcctcagaccctttgaattagccaattgttgtgccgactatgtccacgcctacatatgcatattgcacatgacgagaaacagactaacctactcacttcgaccagccatgcacctgctgtttcactatagcaagcagatcatgctgtcctggagctcagcagctttgattcatactgtcgacatatcagtacagcctgcttgtaaagctcatgtacacgccatctacgttccttgcatgcgcgcgattgaaccgcctgcaa

SEQ ID NO: 55668 - DNA, 383 bp, Zea mays
  Clone ID: MRT4577_150765C.1
ctgactcataacgtttgggatcgcaaagtagcgagatctgcagccatcgggcgcatctcatcacaggaacaagctttgaagcacgtgccgcatatcaacaagaaccagaccctggctcttcactgttgccggttgccactcacaagacggattgttgatgctttgctcccgagctatccaaacgatacaggctataggtcactgtggtgattgtgagacgtggtgtacttgtcttacccgagcggcttacaacaactttaaactaatcgaggattgtaccttcatatgcaccaatctagcatctatatatcaagggtatacttgattgaagatcattggttagctttgaatatacctaaacataaactagggctgaccctaaa

SEQ ID NO: 55669 - DNA, 342 bp, Zea mays
  Clone ID: MRT4577_150766C.1
ttttttttttttttttttttttttttttttttggtttattttttttattggtagctttttttttactattttttcttatagggcgccggggacgacccggaaaatccgggccgaaacctgagggctaaccaattttcctaaaagggggcaataacaaagaggggacaaaccaggggcaaaaattgttccggcggaaaaacgtaatgcgttaacaaacccacaaaaaatgcgaggcggaaacttaaaggttaaaagcgggggggcccaaaaggggagctaccttaaaaaaaagggcaaggcccaacgggaagcatattggggggaaaaccccaggggccctat

SEQ ID NO: 55670 - DNA, 115 bp, Zea mays
  Clone ID: MRT4577_150767C.1
ctggggggttcagatcggatcggaagcttgcataagtttccatcgggcttcgccgctcgccgggatggctatccgcaagggggcttgctacgccgacgcggcacttctcgcgctc

SEQ ID NO: 55671 - DNA, 303 bp, Zea mays
  Clone ID: MRT4577_150768C.1
agcttgtctaattccaactttataaactagcaaaaaagtgtttgcttattccaccagttctactgtgacatactcgtgtatagtgacatgtagcaataacggggagtgtggggggagtctcacagtgcctttggaagggcccgaacttgccttaaatcttcctcaaccaaataagtattgtattagtgcttgagagaatctgaatgtaggatgggttcaactgcacgaaaggacaagattgttaccacttgttgtatatagatataaagtgaagcaaccgccttagtgctgaaatatgtagta

SEQ ID NO: 55672 - DNA, 257 bp, Zea mays
  Clone ID: MRT4577_150769C.1
tctatttaatatttaatgaaacttctttatcaaacacacgatactccattttcagaggtgggcggcatttacatgtttgtttaaaaacttatacaattttctctcaatattatcaatctaatattaacattataatcttttacaaattttataaaatatgaactatgttcaagattattactttcactttatcatctcttaattatactaatttttcttatctcttcaaactctttacaattattaacactttctat

SEQ ID NO: 55673 - DNA, 1361 bp, Zea mays
  Clone ID: MRT4577_15076C.1
aacccctcctccctccccctccccctccccctcccttacagcgtcgttgagggctctgcacgcaatcacccgccgagagaaaaaaaagggcatcgcggcaagggcttccctcctccgtcgcccggtcgaaccccgcgcactgccgtcgatcggcagaggcgagagggaaggggtgtttcccctaggcggatgagatgccggcgcgccggaaggtgaggcccgcgggcgcgggcgcggcggcgcggcgggccgcgctgcggtggtggctgctctccctcgccgcagcgggcgccatcatcaccgccgccgccgcgctgctcgccgtcactctccacgtctccggcctcgccatgccctccgtctcctccggcgcgccctaccgcctctcgcagccatgggatacagaggagctgcggtgggagcaggagttcgcatcgccccagctcgcgtcgtcacgaaagctggacggtgcggccgacgacgcgttggggaagaggttgtggctgccggcgtcggcgcggcggttcgtgccctgcgtggcgccgtcagcggaatacagaagtccggtggcgtcaagggggtacttgctcgtacacaccaatggcggactcaaccagatgcgcgctgggatcagtgatatggtggctgttgcacgcgtacttaatgctacactcatcattccagagcttgataagaaatcattttggcatgacaaaagcaacttttcagatgtatttgatgaagaacacttcataaattctttagcaaacgatttgaaagttgagaaagaactgccaaaggaatttgtgaaagctccaaagtctgtcaggtacttcaagagttggtctggagtagattattaccgcgtggggtgatctccacttgaagatctgtactaggtcattcgagctgctaagtcagattcccgccttgcaaacaaccaccttcctcctgacattcagaagcttcgttgtcgggcttttttccaagcactgagatttgctcccccaattgaagctctaggcaaactattggtggagaggatgaggtcatttgggaaatatattgctttgcatttgcgctatgagaaggatatgcttgcctttagtggctgcacatatggtttatcacggacagaatcagaagaacttgcaatgatcagagaaaacacaacctactggaaggtgaaggacattgatccattagaacaaatatcccatgggtactgccccctgacaccaaaagaagtcggtatgtttctttctggacttagggtatccatcaagcaccccaatctaacattagcttcagggggaaatatattggaggtgcgtcttcatatgggttgatataacaatcaa

SEQ ID NO: 55674 - DNA, 311 bp, Zea mays
  Clone ID: MRT4577_150770C.1
tttatctgatgggtctcaagaaggatggaacgaaggtgattttatacaataaagccctgcgcctggtcaaagacaatcatgagcaagctaaaatggtagttgtacaaggtcaaaaaccgcatagttctgttgtcaagtaccacaacgttgcaaccggaccaataaaaagttatactgctctactgagattagcgaggaccaccaagacaatggaagaattgagggctgggctgctagtgccctacagaaaagagtttatgtaatacaggggaagggagaccatgtgctgtgtcaagggactcataatattg

SEQ ID NO: 55675 - DNA, 385 bp, Zea mays
  Clone ID: MRT4577_150771C.1
cgtaagctcggaatactgctctaggtcctcattgtcctttctattggaccaaacatgggtcttaactggggtgtactgaacacattcggggttccagggatggggggggcgactaccaagcaggtctatgagcggtattacacgaacacgggaaccaaagagattcaaagattatccacattgcctacgtgcagttttgcacgtttttcaacacggtgatgcccggtcaggatgttgacactccatctactactgtgattcagaaattatttgaagactattggaagccgaataagaacaaggacgagaggaagaggaatttccttgagttcatgatgaacaaggtgagggacgccatcgtggactacagcttcttcattgcggc

SEQ ID NO: 55676 - DNA, 232 bp, Zea mays
  Clone ID: MRT4577_150772C.1
cactgtgcctatcgtttcaaaaaaactccaatttaattggcctattattttaggcggtcagctccaagaaaaatctttaaatttagatttaagttggggccagatacatagaacatgttttaaatttagacaccttaaaacacttccaaaccattagggtaatggaatagggggggcatatttccattcctatattgggtcacaaccaataatgcagcaggcgtcgaaaatt

SEQ ID NO: 55677 - DNA, 2035 bp, Zea mays
  Clone ID: MRT4577_150773C.1
gttcttgacgcggtctgcgatccgattgtttcggctcccttgcacaccattgggactcgttacccatctcgtggactcttctgtttcttctccttttctccccccgtttattggaccagcggcggcttgctcctcttcgtgtaacgggatttggttttctgcggatgagtgtttattgttcgatgcggagcttcgatctggattcgtgcttgtcctcttggtctctgctcgctttgtaatgcttgggtacggtgcgctgaaggtgtttggggggtatgattgttgttgcacctgaataactgagtcaggttgatggcgatggagggaccagttttatgccgccctgcaatgcaagccaaatcgcctgctgctgcgctggtcaacaactccctgaccagattcgggcagcttgggaccatttcaaaatacaggaacgtttcaagattcatttctcccatctctcagccatctacgaagaacataggtccatgctgtagcttcagctcgtcttctgatggcaatggatacatggctggaaactttagcgacagtgatgaagattatgttaattctactgtgctagaagcagttgaggtgagaagtatcagaaggatatgtgataaagatgcgagatggaaagaacttgcgttgtgtccatagtaattttcaagggagaaatattccagagagtgcaccacaacctgctattgttttgaggattgaagatggaagcggaactttactcccgatcattgttttggagatgccaagcgttcttctgatggcagctattcgtaatgtccacattgcacgtccgaccatatatcaagttgtcaaggaaatgattgataaaatgggttatgaggtaaaacttgttagggtaaacaaaagaattcaagaagcctactgtgctgaactttatttaacaaaggtcaatgatcctacagacaacatcaccttcgatcttcggccttcagatgccataaacattgctgttcgttgcaaggttcctgtacaagtccatagaagtcttgcatacagtgatgggattagaccagtcgagccagcaagaatggcagtagcagctggcctatcagatgggttgttatttacagagcttgacagacctgatggacagccatgtgtggaggctcaagagtttggactggtgaggaacatgctcattgcagctatcgaagagagatacaaggatgctggtaatgatacatctctactatattagagcatcagttttttcagttccactatcgttgtgctccccccacatttaaataataaaaatgttaaaattatgcacaaatagggtttcgaaccattgttgttggctttaaaccccacattcatacccatctagtcaacagaacaaacatgtctgtgtgttctatattgtatatttaagcataaatggaaatcgtaaacacatacgggcactttgctagttcttattgaccggctcaattcatccaggactccaggttgagcatctggtaatgattctacccagtgcagtattatcatatctgtctgaatgctgaacaagcatcacatctgtcttactttgcaaccatgttctgccaaggaacaaaagaagagtgatgtgcaagaagaaacgcattgatcttgaataataattatcattagtttaaacctagatgtggtagttgtattgaaggttcattgatttatctgttgacttgaacagcatcatggaaggacaaactgattcggctcaggtctaagcgggagaactgggcctgagagcgtcgcatgtctggatggtgtaaataaagatgacgctcagctgaattccagtatgcactccagacaattgatactgtttatggctctatgtaactagctgtacatattgtaactagctgtacatattgtacgtactatgctcaggtctcagctaaattcagactaagatttgaagtgaaaaactaatccttttgtaatcttggccgtattaatttgtatgttagtctgttaggttgaatgtttggcaaaaaac

SEQ ID NO: 55678 - DNA, 637 bp, Zea mays
  Clone ID: MRT4577_150774C.1
acaaaaggattagtttttcacttcaaatcttagtctgaatttagctgagacctgagcatagtacgtacaatatgtacagctagttacaatatgtacagctagttacatagagccataaacagtatcaattgtctggagtgcatactggaattcagctgagcgtcatctttatttacaccatccagacatgcgacgctgttaaaagttaccaagttaaaaacaataacgggtctgcaaattgaaaaattctaaataggaaaacagagttacacaagtttagacttttaacctctcaggcccagttctcccgcttagacctgagccgaatcagtttgtccttccatgatgctgttcaagtcaacagataaatcaatgaaccttcaatacaactaccacatctaggtttaaactaatgataattattattcaagatcaatgcgtttcttcttgcacatcactcttcttttgttccttggcagaacatggttgcaaatttagacagatgtgatgcttgttcagcattcagacagatatgataatactgcactgggtagaatcattaccagatgctcaacctggagtcctggatgaattgagccggtcaataagaactagcaaagtgcccgtatgtgtttac

SEQ ID NO: 55679 - DNA, 1966 bp, Zea mays
  Clone ID: MRT4577_150775C.1
acaccattgggactcgttacccatctcgtggactcttctgtttcttctccttttctccccccgtttattggaccagcggcggcttgctcctcttcgtgtaacgggatttggttttctgcggatgagtgtttattgttcgatgcggagcttcgatctggattcgtgcttgtcctcttggtctctgctcgctttgtaatgcttgggtacggtgcgctgaaggtgtttggggggtatgattgttgttgcacctgaataactgaggtgggtgtggcgcgaacttgggggtgtcttctctttggcgatcagtgcaatcgaatggtcagttgagttagatagtttttacatcggcgttgatggacttgcataattatgtgcgattcatgggatcattaacttggtataaggggacgatcagtgatatgtgaagctgtcatgtttaggtgcttgattcagcaaagtggttaggcatccgacgctacgttttggggattgagatgcaaaataaagttcagcacttaactatggatcaagggttgtagagcgcaacccagctcttctgaatccaaactgtaggttgatacgtcggtgccatgaaactgaaaaccgatagttgtggcataggctcagggcaagaatcattttttttttcattttctgacttttccgtaactataggtcacacgatgattattttctccgcgacattatccgggtattaccgtgacagatatttttattggctccatttctgccatgtagtcaggttgatggcgatggagggaccagttttatgccgccctgcaatgcaagccaaatcgcctgctgctgcgctggtcaacaactccctgaccagattcgggcagcttgggaccatttcaaaatacaggaacgtttcaagattcatttctcccatctctcagccatctacgaagaacataggtccatgctgtagcttcagctcgtcttctgatggcaatggatacatggctggaaactttagcgacagtgatgaagattatgttaattctactgtgctagaagcagttgaggtgagaagtggatcggaaggatatgtgataaagatgcgagatgggaaaaacttgcgttgtgtccataacaattctcaagggagaaatattccagagagtgcaccccaacctgctattgttttgaggattgaagatggaagcgaaactttacttccaatcattgttttggagatgccaagtgtacttctgatggcggctattcgtaatgtccacattgcacgaccaaccatatatcaagttgtcaaggaaatgattgataaaatgggctatgaggtaaaacttgttcgggtaaacaaaagaattcaagaagcgtactgtgctgaactttgtctaacaaagattgatgattctacagacagcatcaccttcgatcttcggccttcagatgccataaacattgctgttcgttgcaaggttcctgtacaagtccatagaagtcttgcatacagtgacggcatcagaccagtcgagccagcaagaatggcagtagcagctggcctatcagatgggttgttatttacagagcttgacagacccgatggacaggcatctgttgaggctcaagagtttggattggtgaagaacatgctcattgcagccgtagaagagagatacaaggatgctgcatcatggaaggacaaactgatgcggctgaggtctaagcggaagaactgggcctgacagcgttgcatgtctggatggtgtaaataaagatgatgcccagctgaattccagtacgcattccagataattgatgctgggttatggctatgtaactagctgtacatattgtatggacccgaggatggtcttctgtaaattcagactaagctttgaagtgaaacactaatccttcggagaaacttggtaccttgtccgtgttcacttgtaaaaaaaaaaaaaaagcggtaacaggg

SEQ ID NO: 55680 - DNA, 665 bp, Zea mays
  Clone ID: MRT4577_150776C.1
agcagtggtaacaacgcagagtagcggggaagcattttgtcaccaaagccaacctttttgtttcatgttaatgcctatgcttcatgtcatgataatgatgatcctacgaatgtctaatgaatgtttgtatgaatgcaaagaatgatgcgatgagatatgcaaatgtatgacccaaacacacacgaaaccacacccagactctgcatccccttagaaacgacatttgagtctcttcaccttctatttcggtggcatttaagctctgcattcccttaggaacgtattttgagcttcttcaccttctatttcggtggcatttaagttctacattccctttggaacgtcttttgagcttcttcaccttctatttcggtggtattttggctctgcattcccttaggaacgacttttgagcttcggaacttactctgcgctcccttaggaacgacttatgtagcttcgtcaccttcggagtgacattttagctctgcatccccttagggactacttttgagcttttccctgttctttttgcactcgatggtgcagattctgatattacatgttacatttttgggggaattttggccttgtattgcatagggctaaacaaaaaaaaaaaaaaaaaaaaaaaaaaaaaagtactctgcgttgttaccactgct

SEQ ID NO: 55681 - DNA, 1915 bp, Zea mays
  Clone ID: MRT4577_150777C.1
actggtatgttttgtttatctactacagctcaagactgtgactaaatttcaacggattaaggtggatagcgtcagatttgaagatgagaagcttcagaataccttgtattgggctaacattaccattcccatggcactgttaccattccatgtttctaatgcactgatggtatgaggccacgcttctgtatgtgcctaccgccaagacaccttgagctacacatgtggtttgttattatcttgaaagcgtaattgtgtcaatacaatgaccttaatatgcttgcttgatctatatttttctgccatcaagaatgaggcacttagataaggatatatgttagctttgtcagaggccggccgggattccactctcttctagataataataataaagcgaaaggttatcccacctcttttctattcttttttccgcccgaagacaacgtaacaaaccaacgataatcctccctcttcctacaaaaaaggaaaaaaaaacatcaataataatccactgcggtcgctcgtcctcctcccaacctcctcccaagttgcctcgtgctctgcttcttcggttttcaggagcgtcggccattgctgctggaaaagcagaccattgggactccctcgtgcgttttccaaatcagtcaggttgatggcgatggagggaccagttttatgccgccctgcaatgcaagccaaatcgcctgctgctgcgctggtcaacaactccctgaccagattcgggcagcttgggaccatttcaaaatacaggaacgtttcaagattcatttctcccatctctcagccatctacgaagaacataggtccatgctgtagcttcagctcgtcttctgatggcaatggatacatggctggaaactttagcgacagtgatgaagattatgttaattctactgtgctagaagcagttgaggtgagaagtggatcggaaggatatgtgataaagatgcgagatgggaaaaacttgcgttgtgtccataacaattctcaagggagaaatattccagagagtgcaccccaacctgctattgttttgaggattgaagatggaagcgaaactttacttccaatcattgttttggagatgccaagtgtacttctgatggcggctattcgtaatgtccacattgcacgaccaaccatatatcaagttgtcaaggaaatgattgataaaatgggctatgaggtaaaacttgttcgggtaaacaaaagaattcaagaagcgtactgtgctgaactttgtctaacaaagaaacatccggcactgcagattgatgattctacagacagcatcaccttcgatcttcggccttcagatgccataaacattgctgttcgttgcaaggttcctgtacaagtccatagaagtcttgcatacagtgacggcatcagaccagtcgagccagcaagaatggcagtagcagctggcctatcagatgggttgttatttacagagcttgacagacccgatggacaggcatctgttgaggctcaagagtttggattggtgaagaacatgctcattgcagccgtagaagagagatacaaggatgctgcatcatggaaggacaaactgatgcggctgaggtctaagcggaagaactgggcctgacagcgttgcatgtctggatggtgtaaataaagatgatgcccagctgaattccagtacgcattccagataattgatgctgggttatggctatgtaactagctgtacatattgtatggacccgaggatggtcttctgtaaattcagactaagctttgaagtgaaacactaatccttcggagaaaaaaaaaaaaaaaagcggccaagggcggccatatatatgggcgtgctgcttttccccgaattaatttgtatgttagtctgttaggttgaatgtttggcatg

SEQ ID NO: 55682 - DNA, 932 bp, Zea mays
  Clone ID: MRT4577_150778C.1
cgcccgccccggtggtcgcgcggcgtgccgctattaatagcgacgcctgcctccggcgacccaattcggcactgcaagcgcaaagcagcttcctttcgcctgctgacaaggactagtcgagcggcgagcgaggaggcggaggatgggccgcggccggggcgtgagctacgggggcgggcagagctcgctgagctacctcttcggcggcggcggcgacgaggccgccgcggcgcccgccaagccggccgcggcggcgcctgcgcctgcgccggtgccggcggcagcagacggcgagaagctcaaggggatcccggccggcgtccgcggcaaccagagccagaccaacaactacttccgggcgcaggggcagaactgcggcaacttcctcacggaccgcccgtcgaccaaggtgcacgccgcgccgggcggcggctcgtcgctcggctacctcttcggcggcggacctcccgggagcaagtgatgtgatgggcaccttctccgcccagacttttcggagcaccgcctgcttgggaagcttgatttttactaagtccatcgtgacctgctggatgtgaagttaatttccatgaagaaatgtatgttcatgtgtacctctgtaatctagaaatgtttatgtgtatctctgcaatttcgttggggtcggtcgtctcatcagtgcctgtatgtgtgtgtgtcatcaactgactttgtcctgcatgttgttcatcagaagttgagaacatgtgttaagttgttcacatgctaatgtccagcatgttgtttatcagaagttgagaacatgtgttaagttgttcaaacaacaaaaaaaacaaagtcagttgatgacacacacacatacaggcactgatgagacgaccgactttgtcctgcatgttgttcatcagaagttgagaacatgtgttaagttgttc

SEQ ID NO: 55683 - DNA, 279 bp, Zea mays
  unsure (1)..(279): unsure at all n locations
  Clone ID: MRT4577_150779C.1
atcaccgaactgcactgcagactgcagagcacctctcctgtctcctcatctcacgctgacaagatccaatcacgacgctaatcagtcgtcctaattaatcggcggccccgtgatcggatcgtacccgccgcagatcaccactgtccaagtgcccagtcgtagatcccgtgatcttttttttctcggtggggttgctgctgcggcttgaaagatgacggagatggtggtggcggctcggacgccggcccccgcggcggggaggnggggcgcgncgccgcc

SEQ ID NO: 55684 - DNA, 344 bp, Zea mays
  Clone ID: MRT4577_15077C.1
ctggtctgcctccctaaaaaaaactgctcggtttctggtcctgctccgacgcgccgggatcaggtgtgatatcttagccgtgctcggttgctccgactggtcttaggcaaagagggctcgcatgctcgcctggtccagatggttgaagcacatgggccccgactggtcgggcctttaccagcacgagggcaacttcctggcgcagcagcggctcgccgtaatctccacgttgaccggcgaccagacgttgttcagctaagaccgcaccgtcttggcggtggccaatggagagatggacaaccaccttaacgttctgaagcagttcactttcacacacaacttca

SEQ ID NO: 55685 - DNA, 456 bp, Zea mays
  Clone ID: MRT4577_150780C.1
gaccaatgcacgctccgcctgacgagcgtgttggaacccatagactcttctgtccgagatcttcccagacttcccctagccacggagtctgtgccaggacatcaccacgatggtgatcaataccaaagcgatccgagactccatcgacctatttgtatagagaaagaaagcactggaggatcaccgcgtctagctgcgagaacaacatacaggagtcattctaggacatgatatacctctacctcttgtctcgactctagtgcctctggggacgcctacagacactgccagcaagatgcgatctctcaagaagattctgtggaatatcgaacatgacgatactactcctgcatgcccgacgtgtacctccaaagatgtccgtcatgaagtacatgatctaattgctaccggtggaactgtatgtgcagctcgagaacttataggacgtgatggacg

SEQ ID NO: 55686 - DNA, 323 bp, Zea mays
  Clone ID: MRT4577_150781C.1
gatgcggaacttcacgatcttgctagcacaacacctccggctactatgcatcctcgcgccgcatatcatcaacattatgctcttgaacgctgtaatatacaccccgaatcatataaaacgtgacggaaccaccatcaaacttaccttgcagcttacagaaaattacctaaactacctaacaactgatccatttgtttctaggatgatacattcaatatatattctgataaaagaatgtgctatgatatactacataaccaggggattcctatatatgatgttagtgaacaatataacttctatagtataagtgatgtaagatc

SEQ ID NO: 55687 - DNA, 592 bp, Zea mays
  Clone ID: MRT4577_150782C.1
tttttttttttttttttttttttttttttttttttttttttttttttttagaattctcgagggttttattcccaatcattttgagtattcagagcgtttacagcggcatcaggcgtgtcatctcatctgacagagcaagctatacataaattttgaacaaacaagaacattcaaaaatgagtctcaactttcaagcgcacattcatgatgatgaaactgatgttggcgccatgctcaagtcaagctcaagtataggccaccctgctggtgcgcgtgctgacaccgagccgggggggggtccagccccctgggcagctcgagtccgggctgtacccggcgaccgcactgccgttctggcccgagctcgacgtgtccccggcgagcccgccacccgaccggctcctggcatgcgggggtgtagccgatggcggcgcggggcgcgccttggctcgagccgaccttggcgcagccatgtagcccgggatcgcgggcggacgcccgtgagcagccggggaggcctggttcagggggctccgggacgtcgtctccgtttccaccgttttttccgacatgccgttcgcaaaagcagcgg

SEQ ID NO: 55688 - DNA, 622 bp, Zea mays
  Clone ID: MRT4577_150783C.1
ccggccggggtctctttcagcctcttcctcttctctcttacgttgacctctttgcctcaactgcgccgcccgctcaccaagccaggcagaggctgcaggggtcgtagagttggagggcccagtccatctgggaggtcccagtgccgcctgctcaccagttaccagccaggccgtcgggaggagaaagagagagagagagagccgaaaagatcgagacccatacgctcagatcgaagttcgacttctcctctccccctcccccaacccaacagattcgtgtagcacagatccatccgactttgggttgatttcttcctttgctgctgatcagaaagttacagatggatcatgctgaggtctctggtttgttgtgtattggtacacgtgaaacagatgggggtgaagaatcatatgcggctgagtaccctaaaatggatcaggataccaatgcaacgaccaaatttgatgtagtaatggagacttcagcaatgtatactgatcaaatcaacaccaatgcttgcttagatgaatatcacatgtctgggaaacagcctatggaagaaatgggatttggcagtgcacattcctttggacttccatcagaaagaatggtagctgattc

SEQ ID NO: 55689 - DNA, 564 bp, Zea mays
  unsure (1)..(564): unsure at all n locations
  Clone ID: MRT4577_150784C.1
ccggccggggaatccgttcagagcaaacaagccagcgtcaagctcaacaacgtcactcggccattgaaccaccgcccgccatcccatcgctcaacctcacccgatatctcgacgataaatcatggccctcatccgcgctgctgtcgcgcccctgcgcgccgcacgctgccttcgacagcccctctcctccagaggcttctccgtgtccgcccgacgacaaggaggtggtggctcgcaccaattcgaccctcccaccggttggctttggggtgttaagcctggcgagaaggctgagcccgagggctgggagtggcctacctatatccttctcggaagccttgccgccactgctgtagcgctcgccttcaagcctgatactactgtttctacctgggccctcgaggaggcacgaagaaggttagaggnaggagggagttctgcccgacccatccaagcagggcaagaagaactaagccgaagattttgacatacgaagagtgaaagttggtcaattgtacatgttatttgcatttgaacaaaaaaaaaaaaaaaaaacccgcggcc

SEQ ID NO: 55690 - DNA, 586 bp, Zea mays
  Clone ID: MRT4577_150785C.1
ctattaggctttggctggtgctgaacttctcaactctcctgaccatgcttgcagtctcgccaaataggtttgattttttgatagactagtgtaagcaactaaaggtgagttgaatctaaactgcagatgaagaattgaagatagtggtaagttattatgatcaacgaaataataatttgaaggttcttaataaagaaaaaaataggttaagtgacaagtgatgagcgaaaaatagcaaccataagcaaatgacagcttggcacctgttccttctgcagtttgggaatctttaggatagtaaccttacatttcttcggcggagttatttttcttggttcagtgtttgccatcaattggagtagtggaccatcctttccttacgggcccttgatttatcttgggtctcagcacctccatctcagttcttttatgacatagtagagccatactcttggtttcttagttctgctatgtttgtgtaaggcttttgtataatatctcgaaggtataaatattctcactaaaaaaaaaaaaaaaaaaaaaaaaaaagacggacacctggcaccgcgtggagcggagcagcggg

SEQ ID NO: 55691 - DNA, 383 bp, Zea mays
  Clone ID: MRT4577_150786C.1
gtcagtcgggactacccgctgagtttaagcatataaataagcggaggagaagaaacttacgaggattgccctagtaacggcgagcgaaccgggagcagcccagcttgagaatcgggcggcctctgcggctggagtgtaggctgctatggtgtcctctcttactcgatcgggctatgctcattcttatgggacgcatagataccgagtggtaacaccacggtcctgtacatggtcaagcttggggtgatcgtcatggtcacctttagaggaacacattggacaaggctttgggcactgttgcaccaggtggttacacatctcatgtgcgatggtgatgctcagtgcttgagacgacaaggatggggatcttttcaagtgcccgg

SEQ ID NO: 55692 - DNA, 697 bp, Zea mays
  Clone ID: MRT4577_150787C.1
acattttctcctccactgatataggcagtccacctgcgcgcgaactcccaagcgccaagtactaagatagccagctgagctcgctcccagtccaagcgccggcgccaccaccgcagctgctcgctgatcaccatgaacaaggagaagcaccaccgcggactggatcctccggcgctgctgagagctccctcgccgcctgcatcctgacgctgaccgccgtccgctgcttcatcgtgctcgacatctacctgatcgctgcgtccctccaagccgctcttctacctgcaggacgtgctaactgcgctccatcgacctcagagacccggggttctccatcgacctccaggcgacgatcgcgtcgcggaacccgaacgagtgctggggagcgcactacaagacgatggacgcgatcaccacgtaccgcgacgaggcgtggacgtgacccgtgtcgatgccagcgatctaccaggggcacaatgacgctgtcaccgtggtcaccggccatgtcgagcgactcgggccccgtggtgcagtacgtggcgcacgccatgaagcaggacatctaggcggcctacatgctgctccacttcaggatgtacggccgcatcaagtggaaggtcgtcagatgcgtctcggacagataccacctcttcgtcaactgccacgcgctgctcggcaccagcggcagcgctgccgt

SEQ ID NO: 55693 - DNA, 362 bp, Zea mays
  unsure (1)..(362): unsure at all n locations
  Clone ID: MRT4577_150788C.1
gggtcccgggtcccccccncgggtncgacccagcgtccgggcagaacccagaccaccgcaccgcgccgccggcggccgcagggtacgcacgcacggccattcttttttttttttttttcttttcttttatcggtacgcggggcgaccgcacaaggacgagcgccgcccgcaccggcggcagccaaagacggacgccaacacgcgcgccagcaaaacagcgcaccccgacggaccaggaaaggcggggaacgacgagtgggccgacggagcgccaccgccacaacgacagcacggacgggggcgccaacacccccagcgacgagggcaagcaccaagagaacttctacgagccggcacaagct

SEQ ID NO: 55694 - DNA, 662 bp, Zea mays
  unsure (1)..(662): unsure at all n locations
  Clone ID: MRT4577_150789C.1
aattcggcacgaggctcatcccaactgaccgactaccatggccggcggcggcggcggctctctgtctagcccctccgcctccttcctttccagtcccaccccaacaccgccccctcgtctcctccgcaggtgtagcacgaagtctgcctcacgagatagccccatcctcagaccaaaaaagccgcctccactcttctgcgcggcggcagccactcccacccccgctcccgcggccgcgtccaagtcggctgggtcatggagggacctgtgcagtctcaacgcctgggtggtgcgagactaccgccgccttgtcgactccgtcggcgcgctcgagccggcgcttcggaggctctctgaggaacagttgaaggcgaagacggccgagttccgcagccgcctaacgcgcggggagacgctcgccgacgtccaggccgatgcgtttgctgtggtacgtgaggcggctaggaggacgcttgggatgcggcatttcgacgtccagataattggcggtgctgtgctccatgacggctgcattgcagagatgaagacaggcgaggggaagacgcttgtttccacacttgcggcttatctaaatgcccttacagggaaaggggttcatgtggngactgtnaatgattatttgncacagnnngatgctgaat

SEQ ID NO: 55695 - DNA, 739 bp, Zea mays
  Clone ID: MRT4577_15078C.1
atgtaaatgaactctaggtgttatgtattttggaactggaatttagctgattccttagtcttgtggttcaacaaattgaaaatattttcatattgtggttcatattgtattaaagacttaccgtcaatgaaacccattaatttttttttggtgaaaacagatccttgccccactgccaattgggttcgcggtgttcctggtccaccttgccaccatccccatcaccggcaccggcatcaacccggctaggagccttggcgccgccatcatctacaaccgggatcatgcctggagcgaccattggatcttctgggtcggccccttcatcggcgccgccctggctgccatctaccaccaggtgatcatcagggccatcccgttcaagagcaggtcttaagctgccgcggcagtgccgagacatgcctgccagtccggaaggacgagcgtcttcctgtgggggggaatgccttgtctgcccacgcctagtttctctgctgaatcttccatctctcttcccttcaagactgctcactgctgcactgctctgttatctgaacccagaactttgtgtactcctgtaccgagctgtgtgtatgttttttttttcttccatcgtgtttgttgcaagggttcccgtctccttttatgcgttgggatcgtggcaagaaagggcagatatcatgtgaaaacgtgggtttataactatcagctggatttcatccaagtggaatcgattcag

SEQ ID NO: 55696 - DNA, 134 bp, Zea mays
  Clone ID: MRT4577_150790C.1
attcggctcgaggagtaaagcagacccctgatcgggccacgcaggggcaaaaagggcagtgggggacgttaaagatgaggagcaggccggccacccacagtccagaggagcacaggtaaacgaggaaaactgca

SEQ ID NO: 55697 - DNA, 435 bp, Zea mays
  Clone ID: MRT4577_150791C.1
aaaatgaatcaattttattccaattcttcaaaatttatacgtaatatgttgtttccaaaatgtaagtcaccctttatataatagttttattatttcatctttctttgatagttttttttttcatcttttctttatggttcttcagtagaagccagaatcttgagttgcccagttaggagcctctgacctgctattctgattaagtttcttctcaatattcatggccaacatctggcttctaaaggaaaggcttttggtcttttcaatcacttgctgatagggtgagactgcattgttacccataaccacatgacctaatttagaatcaatcttggcatccagtcttgcatttctaatcaaatttacaatccacctttcagcttcttctggagtcatgttcaatttatctgccaacatgttaatgctgatacactg

SEQ ID NO: 55698 - DNA, 350 bp, Zea mays
  Clone ID: MRT4577_150792C.1
gcttctcataactcatcatacctggtgaaactattgctaactttaattaaacaaattagtagcttctacagtaattgaactgcgtgatggacctctctgcaattaggatgtggtgtgtacatcacataccatggagcgttattgtaaccttttttaagaattttgattacaccaacacaaaaaatattcgcatttaatggatgctcataggtcattcagttttcgatcgtataagcgaaatgctcagcaaatgtgttgtggttattaccatacacaatgcactataattgtccatactgatcctatgttggatactcttaatgattctactctgcttttcttcatgcttt

SEQ ID NO: 55699 - DNA, 417 bp, Zea mays
  Clone ID: MRT4577_150793C.1
gggaaggaaaggagagagcgtataatgcctatcttgcagggccgaacccgctttgctagacttattcacatccatgagatagacacattctgatctcttcatacgaactctgaagatacggagtacagatgtggttcgggactcaactaccgtccagaggaaatgagcaatcgcttgagagactcagacgataaactgggactaccaatcacatgctgccaagagactgagcccttaggaactagctgccatgtcgctctatcaaaggacaagcttgcggatggatctgaccagccatactgtgtgctaacagcgaatggatacccaaatacccatcagctgaactcataagatgtcacaactgtcatggaggtgaggcaacaatcatggacactaaggtggatgaaccatataaat

SEQ ID NO: 55700 - DNA, 181 bp, Zea mays
  Clone ID: MRT4577_150794C.1
aaaccttcacttctttccttcctccccgtccacgccacggtcttatggagaaagaaaaggggatcccgatggttaataagctatctcggattgtcgtacccattgccgaggaggggtccttggtgctaactggcgttcgtggaggagtcgcagtctgcagaatcgtaaggagtacgcggac

SEQ ID NO: 55701 - DNA, 337 bp, Zea mays
  Clone ID: MRT4577_150795C.1
aagtaaatatcccctttttttttttttttttttggcgcggctaaccaaagtttttattccgccaagtaacaaaaggggacctcccccccaaaagacaagctgccgcgcaataaagcttgaacggcataaactggtccggggccaaaagccctggggaattacctatttttagacaagaacagatcgccagattccacccagctcgcccaaggatccgaaagggccgaaaccatggtaagaacggggggggggcaattcccgggccaagggggactattacctaaaaaccaccctttgtggcaacaagggcttgttggaagacacctggaaagaaaaa

SEQ ID NO: 55702 - DNA, 654 bp, Zea mays
  Clone ID: MRT4577_150796C.1
gggtacacggcgccccctctcgagtttttttttttttttttttatgtttatcaaatttcttcatttgtttcttcaatcttcgacatcattgtcattgtcatgcttatgttggagtgaacaatcatgtctataataattctgatctgcgcactccccaaaacgatcacatctcctcgggcgtgcaaaagaagagagaagaatagaaaacgaggtgaggggtgcatacaggataatcctcaaagcatccaagaccaggtgcaatacgacattttgctcatagatttccatctctttgtccaccctctttcctctccatttacaaggagtaaagaacaacacacaccacaccctcaattcagtcatcaacttatgagacctggacgaactgacccatagcagggacaccgtcgacaaggacgtagatgacataaggaccagcaggagcaacggccttgttaggaggcatggtgacggtgatgctctgggcagtggcgccagccttgaagccggtgttgtcgaggaaggccatgcggtgacccatgtggagagagtgggtaacgaatccaccgtagtagagggtgaccttgacttgcttggcgttggcgggagcagtgaacttgatgttgaaggtcgtgttgaccttgagctgcttgc

SEQ ID NO: 55703 - DNA, 439 bp, Zea mays
  Clone ID: MRT4577_150797C.1
tcgagcggccgccaccgcgctggagatcagcacaattctcccgtgagcgcggtactaggtgcgaggcgctcttggcatttttaccaggatcgaacatggttatggtgtaaatgctgagtgaaagatccattggctcattctgtcaaaatctatcatacctgtatacgatgcgctcaatgcctgcgatcctcgcccgacagatgtatcacaaatgatacctggggagggatgtaacccctttttatttgctaacgctccgatacccgatgattgagtgggttgtacaacatgcgaatccacctgtccaacggattgtttaactgttccgctttatttatgactctgtaacatcccgtaggatggttctatcttattgacacgttacaaaaaactacacttgaatcgactgatttctctttaccgaagagacctgtgctca

SEQ ID NO: 55704 - DNA, 1721 bp, Zea mays
  unsure (1)..(1721): unsure at all n locations
  Clone ID: MRT4577_150798C.1
gccgggnactcgccccggccggatgccggagctcagacgactacgtgtataaactccggctacacgtcccggcacggcggcaccacaggctgataagcggcagtgggaaaataccgcaccgcacgcaccaatggagaacgccaacgcctcctcttgccgcaacggcgacggcacccagacgccaccgccgcacgtggcgatgcttgcgacgcccgggatgggccacctgatcccgctggcggagctggcgaagcgcctggcccagcgccacggcgtcacgtccacgctcatcacgttcgcgtccacggcgtccgccacgcagcgcgcgttcctcgcctcgatgccgcccgccgtcgcgtccatggcgctgccgccggtggacatgtccgacctcccgcgcgacgccgccatcgagacgctcatgtccgaagagtgcgtgcgcgccgtgccggcgctcaccgaggcgctcctgagcctcaagcagcggcccaccacgaccggccgtctcgtggcgttcgtcaccgacctcttcggcgcggacgcgttcgacgcggcgcgcgcggcgggggtccagcggaggtacctcttcttcccgaccaatctaaccgcgctcacgctgatgctccacctgccggagctcgacgcctcgatccccggcgagttccgggacctcgccgagccgctccgcctgcccgggtgcgtgccgctgccgggcaccgagaccatgaagccgctgcaggacaagtccaaccccagctacagatggatggtgcaccacggcgccaagttccgcgaggcaaccgccatcctcgtcaactccttcgacgccgtcgagccggggcccgccgaggtcctgcgccagccggagcccgggcgaccgccggtgcgcaccatcggcccgctcgtgcgcgcagaggacggtggaggcagcaaggacgacgcgccgtgcccgtgcgtggagtggctggaccggcagccggccaagtcggtcatcttcgtgtccttcggctccggcggcacgctgcccgccgaggagatgcgggagctcgcactagggctggagctcagcgggcagcggttcctgtgggtagtgcggagccccagcgagggcggcgtcggcaacgacaactactacgactcggcgagcaagaaggaccccttctcctacctgccccaagggttcctggagcggaccaaggacgtcggcctcgtggtgccgtcgtgggcgccgcagcccaaggtgctggcgcaccagtccaccggcggcttcctcacgcactgcggctggaactcgacgctggagagcctggtgcacggcgtgcccatgctggcgtggccgctgttcgccgaccagaggcagaacgcggtgctgctgtgcgacggggtaggggccgcgctacgagtgcccggggccaaggggagggaagacatcgccgcggtggtgcgggagctgatgaccgcggagggcaagggcgccgcggtgcgggccaaggtggaggagctgcagaaggccgcggccgagggccttcgcgacggcggcgccaccgcggccgccctggcggaggtggtcaaggagtggacgagtgcagacgacagcgtctactaatcctacactactacgctaaacgcgaatagcctagttaattattcaaagcatttattatgtccattttgctattattgcgggtgcagttattataataaagtgctcgtgtcagagt

SEQ ID NO: 55705 - DNA, 220 bp, Zea mays
  Clone ID: MRT4577_150799C.1
actatgtacaaacgggtcacctgacacgaacccagccaaagcacggtccatttgcatcagggcaagccacgacacgacgtgccactagaccgtgcggagctgggttccgtacctgtctaacggtccagacatggcttgctgggtcaaaaaaaaaaaaaaaaaaaaaaaaaaaaaaatatttttttaaaaaaaaaaaaaaaaaaaaaaaaaaaaaaaaaaa

SEQ ID NO: 55706 - DNA, 360 bp, Zea mays
  Clone ID: MRT4577_15079C.1
cgtcgcgatccaattccggcgccggagaagacgcgcgcaggccccacccagccgcctacaggcgctccgctcccacagacggacagcttgggctcgacggatgaacatgtgtgagaaagatcagaatttgccatggggatacgacctgttccgcgacccttttgcttctcccaacggcatcacattcagatgagactcagttgcattcttctcaactcgcatatgatatgtacaacccatcagtaggcatctaccatcctggaagcacccatgagcacgagcacgagacagtatatgtggaaccgtctagttcctctccagacacaggtggtgacggttgttttgagatggaggaggaag

SEQ ID NO: 55707 - DNA, 1817 bp, Zea mays
  Clone ID: MRT4577_1507C.1
ggccggccgggagtacacgctacgacctcgcttccggcgccatggagacgaagcgggtggccatcatcggcgccggcgtgagcgggctggcggcgtgcaagcacctgctggagcgcggctgccggcccgtggtgttcgaggccggcaccgtcgtgggcggcgtgtgggcgcgcgtgccagacagcacggcgctgcagacgccgcggcccatgtaccagtactccgacttcccgtggccggacaccgtcaccgaggtgttccccgaccaccggcaggtcatgtcctacctggacgcctacgcgcgccacttcggcgtgttggactgcgtccgcttcggccgccgcgtgctcgggatggagtaccacggcgtcgccgaggacgacgtggcggcgtgggaggagtggggcggaaacggccaggcgttcggctgcgccggcgctggcgagtggcgcctcaaggtggccgacgccgagggacgcattgagacacacaaggcagacttcgtagttctctgcatcgggaggttcagcggcgttcccaacacgcctacattccctccaggcgaaggtccagaagcgttcgacgggcaggtgatccactccatggactacgccaagatgggcaccaagaaagccagggagatgatcaaaggcaagcgcgtcactgtcgtcggctacctgaaatcagcggtcgacattgccgccgaatgcgcagaagtgaacggcgctgatcatccatgcacaatggtggtccggacgaagcactggatcataccagactacttcgcttggggagtccacatatcgctgctattcctaaaccgcttcgcagagctcctgatccacaagccgggcgaaggcttcctcctttggctcctcgccaccctgctggcgcctttgagatggctgttctcgaagttcgccgagagctactacgccatcccgatgaggaagcacagcatggtgccggaccacagcctgttccaggcgctggccacgtgcctgatcgcgatccagccgaaggggttctacgagaggctggaagaaggcagcatcgttctcaagaggtcgaagacgttcagcttctgcagggaaggcgtcgtcgtggaaggcgaggtgtcgtcgtcgtcgctggtggagagcgacgtggtgatctacgcgaccgggttcagaggcgacctcaagatcaaggacatgttcgcgtcggagtacttccggagcgtcgcagttgggtcagcatgcactactgtgcctctctacagggagtgcatccaccctaagataccgcagctcgcagtgctcggttactcggagagcatcgcgaatctgtacacctcggagatccgggccaagtggctggcccatttcatggacggcggcttcaggatgccgagcgtcgctgcgatgcagaagaatgtcctcgagtgggagaagtgcatgaagaggtacgccggcggcaggtacttccgcaggtcctgtatagggctccttcacatctggtacaatgatcagctgtgccgggacatggggtgtgatccgaggaggaagaagggctttcttgaggaactgttcggagtctatggccctgctgattatgctgaccttcaccccgaccgcaagaaagacgactagaccttctgtggcggcactcgtaatctagaccttcattataaagtgggtattgtgggtaccaacgttcacagctcctgttaatgtccatatcatatggatgctgaatatataaagtgggtattattgtgcctattaattaatatcgcaaaccgaataataaaaatggtcgaacaggtcgattacatt

SEQ ID NO: 55708 - DNA, 145 bp, Zea mays
  Clone ID: MRT4577_150800C.1
gtttttgcttctgccactgccgcaaatccaagagggggggggatcatatacactgcacgcggggcatagggaccacctgccgacgtcctacagtaggatgagctgttcctactccagctccacgatcatgaggagcgcacattag

SEQ ID NO: 55709 - DNA, 299 bp, Zea mays
  Clone ID: MRT4577_150801C.1
atcttaacaaaagcggtaataggataagactctgaacaattcattaaaacatttacatggaacctcgaaccccacaaataacttagtaaagcgtaaatgctcctatgtaacctctattctacagcaggtcaaatttaccaaccgattaacagttgagacactgatcacgagaaaaacaaactatcctgaagcctaccaaatccgaataaaaggggaccagaatttctgagggcaacatgagcagaggctcaccaatttaccaataatctacaaaatacattatgttgggtgatataatc

SEQ ID NO: 55710 - DNA, 714 bp, Zea mays
  Clone ID: MRT4577_150802C.1
gataccaatgttatttatttacattaatgttaccattacaagtgctcaaccaaacgccacatgagttcgacgtgtttcgtggctcacatctacatgacgaaattttcacttacatctgcatgacgaaatttcgtggcccacacgcagtgaccaagtgaccaacctatattctcactataccttgacttttcacatattggcctttctttgacatggtggtttgagtatttggcaagagatctccatcttgaaaagtacccaaatttactgaggtcatgttccattttgaaagaggtcctagccatcgacaaccttagctgggacgtgtggaactattgtgtgtactgcttgtcaccttcaaagtattaattctgcaaagttaactgaaagaaggtaagcagacaaatgtaacctctcttaattcaggcatgatagggaggaatattttggtgcttggtagttggtacacaacagaaagctaagggtgttatcagtgcctcatctcctcagtagctgttgatgcaattataaatccctaagagccatatcaatctcctttttagagggggggggcatgaccaaacgtccaaaccattccttgagttgccatcatatttcttcaaaatagtgttcttggtacgaagatacaatggccatttcttttcataagcagtggccatagaagccgttggcaaagtcatgaatggatgaatc

SEQ ID NO: 55711 - DNA, 1583 bp, Zea mays
  unsure (1)..(1583): unsure at all n locations
  Clone ID: MRT4577_150803C.1
aaaattcatttttttctttttcatcatgcaaaacttctccctaaaacaaaaataaggggagaagtatacaacacttgttctaagcttgtatctaggttccaccaaacaaaatattttctaattaatccaaagacattttgcaagttaatgtaatagcttgttgacgatgccaaattaaaccaatagaacatgaactatgaattaattacacttatagggtggaggaatccagttaaaatttcaagataaatgaaatgtactagttggtgctcgtcaccattagatctgcttgtggttattatataaggagttaaatgcatgagtgacctttgaacttgtagagtttgtcacataggtccacaaaatttgaaaatatatttttagggtcctgaacttgttaagtggcacaatacaatggttggtatggttttagaaatggacctgaatgcaccatggatgtgtggtacatctcttaacaagttcaaggacctataaatgcattttcaaggtttatgaacctaaccgacatctcttgacaagtgacatggtctttccttatttaagatggagatatttgtccaggtcagctctctctcccacatctaattcttttttccatgtagaaatttgtacttggtcaactaagtcaaaccccaattaatgactttttatttgtaattgtagtcgaattatgactcttgacttaattgactaggactcttgtaaccctcacctatggactatataaagagaactatacaaggaggggagggactctccctaactagcgaacacattatctactgtattatgaattagattgaagttgtatgcacatatgtttgatttgaaacccatgtgggtgaccacatcgtttcggaccgcaatatgatgatacattttaattttacaattgtagacacatcaatgtattttattttctatttaatgaattactgaacaaagtatatgtttgtgaagcatctttgagttcccaggcgccggtggaccctgtcctggtggcaagaccagtccaatatttgtttcttcacctagactaaatattagctctctcgacctttttctccaagtaagtcttctgtcgatacacactgaaatttttgcaactagttgaatttgttttttatatttgacattgtgtgaactgtactcccttctgaattaatgccaacacatggaaccttgatgatgttttatgtaataacgcacgattccaaaaacctacttgatttggtttaggctaaccctcatatttgcatgtctattcctgttctttgttgctcatccttttgcaatccatttaccaataattcatttacatgaattatgtagccattgctttatgaattggcaaaatagagctaatccatgaaaacgaagcatgtttgttgcagaattggggtaatgttggtatctaaaaaatgaaaccctatatatttggttcactctaatatctcaatattacaaatcaaacacccctgcttgtttcaacaatatctaccaaaaacatgtgattttttagataacgggacaaggttgaagccncacgcgtaccgcggacg

SEQ ID NO: 55712 - DNA, 317 bp, Zea mays
  Clone ID: MRT4577_150804C.1
cccacgcgtctgaaaaaaaatgaaaaaaaaagataagaaaaaaaaaaaagaataataattgatatatgataaaaaaagatataagctctaacttaaataaatatataatgctaaaagaggaaatcaagatgtacaatacataaaggataaaagggggggccgtcttaacggttttggccttttattgctttgagcgcctcatagaagtttttgcattggatcatcaaggtgtagtttatgtggattgttttttacatcttcattctgggaaaaccttggttttatgcagttttaggcgtttttgtcaaacgcccttt

SEQ ID NO: 55713 - DNA, 576 bp, Zea mays
  Clone ID: MRT4577_150805C.1
cccctcgagttttttttttttttttttttttttttttttttttttttttttttttttttttttttttttttttttagggaacacccccaagggcctgcccgttttttttttattcatggggccaaaacaggggggacaggggactcgactccacattaacaacacgtacaacaggccaggggcctttaggcacaaaaacaaacatacttttttacacccggacagaacagtagtcagtagggggaaaaaacattggattccttacacgtatacatgcatggggggcaactgggcatgcatcgggggcaagggcaactgggcatgcatgaaaaaacaaagcatcgggggcaactgggcatgcatgcatgccggccgtttatttatttatacaaagctcatgcggcctgggggtttataccaacaccacagtcccacccgatcaaggaccgggcgggcccggggagtaccccgggggcttcggtttgggtttgccggggccaggctggggctccggaatcgggtgggggtggggctttggtttcgggtcgggctggggggggggctttggtttggggg

SEQ ID NO: 55714 - DNA, 494 bp, Zea mays
  Clone ID: MRT4577_150806C.1
aaaaggggacccaacgctttgaaaccaaaaaaattgacccccttccaaatttaaaaaggggggggggggtcaacaccccatttgcaagcgggtttgaaaatttcaataccttcacaagcaaaaacccccccttcgttacaagcttggacacaggcttttaaagccacacaaaaagctggtgcaccaggggcatttccccaaggagggccaaaagttcccccaccaaattggaaaacggaaacatctccaaaaatttcgggcaaagctggcatatgccaaaaaaaaaaacccccaaaagccaccgggaaaacacctggcatggaaacccaaccctgagggaaaaaaaaccccgaaaaccaactttttaaaaaaaaacatcgcccaaaaaataaacaaaacccaaagttatattggggttccccttttaacttacctactactgacccggaggggaaaaaaactcccccccacatacccaatggtttaactaaaac

SEQ ID NO: 55715 - DNA, 1526 bp, Zea mays
  Clone ID: MRT4577_150807C.1
gatacaatgcacacatggttattctattcatccggtcatcctcagaggttttaacatttaagcatatacaaacaaaaacaaaatgagataagaatgcaatacaatacgcactctgtaccaaacatcataaactcccaacatcatatatatggatgcttttgcaaagtgcacatggagatcttctgcatcccggcaactcggagatacgtcaacgaacagaggacgcagttgaaaataccagatactggctactcaaaatttccatgaagataacggtggggtctcggagtccttccaagtgttggccaattgatcgccataccggtcacccaagacttcaccagccgcggcgtacgactcgagttcagccatctcatctggtgtaagcttcacagacagtgcccccacgttctggttgaagttgtcgatttttgttgtgccaggtatggggcaaacgtcgtttccttggtggtgaacccaggccaacgcgagctgtgatggcgtgcatcctttccgtgctgccatcgcgctcacgcgctcgaatatctgagcgttcttgtcgagattctctggctgaaatctaggcatatgcttgcggaagtcctgctcagatagtgagtcaactagttttgctccactagagaagaaacctctgcctagtggactgtaagccacgattccaattccaagttctctgcaagtggggattatatcttcttctgcatctctagaccatagcgaccattcaagctgtaccgcggtgataggatggactgcatgagctcttcggattgttgatgcagatgcttcggataacccaatgtattttatctttccttcctccactagcttcttgagttcaccgatcgtgacctcgatgggcaccctcttgtcgatgcggtgctggtaatagaggtcgatgcagtcaacaccgagccgcttgaagctgccctcgcacgctgcccgcacgtaggctgggtcgccgtggatctcccgcttgccatcggcgaaggagacgccgaatttggtggccaactcgaccttctcccgcaccccgccttgcagcgccttgcccaggaggacctcgttggtgtgcgggccgtagacgtcggaggtgtcgaggaaggtgaccccggcgtcgacggcgtggtcgataagcttgatcatctcagactcgggttttggcgggccgtagaaggcggacatgcccatgcagccgaggccctgcgcggagacctccagcccctgcgagcccaacttgatgcgaggcacagacacgagagcggcagccatggcaggtgcagggagtcggatggcactgccggggtgctgatgaatggtgcctgccggccaggcagacgtgccctccgccagaaggcttcgggcgcaacttgcgttcaaaaactcgatggttcgcgggattctgcaattcacaccaggtatcgcattttgctacgttcttcatcgatgcgagagccgagatatccgttgccgagagtcgttcttcccggccggctcgaggtacc

SEQ ID NO: 55716 - DNA, 1266 bp, Zea mays
  Clone ID: MRT4577_150808C.1
tgttgaattcattaataaagagatggaaataggcaatgcggggttttattcgagtatatcttgtaagtgagaaacggcttagcaaccatgtctttagtgaacttacagattcaactgctgacttgtgcttctctgagatttcattcaactcagttgtacaacttctgagcttttatgtatctgtagcaattggaccccccaaaacagaaaagctttttcgattgcttgatatgtatgaggtcctggatgatcttctccctgaagttgaatccttgtttgaaccaaagtacggtgatatgatcctgaatgagtatcatgaagcactactgcaactgggagaatctgcaaggaagacatttgcagaattcaagtgtgccatccaatcatacacttcatccaatgcagtagctcgtggagaagtgcatccacttacaaagtatgttatgaactacataaaggctctcactgcatacagcaaacctcttgattcacttctcaaggacacggatcgaagatgcctgacttctgatattcagttgatggcaaatacatatcctaatttcacggcaacagctttgcatctacagtctgttactgcagttttggaggcaaatcttgaagctgggtctagattgtacagagatgatcgactgcagaacatcttcatgatgaacaacacccactacatggttcagaaagtgaagaactcggatctcaaaagttttcttggtgatgactggatccggattcataacaggaaatttcagcagcaagctgtgagatatgagagggcatcatggaataatgttctctcttacctcagtgatgatggcttgtgtgcttctggtgatgctgcttctcgcaaaaccatcagggagaagataaaaaatttcaatctgtcctttgaagaggtttaccgagttcagacagcatggtctgtcccagatgaccaacttcgcgacgacgtccggatttcaatatcactgaaagttatacaggcctataggaccttcgtgggaagatattcaggctttcttgatggctcaaggcatcgagatcgttatgtaaagtacagggcggaggatctggagacacttttgctagacctttttgaaggaactcaaaagacactgcagcattcttgtcgagtgtaagattaaaccagttcttgaagaagagatgcctcagtcttttctgggttccttctttggtttgtaatggactaatggtactgttgaatgagtatagtgatatcctgttctgccc

SEQ ID NO: 55717 - DNA, 399 bp, Zea mays
  Clone ID: MRT4577_150809C.1
tcaggcggcggttgggactggttcgacagacagaactaaccggtcgcgcttccttcttcaccctcagtcctcttccgtcctcctcctgtccaccgacccgtgcagttcggcggcgacatggcggcggccggcgacctgtccgacgatgagaagcgggcgatgaggggcagcaagttcgcgccgcttcctccgcctcctccctcttcccgcccccagccgaggtgagccttcaacttcaggaagagtagtacgacatgtttcctcatttgtggatggaactgaggattctgaagatgaagcagaggttaaggggatcaaaagaaaaaggaaaaataagaaggttaaaactcatcaaggtgacaaacaacagaggaaaaaaaaaaaaaaaaaaggccccta

SEQ ID NO: 55718 - DNA, 1077 bp, Zea mays
  Clone ID: MRT4577_15080C.1
cccacgcgtccggccaattgggttcgcggtgttcctggtccaccttgccaccatccccatcaccggcaccggcatcaacccggctaggagccttggcgccgccatcatctacaaccgggatcatgcgtggagcgaccatgtgagtgggaactgctctcgattcctctcgcaccaactttcggtttccaacagtgtggtaccactcgcactcgcagtgtagtttgtctccatccaaataccagacatgtggccactgtctttccattgtgcagcaatcatagtgatagtggcatgctctacaaagtatattctgattcttgctaggtgctgcattttaaattttttgtttcttgcacctcaccagtcagaagtattttttgtggccaaaacgacgactaaccattcactcaccaactccaaactaaatgatgtagacagaatggcatatgtctccatctagctgtgtgttaggcttatcacgaaggcttgtctccatctatgtagctggcatgcattaatctaggctttgcatggagtgtcctttgttttagtgcgtgtttgatcgtctatcggtaccaaggagttgtgccataacctcttcctgtttctatacgattgtttgcagtggatcttctgggtcggccccttcatcggcgccgccctggctgccatctaccaccaggtgatcatcagggccatcccgttcaagagcaggtcttaagctgccgcgggtgtgctgagacatgcatgccagtccggaaggacgagcgtcttcctgtgggggggaatgccttgtctgcccacgcctagtttctctgctgaatcttccatctctcttcccttcaagactgctcactgctgcactgctctgttatctgaacccagaactttgtgtactcctgtaccgagctgtgtgtatgttttttttttttttcttccatcgtgtttgttgcaagggttcccgtctccttttatgcgttgggatcgtggcaagaaagggcagatatcatgtgaaaacgtgggtttataactatcagctggatttcatccaagtggaatcgattcagaattttcttt

SEQ ID NO: 55719 - DNA, 403 bp, Zea mays
  Clone ID: MRT4577_150810C.1
attcggctcgaggaccgccggtttgcacacgattctatccccgttttgaatggtaagattggctggggggctgagctggcaaccaacgatggtggagaccgaggccaaaagccgagggatacccatatgaagtgctatcagcgtggccaagggggcaactgggctcgtgaaagcagataacctatcagggtcgtacgcctgtgtctcggaactttcaactcccccaagtactctatctgagattacgaccccaagtcacacacgatccccaagacaaaggatgaactcaacttatggcataaggtgcttccggcgacttgttagatgtgctaggctgctaagctccactatgtgaacgcccatatcttggacactgaggatgagaaggcggtcatcaatgtca

SEQ ID NO: 55720 - DNA, 719 bp, Zea mays
  Clone ID: MRT4577_150811C.1
agtccggtcgggccgcgtacctggttcgaccagaccagaactcaaccggtcgcgcttccttcttcaccctcagtcctcttccgtcctcctcctgtccaccgccccgtgcagttcggcggcgacatggcggcggccggcgacctgtccgacgatgagaagcgggcgatgaggggcagcaagttcgcgccgcttcctccgcctcctccctcttcccgcccccagccgaggatggcccatcctggaggagcactaaccacaaacaaggctgctgctttagcaaaattcctcgagagaaaacttcagcaacctgatggcttggactccctggaccctgaccttgtaaaactggctgtgaaaaatgcaaaggaaaccataaaagctagcaatggtgagccttcaacttcaggaagagtagtacgacatgtttcctcatttgtggatggaactgaggattctgaagatgaagcagaggttaaggggatcaaaagaaaaaggaaaaataagaaggttaaaactcatcaaggtgacaaacaacagagcaagaaaaagaagaaaaataaaaagaaaaagggcaaaggtctttgatgattccatgcccccaggaagcgtcaaagaggggaagttttaagctgtgatgactgtttaaccaaaaattgtactaggatgctactacaagcagacaagcctcgatctcaaaagaagggtgggtggttggagga

SEQ ID NO: 55721 - DNA, 231 bp, Zea mays
  Clone ID: MRT4577_150812C.1
tgaggcaacagcggacgatagaaagcagagcggggctctaagaggggcaggcccaatatttcgcccacgcacgccccacggacaatctgcacgagcagataccgcgacaaggcgaacaaaaagcgagcaagcgccgatagctatccaacaaccccgcgaccactcaccagaggagactacgagatgcgaaaacccaaagttaaaactcaacaggaagcaacaggcaataac

SEQ ID NO: 55722 - DNA, 162 bp, Zea mays
  Clone ID: MRT4577_150813C.1
aataattggtttccctctttatatatgccggtggagatgactttggcgcccccgtcttgacggcttttaacctagggtccttggcccggaacctttgcttgtcgtacacgtccatgtgatcgccgaacaagtacttgggatacgcgccgttggcctgcaccg

SEQ ID NO: 55723 - DNA, 279 bp, Zea mays
  Clone ID: MRT4577_150814C.1
gataaatgaagaatttataaaaaaaaggttttaaaaactaatgcatactttgaaaatcaaaatttccacacccacctgacatattggaaggagggaaaacaatggaatagccagtttctgggctgaaaaaattgacaacatttggtattcagatggccattgttttatacattgacataggatggaaaaatcccatcttttcatgccaaaaaaaaagtggttacctacaatcaaagttgtacaaaaagccaacccttccttttggttaaacaaaggaaa

SEQ ID NO: 55724 - DNA, 382 bp, Zea mays
  Clone ID: MRT4577_150815C.1
ttcacttcctcgctggcccataaatatatatttatctatcgccatcgagcatttataggcggacagaataattaacatcatggggcaagcctcacggctcgtcctcctcgccgtcttggcgctgctgtccggcggcctcctgccgcacgcgctgggtaaggcctggcgtggcaggcgacacggaggcgccttcaacctgtaggtccacgacatctgctttcgcacgatgccccctttgataggctcgctgacgaccggccgtataacgagctacctcgtattctgatcactgcataacgatatcctgatattggcacacggttcatcttgcatcgactgatcctcacatttccgaatatgccgatttttccattagtggatt

SEQ ID NO: 55725 - DNA, 1131 bp, Zea mays
  Clone ID: MRT4577_150816C.1
ttgggtccctcgaggccggccgggccgggatcagaacgacgtgccggttagctaggccagccatacgcgtacaggccgcgcgcgcccttatcctccattaattcgtcctgccccctatataactcgatgctagacagaagaacgaggcagcactagcagtaagaaacacgtcgaagtcgtcgtagttttacgtgctcccgtccgtcccgtgcgccatggcacgcagcaacgccttgatgtggttgttgcttctcgcgctctcgtgctggtcgtggtgcggcgccgtcacggcgcggccgaccccgagcaccagcaccagcaccaccacagccggcggcggcttcatcaggtcgtggtgtgcggggacggactacccggccctgtgcaacgcgacgctggccccgtacgcggcggaggtcggggccagccccgcgcgcctgtcgctggcggcgctgacggtcacgctggacggcgcgcggagggcgacggccgcgatgaaggcgatggcggcgggcggcgcgagcagccaccacctcgtgcccgtggcggccgaggcggcggcggactgcgtgggcatgctcgaggacgccgtggacctgctgcggcagtcggtggaggcaatggagcgcctcggcaaagagccggccagcgccagcgccagcgccagcgggcaggccgggcggagcgtcaggttccaggtgaacagcgtgcagacgtgggcgagcgccgcgctgacgaacgacggcatgtgccatggaggggttcaagggccagcccgccgtcgtgagggaggccgtgcggaggaacgtcgccggcgccatgcacctcacggccatcgcgctcgctatcatcaacgccatggccaagcaaatgtagtaggggtacggtatggtgttaccacggacgtgtatagatagcatcgtgtgtggatgccttgtgcatatgtacagtacgtatacgtctctctgtgtgctgtttcttgtctgatgaaatgatcacatcagatcctgatttgtttacagctgtaacggaataatcatgggttgactgtctgctgaacccgtgccaggatactgcaatggaagaatcatgtgatttgttatcacgaaaaaaaaaaaaaaaaaagcggcc

SEQ ID NO: 55726 - DNA, 177 bp, Zea mays
  Clone ID: MRT4577_150817C.1
gtcacccgtccgtcgcatcctacgatccaaagctctcttgtcgcagtcgcaccgggcgaaaactacccgaccggacgccgagtacagcaggctgggcaaggcaggcgcaagctccgagccctcatcgcgaaagagtgcccccgtcatctccgctcgcgggactccgggggacgtcga

SEQ ID NO: 55727 - DNA, 393 bp, Zea mays
  Clone ID: MRT4577_150818C.1
tccttgaggggattattcaacgggggttaattctttatgaggtaaaatggtttaaaccattcccggcaaaggatttggcttgggccagggtggtttttgctgccatgacccatataaccaggctgttggatagagtggatggttgggccaaggggccagatttgagggccttccccttaactttggaggggttaagggcattggctgattggcaccaataatgggagccacggtcgatggttatcttggcttacggtaaattgattgggtattggccaaaggtggatttaaaacgtgcagggcacacttgttggcggggcgcgtttacacagatggggtggtggactttattttccatgggttggacccaaataaggttgggaacttgggccc

SEQ ID NO: 55728 - DNA, 228 bp, Zea mays
  Clone ID: MRT4577_150819C.1
atggcgtccggttcaccatccttaaaccggagccgccgccgccaccaccaccaacaaccagagcacttggttcgtaggaggagaaagagggtgcgcaaagcagcttccaaagcgacgatttctcgttgcgagatggggatggagcagctgaagctggagccggaagaccggcagcaagggccacacgtgaggaataaaccatcacgacctagtggactaacgccctaa

SEQ ID NO: 55729 - DNA, 1445 bp, Zea mays
  Clone ID: MRT4577_15081C.1
gaacctttgagtctcaaaaaaaaaaaaaaaaaaaaaaaaaactccggtcccgcgttagtgcgagcttgatgaatcgaatcgctgatctctgttagcgctccgctcccacagacggacagcttgggctcgacggatgaacatgtgtgagaaagatcagaatttgccatggggatacgacctgttccgcgacccttttgctcctcccaacgggtactacgggcctcctcccggttactgtgatggccactgttgtgacctccatcattacggtagagcatcacatccagatgagactcagttgcattcttctcaactcgcatatgatatgtacaacccatcagtaggcatctaccatcctggaagcacccatgagcacgagcacgagacagtatatgtagaaccgtctagttcctctccagacacaggtggtgacggttgttttgagatggaggaggaagtagggaagaggttttaccccatggtcccagttccccatgtccccaaaattaatggagaaatcccatcaattgatgaagccactatggaccatgaaaggctgacagaaaggttgaggctgtatgagctggttgaaaacaaggtgaaaggagatggcaactgtcagttccgagcactatcagatcagctttaccaaagtccggatcaccatgaatttgtgaggtcgcagataattaaccagcttaaaactaaccgtgacgcctatgatggatacgttcccatggcatatgatgattacttggagaaagttgcacggaacggtgaatggggtgaccatgtgacgctgcaggctgctgctgacaagtatggagtaaaaatcttcgtgatgacatcgttcaaggatacttgctacatcgagatcctgcctaaggttcagaagtccaacaaagtgatactgttgagcttctgggcggaggtgcactacaactccatacatccgcagaacggtgagtaggcgtgccgttggcatgccgggccttcaccgccaacatgctccgaggtcgcagacgaccaagaggagaagatggtggccgttctcgcagcaccaccaccattgatggcgggttcagctctcttggggctggatggatgttcaggatcaggtggtggtcccggtcccggccatcgtccagatgatactacaagggacgtacgacattatgattaatatatatacccagagcggagcagaaagacctgataagggaattagttgggatgaatgaaatggaataaacatgggatgggatgggaatcgtcgtcccgtatatagtttagagtggaggccggtgagtgccaactcaaactctttgtattgttgtttatatctacaaattttgccggaatgaggctagaattattggggaacaattatggtaataataaatcggttaagaattgagacgaaaaaaaaaaaaaaaaaagcggcc

SEQ ID NO: 55730 - DNA, 336 bp, Zea mays
  Clone ID: MRT4577_150820C.1
aattcggcacgaggctctctctctctctctctctctctctctctctctctctctctctctctctctctctctctcacactctctctctcggacgcagacgctgacactcacacacacacgcacaaacacacacacagagaaagagagggacagggagcgggccaccccgagagggggggggcgatccctcccaacactccgcgtgtggatgagggggagcatgggacacgcgcgcataacgcagggggagatggggtgatatctatacatgtaaatacacagacacacgggagggctaggaacaccgcaacataaagagagagagatagagagaga

SEQ ID NO: 55731 - DNA, 394 bp, Zea mays
  Clone ID: MRT4577_150821C.1
ggaaggggatgacgctgttgtttataaaaaaattaagggtttggataaggggtctttacaggcacagaaacaaaagcaaaaaaaaaggggaaaagcccctgaaaaaacactaaaacggcccaatccggccccaaaaccctcttggttgcacgtctctgaccctgaggccgggcgaaggcgcctttttaaggctctgggtgaccattcttaaacggtctatctccaacctaaacccccggagggggggcggtgacaatccccaccccttcaaacgcgggttggccccaagccggggcggggggaaaaggggccttaaagggttcagtatccccccagggcgccaagcggggggcccagccaaaccaagtcaatttcacctggggcaccagggcac

SEQ ID NO: 55732 - DNA, 234 bp, Zea mays
  Clone ID: MRT4577_150822C.1
cggctactcacaaaccaaaatggacccatggacacgactccaacatacatgcaaaagcacccgcgaaggaaaacaccaccgtcacacgcctataagccagtgcatagcgcgagcgccatagcataactgctgagtaacgccctaaaaccggctagacagcacctgacctctattgccacgctgctaccgatcacgagcaggagggaacagtgttaggccgactaggcactacct

SEQ ID NO: 55733 - DNA, 152 bp, Zea mays
  unsure (1)..(152): unsure at all n locations
  Clone ID: MRT4577_150823C.1
gaggaggccgacancgacccagaccgcaagagaagccagaccgagaaccgcaagccccaacggacagcgagcacgagcaacgcacccagcccaaggggccccccaaacccacaggcaccgngaaaaccggcccggccaccagggaggagcaa

SEQ ID NO: 55734 - DNA, 427 bp, Zea mays
  Clone ID: MRT4577_150824C.1
attaaaggtggtgcggatgctttctgttggcttctggtcctgggctgatagtttccactaggctggactgtgcatcccaagttggaagtgcctggctggtctcattctaatgcctggacctttcttgtcctgtaatcgtaggcacgtcttaatgttttttttaacatatcttttatctctgttctaactgtaatagtatttctatccatctacatttatagtctctcttattctcttttctatattttatcttttttctttcttatattttttatatattttttttttttatgtttggttgttatttatatttttttattacttttttttatttattcttattattttacttttttattctttactttttcttattctttatttctttttttttttttactttctttcttaatttacttatttttta

SEQ ID NO: 55735 - DNA, 477 bp, Zea mays
  Clone ID: MRT4577_150825C.1
aaaaaaaggtttttgttttcattttgaggggaaagggtgaggagcccagcattggattggaggttggattttggctcccagcctcccaggtctccaacggacttgagtagtactactagtggtggttgcatggtgcaatcatttgcaggaatccaaatcattcgccctctagatcgtgctgccatgtctctgtccacccccatcaccttgtgttccgcgacgtctcccctctctctctctctagttttgctgatatgttttttactaactcgctccaccaaatcagttccaataaagccatggagctagctaacccttgctgaactgtggaatggtttctgagcagagcgtggcggagctgaagcagaccctgctggcgaccacgctggagctggaggcggcgagggaggagctgaggcggaaggagcagagcatcgccaagctgtcggacctggtgcgcgaggtggccaaggagcg

SEQ ID NO: 55736 - DNA, 170 bp, Zea mays
  Clone ID: MRT4577_150826C.1
ggcctggggcactggttccggctgtgtctggtggtctggctgccaagaaggcgggcaggccttcactgcagcactgagcctcaaatccgctctggagcatgaggctggatgcagtggtggtgaggccgccccgctccatcccgaggcagccagggtttgttttgcgctct

SEQ ID NO: 55737 - DNA, 726 bp, Zea mays
  Clone ID: MRT4577_150827C.1
atgggcatcaaccacagtttgctcaagccttcggacaaccccctttacggcttcggcgggaagggcacttttcccgtcggcaagatcgagctacccctgtccttcggtgtagcacccaatgcacgaagtgagcaggtcaccttcgacatcgtcaacatggtatacccgtacaacgccataatgggccggggctccatcaacaagtttaaagcggccattcacggactttacctatgcatgaaaatcccggccgccaacaaaaaagtaaaggcacaacaacaaagcaacgacggaacgaaggcagtacccctcgacccggccacccctaagcaaacggtcataattagcgaagacctgacctcgcaagacgaggaaaaactcatctcctgcctctcccgcaacaaggacgtcttcgcttggtccgcccatgacctggtcggagtaggtcgcaccatcatagagcacgacctgggcatcgacccctcggtgcgcccaagaaagcaacgactgcgcaaaatgtccgacgagaagaccgaagccgccaaagccgaggtgcaccgcttgttggaagccaacttcatcgagccaattgcttaccctacatggcttgccaacgtggtcatggtgcaaaagaaaagcggcaagtggcgcatatgtatcgacttcaccagtctcaataaggcctgtcccaaggacaatttcccctgccacagatcgacaaaatag

SEQ ID NO: 55738 - DNA, 161 bp, Zea mays
  Clone ID: MRT4577_150828C.1
agaaacagctcattagctattttatctttctaacaccaacaagggtagtaacaaggcttgtatccatatatggcggaccagatgttcggataagttttaaattacactctggttgtaacgtaaattactcatctatattgaccatgcatactttgcgagca

SEQ ID NO: 55739 - DNA, 559 bp, Zea mays
  Clone ID: MRT4577_150829C.1
gatccgcccccgccgagccgaggacagcagcgggggctctcggtctcctcctccagatcttgcacccaatccagatctcgcgccctctccgttcctctcctatgtccattccccctcctcggatctaaccactccgtccctctccccgtccccgcgtccggagctgagatccgtggtcatggccggcgctgcaggtgggttcgtcacgcgggcgttcgaggccatgctcaaggagtgcgccgccaaccgcggcaagttcgccgcgctgcagcaatccatccagtcatacctcgatagcatcaagggggctacggcggagggcgcggtcatcacggaggcgctcgcgtcggctgggcgcgtgctcgacggaccgcaggccgagctggtgctgcagccgctccgcctcgccgtcgagaccaagcacgtcaagctcgtcgagcccgcgctcgactgcctccacaaacttattgcttatgaccatttagaaggcgatcctggtttagaaggtggtaaaaactccccaatatttacagacatcaataaatactccatttgtccc

SEQ ID NO: 55740 - DNA, 458 bp, Zea mays
  Clone ID: MRT4577_15082C.1
ctgacaccaccactacttttatatcgagctcatcctatcggcagcgccgagggccgccgttgggctgtcattatcaagcccggaagcgaaaacaccgatcccatcttgcccaatatcattctcaccggcgccgacgtcgggtaccctggtggcctgtggtatgacccgctcggctggggcttcggctcaccggagaagatcaaggagctgtgcaccaatgagatcaataacggacgcctcgccatgctcgccgtcatgggcgcttgtgttcaggccaaatacaccggtgccggtcctatcgacaacctctacgaccacctaacagaccctggccacgccaccatattgcaaggcttcatccccaaatgaggagctctgatgaacttggcagtacgaggagggctaccacacatgcatgcattgttaggttcgaagggcgatatggaacttgctctttc

SEQ ID NO: 55741 - DNA, 435 bp, Zea mays
  Clone ID: MRT4577_150831C.1
ccggccgggagacctgctgtttgctgttgaaggttctgtatcagatgcagcaaagattttaggcctaagcactggtgctttgtcaagattgattctgtcagatgattctctccgaacggccgcgaatgaactgcgagcttcgaagggactgaagcctttgagatgagatcctttgtaaaatcctcagcttcaagtgcaccatatcccataggtgccatgttcgacagatgtcagaaggcattatttctagggaaaacctttggggtttcatgccgtttgtttaagggatgttcatcatcattagattgccgtaaatatgttcagtaggcagctagtatatcttcagaatatcctcgtttcgtattacatatacccccaatgttctccaaaaaaaaaaaaaaaaaaaaaaagaaaaaaaaaaaaaaaaaagcggcc

SEQ ID NO: 55742 - DNA, 131 bp, Zea mays
  Clone ID: MRT4577_150832C.1
gccacgcgtacgaatcattattcatataacgttcttgtagcacaaaggctgttggacatgaggaacaggcattgtactattacggtcaatggcgtttaaatccggatggttcacttagggaatgatgatgt

SEQ ID NO: 55743 - DNA, 273 bp, Zea mays
  Clone ID: MRT4577_150833C.1
cccacgcgtccgcggacgcgtgggctcaaatccaacgatcaatctttagatcatcccacctcatcatcaatcactcaaatggtggtgacagagtgttcctgttgcctgtggctttcatgtcgagcttctcgttctttcccatgtggaacaacacgagcctactgagacaccgcagttggtggctacctccttgactccaaggaccgcacgggggcctacaccgtggggtttagtgggtgtcaacggtaggtagaaccccacgatcggtagcgt

SEQ ID NO: 55744 - DNA, 332 bp, Zea mays
  Clone ID: MRT4577_150834C.1
atccggctcgagctttgagccgagtcggttcttgtctttatcggcctttcccctcattctttcacgatgtccgggggtctcagggggagcatgccatacaagttacgctcaacagcggaactgctgtttggatcacatgcaaagcacgactgaggatgagcctttgctggccggggtccgcttaaacgctgctctcggctggaactccgcggacccattagttgccccccccttcgtcctccgtctatgcttggtggggcacgaacgtctcctcacaggtcggaaggtccaaatgggcttctttcagctctgataaggcgtactgctaacca

SEQ ID NO: 55745 - DNA, 702 bp, Zea mays
  Clone ID: MRT4577_150835C.1
gggtaccctcgttgtcggccgggatggtatgatctgacccatagatcagcatgtaacaattctaaagcctttttggctctataagatgaagacttaggaaacagtgtaagaagttgttttcctagggtacatacatcacatacatgttcaacccgatccactttggcatcccttgtaccatctttttactcccaagtctcgaagagctttgaaatttagatttccagaccttgagtgccacattcaagcaacatcattagtctttgttagcaaactcacaggtgacaccactcccagtttcaccatacagagtttgttgccagtacaaggtgcactgatcaataggttgtaatctggatcatacacttttagtcgaccatcaaacaacctaatgtcacaacttgcttcctccagctatccaaggctaaactaaggtcactcctaatgcataaggtaaaaatgataaatagaattgattggatcaattgtgggggttcaatcggtcgtaccccttcatctatataatgagggagatctgaacccaatacatggtcggttcccgaactaatcccgcaagaaacgaggaaccgtaattgaatctgcgcatgcgtggaccgtccagaccgcggacggtccgactacccaaaagtgtgttcaacaatacccttcgatcctctatgatgcacctctaaccgaacagac

SEQ ID NO: 55746 - DNA, 245 bp, Zea mays
  Clone ID: MRT4577_150836C.1
gaggagcatggcgaggttaagctggggatacgacgagcacaacggtcctattcactggaatgaattgttccctattgcggatggttatcagcagtctccaattgagattaaaaccaaagaagtgtaatacgactcctcactccgacctctcagtatcaagtatgatcctgcctcggcgaagatcatcagcatcagtggccattccttcaacgttgacttggacgacacagaggacaaatcagttc

SEQ ID NO: 55747 - DNA, 490 bp, Zea mays
  Clone ID: MRT4577_150837C.1
cggacgcgtgggaattcgaggccccctatctggctcacttctctgcgtggcggtcctcatctatgcttcgtttgtaatgtatctcatactgcggggcaccgagctgtccgagaagattgtcaaagcagtccacagcagtttttcatgacaacagtcaccagttttggtcttttattacatcttgacaacaagtttctcagacacaagagacgtatagagagatatatactacctgcctctgtccggtgactgcggactgaatactacacagcacaccggtgtacactgtacagtgactacttgaaagggccatcagttgctgcaagcctgcagcagcagctgctgcccgttgcatctgtttattaacatagagatgagtgaattgctgatgttgttgaacttgaacattcagagaagacccagttctctttgcaaacaattgtctctgatttttttttcttttaatataatcagtgaagtaagcatacac

SEQ ID NO: 55748 - DNA, 1307 bp, Zea mays
  unsure (1)..(1307): unsure at all n locations
  Clone ID: MRT4577_150838C.1
ctcgagccggccggggagaagtcgaaagccataaaaccgccagggtgagttcgtggtccaggctgtgcctccgccttttgaggttgtcctcgacgccggccgggaccgagaccgagagaaaggcagactgggggagagagagaggaatcgagagaccacacgccggcgccacgtagcttgatctaggcgatggaggtggcgcttgtggagcggttggaggcggcggtggcgcggctcgaggccgccgtggcctccggcgcctcgctcgcgtcgacggctccgcgcgacttcgacgctctggaggcccggtcggatccggccatcctggcttacgacgagttcgtcgcggaggccgtcgggcggctcacggccgcggcttagaagatcggcgggaaggtgctggacgcgaccaaggtgctagccgaggcatttgccgtcgccaaggacatgctcgtacaggccaatctgcaccagataccagcattaacggttgatgcgcagggcgtcgttaagccctgcaggcacgtggttccattcgaaacgtgtatttgtgtgccaacaaaccactactattgcaaccatttaaagagtgttgctgacagtctacctgctcactgaatctcaccatacttaggaaaggactgtggcatgagtttcccaacggcacatgtagaggaaagctggcagatggctgagttctataataacaaggttcttgtggagtacagaaacaaagaccctgatcatgttgaatgggctaaagcattgaaggatctatatatgcctggtttgcgggattatgttaaaaagcactaccctcttggtcctgtctggggtcctgctggaggcgctgttgtttctcaaccaaaggctgctgctcctacacctaaagctccagcggttaaggctccccctccaccagctcctcctgcagcgcctctgtttagcacagagaagtctccaaaatcttcaaagcctaaagaaaggatgtctgctgtcttccaagagattagttcaaaacctgtgacttgcaggttgcgaaaggttaccgatgacatgaagtctatngngnnnnnnnnnnnnnnnnnnnnnnnnnnnnnnnnnnnnnnnnnnnnnnnnnnnnnnnnnnnnnnnnnnnnnnnnnnnnnnnnnnnnnnnnnnnnnnnnnnnnnnnnnnnnnnnnnnnnnnnnnnnnnnnnnnnnnnnnnnnnnnnnnnnnnnnnnnnnnnnnnnnnnnnnnnnnnnnnnnnnnnnnnnnnnnnnnnnnnnnnnnnnnnnnnnnnnnnnnnnnnnnnnnnnnnnnnnnn

SEQ ID NO: 55749 - DNA, 457 bp, Zea mays
  Clone ID: MRT4577_150839C.1
atggcggcggtgtggaagtggaagcatgccgtcttcctcgtcctcgtcaccatgatgcgcccgcaggcggccgaggccggtggcgccgccaacgccacggcggcgtgcccgctcgacctgggctacgtggccacgctcccgtgggaccgcgcgccgtgcgagccgcccgtgaccaacggcaccgcctgctgcatgacgctcctctcggtgttcgccgtgggcctcgcgtcgcggctccgcgccacgggccgcttccgcctcccgtccgcgcgggcctcggcggcctgcctccgcgccttctcggcggcgctcgccgcgccgccgctctcgctgccggcctccctcgtgccgggctgcttcccggtccagtcccagttcgccatctccccggactactgcgccggggtcaccaccgccgcggagtacgtcgcggtcgccggaaacgcctccgccgccg

SEQ ID NO: 55750 - DNA, 1109 bp, Zea mays
  Clone ID: MRT4577_15083C.1
ccggatattcttggtcttaatgcgtgtctttgaagaattatcctatgcgaaaatcatgtctacctacttttattggtagacctctgtggataaagctgtagcatgtccccaaaattaatggagaaatcccatcaattgatgaagccactacggaccatgaaaggctgacagaaaggttgaggctgtatgagctggttgaaaacaaggtgaaaggagatggcaactgtcagttccgagcactatcagaccagctttaccaaagtccggatcaccatgaatttgtgaggtcgcagataattaaccagcttaaaactaaccgtgacgcctatgatggatacgttcccatggcatatgatgattacttggagaaagttgcacggaacggtgaatggggtgaccatgtgacgctgcaggctgctgctgacaagtatggagtaaaaatcttcgtgatgacatcgttcaaggatacttgctacatcgagatcctgcctaaggttcagaagtccaacaaagtgatactgttgagcttctgggcggaggtgcactacaactccatacatccgcagaacgatgctccgaggtcgcagacgaccaagaggagaagatggtggccgttctcgcagcaccaccaccattgatggcgggttcagctctcttggggctggatggatgttcaggatcaggtggtggtcccggtcccggccatcgtccagatgatactacaagggacgtacgacattatgattaatatatatatacccagagcggagcagaaagacctgataagggaattagttgggatgaatgaaatggaataaacatgggatgggatgggaatcgtcgtcccgtatatagtttagagtggaggccggtgagcgccaactcaaactctttgtattgttgtttatatctacaaattttgccggaacgaggctagaattattggggaacaattatggtaataataaatcggttaagaattgagatgacccagctgttggcagagctcggatcatcatatgaccagaatcagaatggattccccagtgcatctagttttcctctggaagaacagaacaacataaaagaaaaacgttgaacactgaaaa

SEQ ID NO: 55751 - DNA, 689 bp, Zea mays
  Clone ID: MRT4577_150840C.1
atgattccgcaagctgctgaaacctgtgccaatgttgttaaataaacgtcgaaccgcgcgtctcctagtcaacaccaaagctcaccgcgcggccgggaagcttcaccaccagtagcaaccaccgcgcgcttccataccctagtcgccccaatgggcgtcgccggcggcgatggcagcaccaagccctccgcggccgccatggacgtcgagtcctcgacggcggtcgtggcgcagccgacctcagtgctgaggtccgtgctgctgtcctacgcgtacgtggccgtgtggatcagcctcagcttcacggtgatcgtgtacaacaagtacatcctcgaccccaagatgtacgactggcccttccccatctcgctcaccatgatccacatggccttctgcgcctccctcgccgccgcgctcgtccgcgtcttccgcttcgtcgacctccccgccgacccgcccatgacgccctcgctctacgtcgccaccgtcgtccccatcggcgcgctctacgcgctctccctctggttctccaactccgcctacatctacctctccgtctccttcatccagatgctcaaggcgctcatgcccgtcgccgtctactccctcgccatcgccttccgcaccgagaccttccgcagggcctccatgctcaacatgctcggcatctccgcgggggtcgccgtggc

SEQ ID NO: 55752 - DNA, 167 bp, Zea mays
  Clone ID: MRT4577_150841C.1
gccggccggaatatgttgacgatcaggagggtggcgacgccgcagttggccgtcctcctggctgctcctcatcgtcgttacgcatgaggcggcgcctgtggcggagagctcgcgtgtgccggcgcctgagcgcgggcttcaaggggggctgcatgtccgaccacaac

SEQ ID NO: 55753 - DNA, 224 bp, Zea mays
  unsure (1)..(224): unsure at all n locations
  Clone ID: MRT4577_150842C.1
tctttctaagcagctttgcaccaaaccatccgtggcgtattattaaaagcttgttttgcgcaacaacacaatctantcagtangatgtatatcagtccctctacagtancaccaatgcttctggggaaatcacaacacactctttcttactctacaacattcatgattatggcaccacagaatgcgcccgtcattggaatcacttttcaacaaccaaaataaca

SEQ ID NO: 55754 - DNA, 440 bp, Zea mays
  unsure (1)..(440): unsure at all n locations
  Clone ID: MRT4577_150843C.1
gaaagcgccgggagcagggcagccaagggcgaacaccgccnggcggggcagccaaagcgggagcggggggggggacagacggcacccgagccaagaaaccgagacgccgccgacagcggcggaaccgaaccgcacagggcgagnncaccgccaagaggaagagcacggaggaggagaggaaccgcaacagcccagccaccgaccggagganggaaggcacaccngacgaggaccacangaaccacaccaagancgagcncacaggcaccgcgaagcgcgacagcgagccggcaagagggcagggcgagaggnacaagaaggacacggacacgncacacgaacgaggagcnggacggggagacacngcnccacgagagcaggggcagcacgcgacgcagaaanccacgacaaggagagcgacgccgaggacacccacgaca

SEQ ID NO: 55755 - DNA, 519 bp, Zea mays
  Clone ID: MRT4577_150844C.1
atagaaaaaaaacaaattaaggggtttcaacaattaacccgcgggaaacaaaaaccacccctttggcccaaacaggggtcattttaggggacaaccccaacccatcatctcgacttgcctatgcaaggcaacgggaaacaaaaaacacacatgcctttcgcagcataaaacaatccacggacggaccccctttccgatccgaaagacaatgaagttgcataacataccccgtgagcttaattgccggggaccaaattgggggcgtaggcccatcccttgttgttgactgggccaacaatggggtcaacgaggttctcgagcgggcccttgccggggacaatggcctggacaaaaaaccccaacatggaaaacatggggagggggccggtcttgagctccttcaccttgagcccggcaaaggcctcggggtcctcggccaagccgagggggtcaaaactgcccccagggtacaaggggttaaaaacctcgccgaggggcccgccggaaatggggtagccc

SEQ ID NO: 55756 - DNA, 2095 bp, Zea mays
  Clone ID: MRT4577_150845C.1
gtttgtcttatgaaacaaacatctgtccatgcatccatgtgtgcatgtactacaaataaacagcctattatttaggttacttaggtgcaaaatcatttggttttcaactgaaaacaagtggtcctatattgttatggttatgaaatttgaggtgccgacagaacataataataaccgtaatcttgaatgcagtttgccctgcatgagtgatcatgatgtacaacagcacaacgatgagcctgactacatgggtaagtcgcattatgcaatttccatgttcttgtgtggcgattgatacacgtttcggtggtttttcgttattttcttatcttccattacgggcagtttggaccccccggcctggccgacgaccccgaggccttcgccgagctcaaggtgaaggagctcaagaacggccccctccccatgttttccatgttggggttttttgtccaggccattgtccccggcaagggcccgctcgaaaacctcgctgaccccatcgttgacccagtcaacaacaacgcatgggcctacgcccccaattttgtccccggcaactaagctcaccggctatgctatgcaacttcattgtctttcggatcggaaagggcgcgctcgccccctgctggtctgcgctgctctcgtcttgctcgccctcttattccctcccctccccgctccgaactcccacaccctccaaccgaggaggaggcctgccaggttcgttgccggccgtgtgtttgttcgcccggccggccggcccgaccgaggggaagctgcagcctgctcgctcgatcgagctcttgcgtaggccgttgacgatgtcatgtggcccctgtgcgtcatctccgagaagctcttcaggatggcgggcgacgacggcgcgcagggggcggcgggctcgccgtaccccgacgggcggatttcactagcacgccgatcgtactacgtcgatgttccgcatgtgcagcaggccttcacctgggactgcggcctcgcttgcgtgctcatggtgctcaggacgctagggattgattgctgcgacggcattgccgatctcgagaggctctgccgcaccacgagcatttggacggttgacttagcatatctgttaaacaagttttcagtcagcttttctttctgtaccgtgacccttggagcaaatccacaatattctgctgaatccttttatagggagcaattgcaagaagacatcgatcgagtggatgagctatttgggaaggcgctcgatgctggaattagcattcaatgcaggtccatcaccgcatacgacattgcttttctactgttatctgggcactgcattgctattgctttagtggacaaatcgaagctaaatttgccctgcatgagtgatcatgatgtacaacagcacaacgatgagcctgactacatgggacactatgtcgtaatatgtgggtatgatgctgatgattgtgaatttgagataagagatcctgccagttccaggaaacgcgaacgggtgacaatgaagagcttggacgaggcccggaaatcctttgggacagacgaggacattctcttggtctctttaacaggaaagagtgggatgaagctgtcgcgtaagctacttgcctgctccatgtagataaataaataggtcactagcaaccttgtgaatacgctgtacatgtccctgtagtagttatgactgtcgagtgccagccctgtacgtagctgagaacgttctcgcagttaccgctgataacagcagtgtggtagtgagcttagtaggcaccctgtatgttggcccatgccgtcgccaaaccatggccgcgcaaaggggttcagcggcagcaaaaggctctgctgaccttgtaaacgagcaagtgttctatgtacgattgttaactgaacgtgtacagatctccggaaataagaattaaaatcgtgctccttgtacgtacgtggattgattgatgctgcgaaaggcatgtgtgtcttttgtttcccgttgccttgcataggcaagtcgagatgatgagttggcgttgtcccctaaaatgacccatgtttgtgcaaaagtggtggtttttgtttcccgctggtt

SEQ ID NO: 55757 - DNA, 381 bp, Zea mays
  Clone ID: MRT4577_150846C.1
aatcctttacctttaacccattcctacttttatgttattgctgaaaaaatatcacattgggcggttatttaaaaagaggggggccaccttaaactattgctaccttcaaggtttcaactcctcctcatgcttatgacgttcatgatcgtcttacaaaacttctccattccaatgttacccctgcaattgctcaatttacaccgatattttatcgaggttcttgcaaatttatctaactgcaaataacttgcaactcaaccatatgttgatttattttcttgttcatgcatcctcattttagcctgaattcaattacatcatcaactttgccactgtcacgcttttatcttctctacttttttgactttcattgcacctgta

SEQ ID NO: 55758 - DNA, 312 bp, Zea mays
  Clone ID: MRT4577_150847C.1
atcggtatattttcttgatattatctgccattttttgtgttatgccacatgcaagaaccatggttgtgctgacaatttaaaactatggggaccttgttattcttcagcataaagtacatgcaaatgcatagttttcagtgacgctgccttgttattcttggaagcactgatatatcataatttaactttagatgtcaaagtttaacttcagcatgtctagcaaagcatgcaaatctttttgttaggagagtaaaccttaaccctaactaggattgggatgatttattaatagatattaatgtatatggaatg

SEQ ID NO: 55759 - DNA, 130 bp, Zea mays
  Clone ID: MRT4577_150848C.1
ggggctggccactttaaggagcatggccccacgaaactctctgcatgcaaacactacatggctgcataagataatggccttgtggtacacaatcagtaagacattattggatgattaggaataagcatta

SEQ ID NO: 55760 - DNA, 2276 bp, Zea mays
  Clone ID: MRT4577_150849C.1
ccggccgggactcttgcttcagcccggccgcacagactcgatgccgcgcggtgctacggtggccctcttcgccggtccatcgaggaggcctgccgtggtgctctcggcggtctttgattccacgcaggaagagccccgggcggtgcgcgcggcgcggatttggcggcggcctcatggcatgaacggggctcaggcgatccgaacatcatagaagaaagaagcgacacataacaaccggacagggccacaaggaggtctctctctgggataaccacccaaattacaactcaagaagcaaacattattgatcaatacggatcacctcgtctgctagatgtttttatggaaagaaagcaacggccaagttcttggagatggatgccaatgcttccggttttgctgtcggagcgaatcatgaggaaggaaggaaacgcatggattgctgtggcaactcgctcgagtacagggatgatccgagcctttaatttcctctttacccacaaaattagtgctgtgctgtagtgtactactagtggttggtgcgcgctgggcagtccatgtgactacattttcgaaatggtttcacgtaacaaagagagattaattaggggcgggtgtgtgtgtgtgttatctatatcatgctatgctaactaccaaacagcctagaattgtacccaaatttaataaaattacttgctttgcccaaaaaaatagtaattctcacttttacatgagtccagcaatgtaaagttcgaccaaatcgataaatacctagaatttatgatgcaaagtagatattatattaactgtaatatatatatatatatatatatatatatatatatatatatatatgcatacatttatttagagatataaatattgataccattttgtataagtttaactataacttaaaaagtccagcccgtgtaaaacccagaattatattctttctgaaacaaagaaagtattaagatttaaaatgacaaatacatccttaaatttgtgttcatgtgctacctaggtcctactttttctacaatcccaactcatttcctcatcatcgagtttatcatctggctggcaggtgaagaggtgggctgtcctgacggagacataataagtggagacagatataagaccacacaacctgtcaaccaccttcacaatggccgacagagaataaatgaagacagataaccccactccacccaacgctccaaagctctgctgagtccttgctccaatggctgaactagcgaccagcctggtggtcgccccagtggtttccctgttgaagaagaaggttgtcagccttctcaccgaccagtacaaggtgatggagggcatggagaagaactatgacaccctcaagctcaggttggaagccatcgaagcggtcatcgttgatgctgagaagcaggggcctcgccgcggtgtgcaggaatggctcgagcaggtcaagacggcagcgtacaaggcacacgaggtctttgatgacttcgagtacgaggtgctccgccgccgggccaaggagaatgggcacatcaccgagcttggcgttatggacagggtaaaactcttacgcacaatcgtgttgcattccgtagtaggatgggctataggcttcgcaggattgttgacaccttcaaggaccttatggaagaaatgaaaacctttgaattcaacaagcttgagcccaaggcgactgcggcatcgttggagttgcgtgagatggatttcctcattgatgatcatgaagatattgttgccaggtctagacatgatgagaggaacaaaatggttaacatattggtcaatgccaatggtcgtgttgtcggtggtgatcttatggtcgttcccattgttggaatgggaggactaggcaagaccaccctcgctcagctcatccacaacgaccctcaggtcaaggagtacttccatctacgaaaatgggtatgtgtgtcagatgattttagtgtccttaatcttgccaacaagatatgtaatgcctcagagagagacctcgaggatgcagtgaagaagcttcaagaacatcttaacggaaagaggtattggctggagcttattagttattagtaactttactttctttgccttgtatgatgtttttatttcattatttactaaacactcattacatcgtgtcatattgtgtgtacctaatggacttctttgctgatatttactacaagtccatgtgtgtgagctgtaaaattaaagtagaacataattaaaagcgccttgtttgt

SEQ ID NO: 55761 - DNA, 306 bp, Zea mays
  Clone ID: MRT4577_15084C.1
aggggacttaatacgtactttatggattctgctctgtctggcgtctattgctggcgccgaaggctctattgcgttggatgatgcaggctcttgcactgatgcatagagatgagcaaagcgtgatacgctgtatcggtagaagatcgttatccgtgcacgtaaccagctgaggccctgtattgtgctccccctagatggcacaactgctggagccgacgaccttgcacagctgccattgaactatgatcacacaagttctaccaacgatcatcatgcatgattcgacactgacgatgcatgcactga

SEQ ID NO: 55762 - DNA, 362 bp, Zea mays
  Clone ID: MRT4577_150850C.1
ccagtcccacacacgacttgtctactgtcgacatggcgtcctccacggcggcgcggggcgctcacctgacaccacctagggagggggggggcccgccctcgactcccgagcctatccatctccctccgcgggcgcgcgggctctgcctctaagcccacctccctttcccactccctccccaccaagcactccctgggccgcggggggggggatcatcccatatacctttactgggcccacccatctccccaaactgtgccaggagcggccacgaggcgggccgccaactcatgagggcaaaggagacaccacgaaccggggccagggcggggccaagctcacggggctggcccccgacgacg

SEQ ID NO: 55763 - DNA, 644 bp, Zea mays
  Clone ID: MRT4577_150851C.1
ccggccgggactcttgcttcagcccggccgcacagactcgatgccgcgcggtgctacggtggccctcttcgccggtccatcgaggaggcctgccgtggtgctctcggcggtctttgattccacgcaggaagagccccgggcggtgcgcgcggcgcggatttggcggcggcctcatggcatgaacgattgctttccacaagtgtcgccttcgccatgacagtgacgagaacctcatctgcaggggctcaggcgaatccgaacatcatagaagaaagaagcgacacataacaaccggacagggccacaaggaggtctctctctgggataaccacccaaattacaactcaagaagcaaacattattgatcaatacggatcacctcgtctgctagatgtttttatggaaagaaagcaacggccaagttcttggagatggatgccaatgccttccggttttgctgtcggagcgaatcatgaggaaggaaggaaacgcatggattgcctgtggcaacctcgttcgagtacacgggatgaatccgagcccttaaatttcctctttacccaccaaaattagtgctggtgctgtagtgtactactagtgggttgggccccgctgggcagtccattgtgactacatttttcgaa

SEQ ID NO: 55764 - DNA, 302 bp, Zea mays
  unsure (1)..(302): unsure at all n locations
  Clone ID: MRT4577_150852C.1
tcggttgggngggnattgggnattcggntgcanntgttngtgtngtgtaggtnngnntgttgngtttagttnnngnngggcngngtgtnngngtngtncttnngntgggtncnnnggtcnttnanggcatgtntngtngctancgtttncntntgtnagngngggtnttangctgaggnnngnggnnttangtnngnnggngttnnatgttgnngganggntntnggagtcnnnatnttnttttnatggagntntgtaggtnttgngttngttnttttgggnnttgtatgttcnttnntagt

SEQ ID NO: 55765 - DNA, 319 bp, Zea mays
  unsure (1)..(319): unsure at all n locations
  Clone ID: MRT4577_150853C.1
gttcatccgcccacacatacgcccacgcgtncgcccacgcntccgtccacgcgtncgcggacgcgtgggtgtaggtcacctatgtgaccaatcctcaccattggtttcacagcacttagtatgatacgtcgaataccattttttttttgggggttttccctctacgacggctcactcaaaaancttcaaaggggagggggggtgttttttaaaactcctgctacaaaaagtatggggctaggtgaaagcttgacaaggcctatatagtgtattcgggcacccaaccacctccagaaagaaaggggccttcaaaacctga

SEQ ID NO: 55766 - DNA, 221 bp, Zea mays
  Clone ID: MRT4577_150854C.1
agaaatgttaaaaatatacacatttgatactactaaagcttgaaagaagttttcaaggtgtaactttatgcaaggtgcagtccataatatctagtataggctctcaaaactgctgaaaattttatcctgaatcacgactgtaatgtctaccacttggaaccagtgcctcgtctgtaatcccatacattaagaaagttgctcatcatattccaaactatttt

SEQ ID NO: 55767 - DNA, 324 bp, Zea mays
  Clone ID: MRT4577_150855C.1
ggcaccaacccagctcggcgccatcgtcgacccttaccccgtttgcctgagagcgatggtgacggagctgaccgcggcgcaactgctcgcgtacaagggcaccgacccgtacaagcccatctacatcttcttatggagcaaggtctacgacgtgacctgcggccgtggcttctacggccccggcggcgcctacgccgtcttctcgtgccgcgaggccagccgtgcactaagcaagatgatcaaggacgaggtcgacgtgtcctgtgatatgtccgagctcacacaacaggagctggtcgttctcgtcgactgggagaccaagtt

SEQ ID NO: 55768 - DNA, 540 bp, Zea mays
  Clone ID: MRT4577_150856C.1
ggccgcttttttttttttttttttctttttttttttttttttttttttttttttttttttttttttttttttttttttttttaaaacaaacaaaccccgcatgtgtatttgagatgagatgagatgagatggtttatttagtacaacgagatcgatgcgcttcctcaaccgaggggagcttcactgcatgcaagacggattagtcattagcgttctcctccgatcagggctttagcaaaaactacccgagcagcagggcatatgcatccaggaatgcgaattaatttggcggcgatgcatagctagcagttataaattttgctcgcaccacacatcttccccgttggcgtcctttaccctttcatttgctttcgggccgatctgtatatgaatatgtaaattccgggaagggttcgcccgcatatcagtagggaaagctgctcagtcatcacgtttctgccgaagatcccacctgcctcgttttccaaatgacgggcgcgatcctcatccatatgtacccgactgcccccagccactcgt

SEQ ID NO: 55769 - DNA, 750 bp, Zea mays
  Clone ID: MRT4577_150857C.1
gctggtacgcctgcaggtaccggtccggaattcccgggtcgacccacgcgtccgcgccgatgtttgggcaaggcaggctgggccaggccatggccctgctgttgtttctgggcatgacagcggcgctggcccggggctgcctgcagtgcgaccccaatttcgcggagaagttctccttctatcgtcaccacgtgaacctcaagtcgtggtgggtgggtgacattcctgtgtcggggatgctgctctccgattggatccagaacacgatgaaggagctccatctggccattcctgctgagatcacccggaagaagctatatcaagtagcagaagccgtgtaccagaggatggaccagctgtaccaggggaagatgtacttcccaggtaaaaagagaaacaggtggggccggtgcgagctgctacgcacctgaacttgaccgttctgctgtgactctcacatcagggtatttccccaatgagctgcgggccatcttccgggagcaagtgcgcctcatccagaacgccatcatagagagccgcattgactgtcagcgtcactgtggtaagtgaaccatggtccaggctaagggccacagtggcagtggcccaggctggggagggcccaggggagtctggggctgcttctcatatattgcaggtatctaccagtacgagaccatctcctgcagcaactgcacggactcccacgtaatttgctttggctactactgcaagtatggctcatgcagc

SEQ ID NO: 55770 - DNA, 279 bp, Zea mays
  unsure (1)..(279): unsure at all n locations
  Clone ID: MRT4577_150858C.1
ggtgctttcttgcggtgggttggcttctcctccccctccggttcgggttcgggttcgggaggttctccggggttcaaaatattgggtgagcggatcgagatggcggcttcggatgttgttttcacgatggcttcattattgcacaatgctgactcaggtactaccactattattacacagcctctaccacctactactagaatctgctttncactagggggggggggggccaaaatnaaacaacaaacnatttcnnctaaaatattataaaaacaaatt

SEQ ID NO: 55771 - DNA, 191 bp, Zea mays
  Clone ID: MRT4577_150859C.1
aaaatatcatgaaattcttggtagtgctagtagctgtcatcgcagcagtgtctgcagccacacctaaggaagctgtcaaagctttcccttacagtggattcccatccaaccaggcctactacccaggtcaacaagcatactacccaggataccaaggttaccaaggttagtatgcttgtcgacgcggccgc

SEQ ID NO: 55772 - DNA, 592 bp, Zea mays
  Clone ID: MRT4577_15085C.1
tatgaagtaaaaatcttcgtgatgacatcgttcaagaatacttgcaacacaagatcctgctaaggttcaaaagtccaacaaagtgatactgttgagcttttgggcgaaggtgcagtacaactccatacatcaacagaacgatgctccgaggtcgcccacgaccaccgggacaagatggtggccgttctcgcagcaccaccaccattgatggcgggttcagctctcttggggctggatggatgttcaggatcaggtggtggtcccggtcccggccatcgtccagatgatactacaagggacgtacgacattatgattaatatatatatacccagagcggagcagaaagacctgataagggaattagttgggatgaatgaaatggaataaacatgggatgggatgggaattgtcgtcccgtatatagtttagatgtggaggccggtgagcgccaactcaaactctttgtaatgttggttatatatacaaattttgccggaacgaggctagaattattggccccccctatggtaataattatcggttaaaaataaatgaaaaaaaaaaaaaaaaaagggcggccccgactagtag

SEQ ID NO: 55773 - DNA, 184 bp, Zea mays
  Clone ID: MRT4577_150860C.1
acccacgcgtccgcggacgcgtcggcgggcgcgtgggttttgccggctgggcagcaggacatgggctcatgcgcaagtcgttccactgcatgagcaatgggcatcacaccattgcggagtcttttcccattacaggatgcacaccatcggtggccttatacttcagcgggggcgtcggacctgt

SEQ ID NO: 55774 - DNA, 370 bp, Zea mays
  unsure (1)..(370): unsure at all n locations
  Clone ID: MRT4577_150861C.1
cacaccaccgaaccggaggccgagcgaancganggccgccgagggcgagaagaagagganaacccncaaaagcgccgacggcgaggagcccgaggcggaagaggcggaggcgacggagacgcagaccacccgccacaggggggggggggacagcnccgacaacggcaaccccccncccaacggcaacgccaagagccgacgcaaggcaaccgagnaccgcaacaagcacgnacaagccgccgccgccgccgacgacgacnagaaggccggcaccgacgacgcgggagccgacaacggcaacagcaccgccgccgacggngaggaccccaagaacagggacgcggacaccggcaaggacgaccaggccacg

SEQ ID NO: 55775 - DNA, 241 bp, Zea mays
  Clone ID: MRT4577_150862C.1
gaagtcccggctcgacccacacgtacgcccacgcgtccggcagaggacactactcctcagaactctcccttccctcttgtaggggccaaaagggtcagagatctaggaagaagagaactagtccccaaggctagcaagagagcaagctcttctgcaactgttggcattcgccctaatttgtatccatcccaccggcaggcctatctctcgagcacccctgggcattcacttttcggccccc

SEQ ID NO: 55776 - DNA, 381 bp, Zea mays
  Clone ID: MRT4577_150863C.1
aaaaaaaaaaaaaaaaaaaaacaaaaaaaaaaaaaaaaaaaaaaaaaaaaaattgaaacctaaaacgaaaccaaccctttgggccatttggtggagatctccctaaggggcggggttctggtgtttcccttcgcgcttggggcccgtttggggcgtgtgtgtttgagggctcatttccccttgtccggggttttataacattccgatggccgaatttttgcaatttcccgacttaatagcctttgggggtccccccttttatccctttggggtacttccctttttgcccttacggatttttctttcttaggcctgttccgtttttttttccaatggattccccctgttgcttgccatttggacccccctttgagggggttt

SEQ ID NO: 55777 - DNA, 902 bp, Zea mays
  Clone ID: MRT4577_150864C.1
ggccttgtgcgcctccatttcggcctctgtyccttgcaagttcaatctcacctccaaccatgggtaaagagaagtcccacatcaacattgkkgttattggccatgtcgactcttgyaagtcgaccaccacaggacaccttatctacaagcttkgaggcatttacaagcgtkttaacsagarggttgagaaggaggctgcygaaatkaacaagcsgtccttcaagtacgccttggttcycsacaagctcaaggctgarcgttagawaagkatcaccatttatattkctctktkgaagtttkakaccaccaagtactactkcacggtcattgawgccccyygacaccgttacttcwtyaagaacatgaacactgggacctcccaggctgactgttcygtccttatcaatgactccaccactkgkgggtttkaggctkgtwtytycaaggatggccagacccgtkaacatgcbccccytgcgttcaccccyggagttaagcagaagaattgctgccgcaacaagaaggatgcaaccactcccaaatactccaaggcacgttatgaagaratttttaaggaagtytcatccyacctcaagaaagttgggtacaaccctkadaagadttcctttgttcccatttctgggtttgagggtkacaacatgatttagadgkccaccaaccttgacttggacaaaggcccaacccttctttaggctcttgaccagatcaccgagcccaagargscttcagacaagccccttcstyttccccyccaggatgtttacaagaattgdgggatwggaacygtaccggttggkcgttttgagacttgggttawcaagcctkggatgggtgtcaccyytkggccaactkgccttactaccgaggggaagtctgttgag

SEQ ID NO: 55778 - DNA, 612 bp, Zea mays
  Clone ID: MRT4577_150865C.1
cgcttcgtcctcgctcctctccctcatcccacgcacttgtagatggcaccgtccctcgccgagttcgtcgttgacctatgccatgtctccgccgccgcactcagggaccacggcgccgacccgccggagccggactaccttgtccgctccctccacaccgacatcactgcgcttccctgcctcccatggtgcaggtgcccgggggcgtgtggacaaggcgcggggggagggtcacccgagtgggcgacgtcggatgctttgtttgcctcgacggtggacgcaagggactcgtgcacgtctcccagatgctcggtcgacgccgcgctggcgccaccttcacgctcgggcaggtgtccttcaaggtcgtcttggtggacggcgccaagctagggctgtcaatggtagacgtcgatcaggatatagggaagggtcttcagtcgatgcgacgtcggcaccctgtggaggaggacgcgctgagggcaaatccgccaactaatcgctccagactcaccgggaggaggatggcggcagatcgatgagcgcacgcagctcgccaggaactgcagacatgccaaatggaaatactcaggattatcaagctggacattcttc

SEQ ID NO: 55779 - DNA, 489 bp, Zea mays
  Clone ID: MRT4577_150866C.1
aaacctacaagcctctcctctcgtgttcctccaccctactcgacgcgttactccttcttaagccacacatccatcacaccaacaccaacccgcccgcacccatgtaactctgccagctcacctgcacccatccccgcctcataatcaccaacaaatccatccccatctgctatgaaaacatcgccgacatcgagaacgtacccaatagtctgatgcgaatctgactgatgcgtatctcctatataatctcctggagaaccaaatagaagaagatctaaacctcaccgaacgatctgacgaagaccctgaataaggtgatatctgcacgccccatgtggaggtgctgcacatgctgctgctccagatgctgatcagactaaccttgatacccgagaataataacatgacatattgatttgctccctgtacacacatgatcatggcctcgctagccatgcaataacacactcccttatgttggtcaagacc

SEQ ID NO: 55780 - DNA, 469 bp, Zea mays
  unsure (1)..(469): unsure at all n locations
  Clone ID: MRT4577_150867C.1
ccgggacagcccagcgtccggccgcgcgcggcgncgccggaaccggnggagggaggggaaggagcgcgagnaggacaaggccaataagcacagcaccggagcgggggaagaaggcgaccaaaagcaggagccacgggaccacggagctgaagcggcgcgggggactacgcatacctgctcgaattcaccatcttactcgggtagcttggttgtttatggttcctttctttctccgtcgtctccgtctataccgttccttttacatggttctttcttatttttatctctttttantagaatttatttttttttttatctccttttttttgccttattgttttttcttcttacttgtgttctttttttttttttctttttttatctttaatcatgtaattaaatttattttttttttttggtttatcttttttgattttttttacacatattatactttctttttattttt

SEQ ID NO: 55781 - DNA, 420 bp, Zea mays
  Clone ID: MRT4577_150868C.1
ctgttacatttctactaaaggtaggtttgtcacttattttgaacagtatgcttattgttcactgtcttaaatccaaacagcccggcacactcaaaaaaaacagtagaagctgcgccgcagttcacccctagaaaaaaccaggaaaaacgacctctcacagaaccgcaaggatcatttccagcaataagagggggcgaaagggcaacgggggcaaaaatggacaacggccccagctgggggagccctcaaacacaagaggtcaaagccaaggaaagcctggggaaaccaaaaagccgccggattttggacaaacacaccacagaaaaacctgaacttcagccggagaatacagggggaaaaatggacaacggcaagggccagccttgggcagtttttggcccccgctgcttgttcccaacc

SEQ ID NO: 55782 - DNA, 142 bp, Zea mays
  Clone ID: MRT4577_150869C.1
gtttttttttttttttttttttttggaaacaaagacaggcccattcttacgttaaagggaatagaaaaacatgagggaacaggcatatgtacgacgtaactggctaccaaagggacagcatgagaaaatagaacacaaacct

SEQ ID NO: 55783 - DNA, 749 bp, Zea mays
  Clone ID: MRT4577_15086C.1
ccacagacggacagtttgagctcgacggatgagcatgtgtgagaaagatcagaatttgccatggggatacgaccatttcattcgtcgcgatatgcttccggcgccgggtacgacgcgcgcaggccccacccagccgcctacaggcgctccgctcccacagacggacagtttgagctcgacggatgagcatgtgtgagaaagatgcaaatttcccaacgggatacgacctgttccgcgacccttttgctcctcccaacgggtactacgggcctcctcccggttactgtgatggccactgttgtgacctccatcattacggtagagcatcacatccagatgagactcagttgcattcttctcaactcgcatatgacatgtacaacccatcagtaggcatctaccatcctggaagcacccatgagcacgagcacgagacagtatatgtagaaccgtctagttcctctccagacacaggtggtgacggttgttttgagatggaggaggaagtagggaaagaggttttaccccatggtcccagttcccgtgagtctactgatcctttgaagtcaggttaagaaatttgtgttgtctagcttcattcgcctaacatttggatgtgcttcgtcagctgccagaataatgaaagtttcgcttctaaggaagtctacctagatcatcagcaaaaattcctgtatatgtctgttgtatagccaaagcctcattggaaggagggaagaaaccacatggat

SEQ ID NO: 55784 - DNA, 214 bp, Zea mays
  Clone ID: MRT4577_150870C.1
ccacgcgtccgggacctggtgccggagccacaccacaccacaccacccttggtccggcactagcactagctatcacgtggagacgaagatggcgacggcgcggtggctgcaggttgccgccatggcggtggcgctgctggcggagtgggctacggcggcggcgcctcggaaccccttggacgtgcgcttcaagaagaactacgtcccgacgtgg

SEQ ID NO: 55785 - DNA, 109 bp, Zea mays
  Clone ID: MRT4577_150871C.1
aaaaagagagcccgggaaactgggtttattggggttcaatgggttttacaggggacaaacagggcccgaattggggcccgcaggcccagtttcataggaaatcccaaac

SEQ ID NO: 55786 - DNA, 336 bp, Zea mays
  unsure (1)..(336): unsure at all n locations
  Clone ID: MRT4577_150872C.1
ggaaggaacgggncgaccgcacgcgtccgctccgcaccctagggtttctgcgcctcgtctgtgaatcgacacagccgccgtgggaggggcctttgaacgttgagcactcccagcctccgacagaaggacccgtggtgcccatgcctccgcagcagcaggcgcccccgctgccgtactaccagcaacagcaggcgccggattactaccaacaggtcctccggcagccgtgggggcagtagcagcagtacgctgcaccgccgacgcagtacccgcctccgtcttagacgcagcattacgcgacaccaccgnagcagtacgcccctatgacgtatcaca

SEQ ID NO: 55787 - DNA, 374 bp, Zea mays
  Clone ID: MRT4577_150873C.1
gtcgacacacccctctaaatcgcatactcgcacccacgcactcgctggagcctggcgtggaccagcaggacttcaacacatacggtatccgtcatggcaaggatgacgtaacggcacagggaacgtttgcaaacattacgatcgtcaacaactttttgcacggagaagttggccccaagaccattcatgttcctactggggagaaactttctgcatttgatgccgccataagatacacatctgacggccatgctactataatccccgctgctgctgactatgcaagcggaagttctcctgattgcgctgctaagggtctcatgctcctgagagttaaagctgtgattgccaggagctttcagcgtatccacaca

SEQ ID NO: 55788 - DNA, 155 bp, Zea mays
  Clone ID: MRT4577_150874C.1
ggaaaaccagctctgttgctcattagaagaatacagacgaggagggtttgcgcacaacagaaaaatctcaccttgagggtcttgtaaaacaaccccatttgaaaggccaatgggtgccaacgatgcggaatataaataacgctctgtggatctct

SEQ ID NO: 55789 - DNA, 1351 bp, Zea mays
  unsure (1)..(1351): unsure at all n locations
  Clone ID: MRT4577_150875C.1
agacattcagatgatttcaaactgtgatggttcatctagaccacttgaccatcctgcgggtttgtatgatgtccatgtctatactgattctaagactttgtttaacatgaggagcacatttgacagaacatctcgtagtggacctaaggggttcctggcattcacttgggatgttctttgggtagtatataaaaaaatgggtcctttgatgctttgcaaaatccttaagagatggagggtacaattctccgaggtgttgtgattctgaataacgatgaggaatactcataaggagcttatgtgacgtgtggttctatttgcatgtttctctgaagaccctgaaactccagcttttgtgagcgagtacgctgtctggagaagtgacgcgggtagaggcagtcttcttgcttcgttggctgaagctgctttcctcactggtctgnagaagaacagtgatatcgttcagatggcaagttacgctccactcttcgtgaacgacaatgaccaaacgtggaacccggacgctatcgtcttcaactcctggcagcactatggaactcctagctactggatgcagacgattttccgcgagtcaagcggtgccatgatccatccggttaatatcagttcccggtactcgagttcgctggccgcgtctgcgatcacgtggcaggatgcagagaatagcttcctgagagtgaaggtcgtgaacttcgggtcggacaccgttaacctcacggtctccacgagcggactcggggccagcgtcaacgcgctgggatcaaccgccaccgtcctcacgtctggcaacgtcatggacgagaactccttcagtaacccgaacaaggttgcgccggtgaaaagccagctgagcaacgccgcggagcagatgcaggtcacgctggctcctcactccttcaccgccttcgatctggcgctggctgagcccaagcttgtggcggagatatgatgtgtgtgctgttagcgatcttgatcgataaaaaggctttgtactggtgtaccatgatacaggataacgtactacgtactgttgcttcatgaaataaaaaccacatcaggtttttgcttggtgttggttggtttcctttctcctgtacgtgtttgctttgcatgttcatcaccatctactgtacgggatgatggtacattgatggtgagaacgacagcctcctgtggattaaacaaattgtcgatggatgccttcatggtaaacaactttatcatgaatcacggtatgaggctgtcaatgtttaatagtttcttgctgctgccggtacaatgttttcatcacatattgacatattgtaatgcttaagaggtttcttcgatc

SEQ ID NO: 55790 - DNA, 463 bp, Zea mays
  Clone ID: MRT4577_150876C.1
tcttggaaatgaagattgcgggaaaaagttctgccgtggtaattacctcaagggctacaatgctataagagaggcctatccagacattcagatgatttcaaactgtgatggttcatctagaccacttgaccatcctgcggatttgtatgatttccatgtctatactgattctaagactttgtttaacatgaggagcacatttgacagaacatctcgtagtggacctaaggtaagtctaagtctcattttcacaacgactcttatgagacagccctctttcacgaccagtcatttacatcgatcaggggttcctggcattcacttgggatgttctttgggtagtatataaaaaaatgggtcctttgatgctttgcaaaatccttaagagatggagggtacaattctccgaggtggttgggaatctgaaatacgatgagggatactcataaggagcttatgtgac

SEQ ID NO: 55791 - DNA, 489 bp, Zea mays
  Clone ID: MRT4577_150877C.1
ttttttttttttttttttttttttggctaggaaatagtttattacttgcctcctccatgtgtggattacaagaatatatagccgacagcccactaatttaggagctgataataggaaggacctactactttggtaactaataataggaaggaacatccccccaatctaggagctaataataggaaggaatcaacccactaatttaggagctaataacaggaaactatctctcccctccccgagaggtagctcgtccccgagctgaaatgttggatacttggcgcggaacgacaccacatcttcccaggtggccgatgcagcagactagcccttcgagtggaccaggaccttctcgatgccacgagcgactcgtcgacggacagcacgttccggctctagagtaatgacgtcgttgtggaccagtggaagtggcgggggagcctctggtggaacgcaatggaacttcttcaggaggctcacatggaacat

SEQ ID NO: 55792 - DNA, 2707 bp, Zea mays
  Clone ID: MRT4577_150878C.1
gaaaaaaaccaatgatagatgcggataaggcgacagcacagctgccagggcccgggccccacgcgtcggcgggcgcgcgccgccgaacgaaaccatcccggcaaggcaagcaagcaaccgtggccacgccgcggcgcgaccctgacgcccgccgtctccggcacccgataggcctcctccccacacccctcgcgtggcttccgtggcccgtagcccggcgcgcttcccttcaaagccactgcttcgcctcctccttctacttaagcgcagccggccccggccggcactcgcatccggtagctcgatcacttcttcctctggattttgggaaggaggcatcggacgtcggatgcatgacacactcattgcattagcgcctacgcctaccgcaagtggaagcctatggatctcaagcaagcctcctctggtacaatcttctgccttctgcttctattctgcgtgggctgcagatgtcggccttcggaaatagaggccacccagacagcagccctcaaggttgatgcctcgccacagcttgcccggaagatccctgaaacactgtttgggatattttttgaggagatcaaccatgcaggagctggtggcatatgggcagagcttgtcagtaacagaggtttcgaagctggaggctctcatactccatcaaacatcgacccgtggtccatcattggagatgactcctccgtgtttgtggcgactgatcgtacatcatgtttcagtcgaaacattgttgctctgaggatggaggtcctctgtgatgagtgtccagctggtggtgttggtgtttataacccaggtttttggggcatgaacatagaagatgggaaggcctacaatctcgttatgtatgttcagtccccagaaacaaaggatctaacagtttcattaacaagctctgatgggttgcaaaacttggcttcagctacaataacagtttctggcacatcaaattggacaaaagtggagcagaagctggttgctaaaggaaccaatagaacatcaaggcttcaaataacaacgaacaaaaaaggagttgtttggcttgatcaagtatcactcatgcctgaagacacatacaagggacatggtttccgcacagaacttatatccatgcttttggatttgaaaccacgattcttgagatttcctggaggttgttttgtagaaggtgactggctaagaaatgcattcagatggagagagtcaattggtccatgggaagagaggcctggacacttcggggatgtttggcattactggactgatgatgggcttggatattatgagttccttcagcttgcggaggacctgggtgctgccccaatctgggtattcaacaatggaataagccacaatgatgaagttgatactgtagctattgccccttttgtaaaggatgtattggacagtctggaatttgcaagggggagtgcagattcaacatggggctctgttagggctgcaatggggcaccctgaacctttcctggtcaaacatgtcgcaattggaaaatgaagattgcgggaaaaagttctaccgtggtaattacctcaaattctacaatgctataagagaggcctatccagacattcagatgatttcaaactgtgatggttcatctagaccacttgaccatcctgcggatttgtatgatttccatgtctatactgattctaagactttgtttaacatgaggagcacatttgacagaacatctcgtagtggacctaaggcttttgtgagcgagtacgctgtctggagaagtgacgcgggtagaggcagtcttcttgcttcgttggctgaagctgctttcctcactggtctggagaagaacagtgatattgttcagatggcaagttacgcaccactcttcgtgaacgacaatgaccaaacgtggaacccggacgctatcgtcttcaactcctggcagcactatggaactcctagctactggatgcagacgattttccgcgagtccagcggcgccatgatccatccggttaatatcagttcccggtactcgagttcgctggccgcgtctgcgatcacgtggcaagatgcagagaatagcttcctgagagtgaaggtcgtgaactttgggtcggacaccgttaacctcacggtctccacgagcggactcggggccagcgtcaacgcgctgggatcaaccgccaccgtcctcacgtctggcaacgtcatggacgagaactccttcagtaacccgaacaaggttgcgccggtgaaaagccagctgagcaacgccgcggagcagatgcaggtcacgctggctcctcactccttcaccgccttcgatctggcgctggctgagcccaagcttgtggcggagatatgatgtgtgtgctgttagcgatcttgatcgataaaaaggctttgtactggtgtactacgtactgttgcttcatgaaataaaaaccacatcaggtttttgcttggtgttggttggtttcctttctcttgtacgtgtttgctttgcatgttcatcaccatctactgtacgggatgatggtacattgatggtgagaacgatagcctcctgtggattaaacaaactgtcgatggatgccttcatggtaaagaactttatcgtgaatcacggtatgtggctgtcgcggcaaaccaaaaaaaaaaaaaaaaaaaaaaggaaggccgcccgctgtaaaggatc

SEQ ID NO: 55793 - DNA, 103 bp, Zea mays
  unsure (1)..(103): unsure at all n locations
  Clone ID: MRT4577_150879C.1
tcttttctatcccaaaatcctaggcttttgggcgtcggggcccgatggagccgggctggccaacctcnatcgcgccgcaaactttgtagcttgagaacaacat

SEQ ID NO: 55794 - DNA, 1644 bp, Zea mays
  Clone ID: MRT4577_15087C.1
ttccggccggggtcgcgatccaatcccggcgccggagaagacgcgcgcaggccgcgtccctcgaggccggccgggctcccctcccccattcgtcgcgatccaattccggcgccggagaagacgcgcgcaggccccacccagccgcctacaggcgctccgctcccacagacggacagcttgggctcgacggatgaacatgtgtgagaaagatcagaatttgccatggggatacgacctgttccgcgacccttttgctcctcccaacgggtactacgggcctcctcccggttactgtgatggccactgttgtgacctccatcattacggtagagcatcacatccagatgagactcagttgcattcttctcaactcgcatatgatatgtacaacccatcagtaggcatctaccatcctggaagcacccatgagcacgagcacgagacagtatatgtagaaccgtctagttcctctccagacacaggtggtgacggttgttttgagatggaggaggaagtagggaagaggttttaccccatggtcccagttccccatgtccccaaaattaatggagaaatcccatcaattgatgaagccactatggaccatgaaaggctgacagaaaggttgaggctgtatgagctggttgaaaacaaggtgaaaggagatggcaactgtcagttccgagcactatcagatcagctttaccaaagtccggatcaccatgaatttgtgaggtcgcagataattaaccagcttaaaactggccgggaaagcctatgatggatacgttcccatggcatatgatgattactatggagaaagttgcacggaacggtgaatggggtgaccatgtgacgctgcaggctgctgctgacaagtatggagtaaaaatcttcgtgatgacatcgttcaaggatacttgctacatcgagatcctgcctaaggttcagaagtccaacaaagtgatactgttgagcttctgggcggaggtgcactacaactccatacatccgcagaacggtgagtaggcgtgccgttggcatgccgggccttcaccgccaacgtatgcaaccaacatgctgctatatactgtcaatagtctttcttttgttcgagtagtggtaggaatcatgtgcaagcacaaccaaacaagctctgtctattgtgttggtgaagacgattctgtggtttgtgaatgctgcagatgctccgaggtcgcagacgaccaagaggagaagatggtggccgttctcgcagcaccaccaccattgatggcgggttcagctctcttggggctggatggatgttcaggatcaggtggtggtcccggtcccggccatcgtccagatgatactacaagggacgtacgacattatgattaatatatatacccagagcggagcagaaagacctgataagggaattagttgggatgaatgaaatggaataaacatgggatgggatgggaatcgtcgtcccgtatatagtttagagtggaggccggtgagtgccaactcaaactctttgtattgttgtttatatctacaaattttgccggaatgaggctagaattattggggaacaattatggtaataataaatcggttaagaattgagatgaaaaaaaaaaaaaaaaagcggcc

SEQ ID NO: 55795 - DNA, 253 bp, Zea mays
  Clone ID: MRT4577_150880C.1
cctcgatacaggacatggagggcattcctctatacaatcagcgggttatcatagctgggaagcatttgtgggacgggcgcacgcttgcttactacaacatacagaaggagagcaccctgcacttgttactacacctcaggggaggtatgcacatctaggtgaagaccctgaccggcatgactataacgctcgaagtggacactacagacaccattgacaacttctaggccaagatccactacatggagggcat

SEQ ID NO: 55796 - DNA, 219 bp, Zea mays
  unsure (1)..(219): unsure at all n locations
  Clone ID: MRT4577_150881C.1
tcagcatatggatggggcgcggggaccatgtatttggggttctccttccccccttgctggctcctgggtattggnctgtgctggaggttccctggctctaacttacatgcacctgtggtgtggaggattggaaatgggtgggtggaagtcattcttctcattttggatcggtggaaatccacatttttcttgtgactccatccacctatctttgttttt

SEQ ID NO: 55797 - DNA, 1557 bp, Zea mays
  unsure (1)..(1557): unsure at all n locations
  Clone ID: MRT4577_150882C.1
gtaactcttgcggtcttcccctcattgganatgcacacagagatgcgagaattggtcccaaatttccacttcccggcttaagcaagtagcttcattcaccgagcgtgcaggcacaggcagcagcttgccatggcgtctcccaccttgatgcaatgcctcgtcgccgttgccgcccgcagagaccttacggcttaagcaagtagcttcattcaccgagcgtgcaggcacaggcagcagcttgccatggcgtctcccaccttgatgcaatgcctggtcgccgtttccctcctctcctgtgtcgcccacgcacagctctcgcccacgttctatgcgtcctcctgccccaacctgcagagcatcgttcgggcggcgatgacccaggccgtcggcagtgagcagaggatgggcgcctctctgctcaggctcttcttccacgactgcttcgttcaaggctgcgacggatcgatccttctcgacgccggaggggagaagaccgccgggcctaacctgaactcggtgcgtggctttgaggtcatcgacaccatcaagcggaacgtcgaggccgcgtgccccggcgtcgtgtcgtgcgccgacatcctcgcgcttgccgcgcgcgacggaaccaaccttctcggcgggccgacctggagcgtgccgctcgggcggcgggactcgacgacggccagcgcctcgctcgccaacagcaacctcccgcccccgacggccagcctcggcacgctcatctccctgttcggcaggcagggcctgtcgccgcgcgacatgacggcgctgtcgggcgcgcacaccatcgggcaggcccggtgcaccaccttccgcggccgcatctacggcgacaccgacatcaacgcctccttcgcggcgctgcggcagcagacgtgcccgcggtccggcggcgacggcaacctggcgcccatcgacgtgcagacgccggtgaggttcgacacggcctacttcaccaacctgctgtcgcggaggggcctgttccactcggaccaggagctcttcaacggcgggtcgcaggacgcgctggtgaggcagtacagcgccagcgcctcgctcttcaacgccgacttcgtggcagccatgattaggatgggcaacgttggggtgctcaccggcaccgctggacagatcaggcgcaactgccgggtcgtcaacagctagagatacgcatcggattcgatcgatatacttgtagctatagctagcttgctcgtcgaccgagcgcccattgatggatcgaccgacacagagctcgcttctgatgaaccccagtacgtgtactctctagtatatatacatagatatagctatagattgaacacgtcgtcaataccagtagaataagtggtgaacgaccacgcaaggacaaagcagagtgatcgaagcagtgtcacttggttaccgaaatgattcatctgacattttcgtattggattttgaacgcaactatatatatagacaccatccatgttcaaaaacaaaaaaaaaaaaggcccctaggtccgtgcctgctccacaactaacggatcctcc

SEQ ID NO: 55798 - DNA, 412 bp, Zea mays
  Clone ID: MRT4577_150883C.1
aaaaaaaaatcctttccctttaaaggggtcattcagggcattggccaccccgcccccccggggggggggggaaaccccggtacccaacgcccgtaaaagggggaaccaactttaggggggtaggcagggggccccttaaaataataaaaaaaaacccgcccgggggggccgttaaaagggggaaatcccaccccccggggggcggtactaggggaacccaacccgggccccaacttgggggaaaaaagggcaaaaggggttcccgggggaaaatggtatcccctcaaaaatccacaaaaaaaaaaaaccggaagcaaaaaggggaaaacccggggggcccaaagggggggccaacccccattaattggggggggcccaccggcccgtttccaagggggaaaaccggggggcc

SEQ ID NO: 55799 - DNA, 577 bp, Zea mays
  Clone ID: MRT4577_150884C.1
ggccgcggttggtggtgcaccgggcctgcccgttggtgtgcgcgcccgacagcgccgtcatgtcgcgcggcgacaggccctgcctgccgaacagggagatgagcgtgccgaggctggccgtcgggggcgggaggttgctgttggcgagcgaggcgctggccgtcgtcgagtcccgccgcccgagcggcacgctccaggtcggcccgccgagctatacgtaacgtacggagatgcacaacgaagcaaaggaaaagtgtcagacgatcgacgacgcgagcggtttgaccgtccatgcaaactagctagaaggcgcgcgcgtgcgtacaaggttggttccgtcgcgcgcggcaagcgcgaggatgtcggcgcacgacacgacgccggggcacgcggcctcgacgttccgcttgatggtgtcgatgacctcaaagccgcgcaccgagttcaggttcggcccggcggtcttctcccctccggcgtcgagaaggatcgaaccgtcgcagccctgtcatcatgcatcaccgtcgcatacacatgtcatgatgcatcgcagtcaaattattcggacgcgtgggtc

SEQ ID NO: 55800 - DNA, 265 bp, Zea mays
  unsure (1)..(265): unsure at all n locations
  Clone ID: MRT4577_150885C.1
tccttaagcagtggtaacaacgcagagtacgcgggaaggatgtcgtgtgcagatgtctccatccaacaataagatgcatgcatatatgatctgtgtggccagctagctgctagaccaccatctcactccctgagtctgctgatgctcagccaataaagaatcattccatctaaaaaaaaaaaaaaaaaaaaaaaatttatataaaaagtaaaaaaaaaaaaaaaaaaaaaaaaanaaaaangcctcttgcgttgttaccactgct

SEQ ID NO: 55801 - DNA, 325 bp, Zea mays
  Clone ID: MRT4577_150886C.1
gttgatattccttttttttatattttaaaaaacaaacaaaaaaaaacaaaaaaaattaaaaaaaaaaaaaaacgacgcacaaaaaccaaaaccatcataagaaaacaaaaaaaaaaaaaatataaactttaactaaaagagaacacctaaattacgaaggaaacaaaaatatccctaaaaccaccccaaaaaaaaaaaaaggaaaatattcgaaaaaaaacccactgtacccaccccaaggtatgaaaagggggacccaccccaaaataaaaactgtgtctaaccggagcgaaaatttaaacaacgaattccaaacaaatttgaa

SEQ ID NO: 55802 - DNA, 121 bp, Zea mays
  Clone ID: MRT4577_150887C.1
ggatttaggatgggattctggcgccggaaccgaagtcggcgacgcgctggagccgcggccggatcgtttgggtcaccacgctcaacgccatgatggcgaacgggaggttccagaagcaggc

SEQ ID NO: 55803 - DNA, 484 bp, Zea mays
  unsure (1)..(484): unsure at all n locations
  Clone ID: MRT4577_150888C.1
cctgacncnncctacccgatccctcgcggctgctggcgagccnnatggacgacctcccccgcggcgcctctctcancccgccgcncnnaatcccaccnnncagctcttactcggtcccgccgcccttcgctgggccaagcatcggtgaagggggccttggctcttngagcatgggccgcgaggcgcgctctcagcggagccattgctgtgccacggcggctgagcagacatctccgctcgacccgcgtcctccgacantggagaagacgganaagctgatgaacctcctcctncctcggcgccatcttcgttgcccacccgtcggcatnggtcgtcccctacggcgccttcttcgtccctgccggctccgggaacgccggcggcgggacctacgcgaaggacaagctgggcaacgacatcacggtggaggcgtggctcaacacgcacggtcccaacgaccgcacgctcgcgcangggctcaagg

SEQ ID NO: 55804 - DNA, 161 bp, Zea mays
  Clone ID: MRT4577_150889C.1
gggtgttgttgggggggttataatctataagctgaagcaagacacacccttaatgctgaatttgactgaacaacccggggtgttttactgtggtgtggttggccaattggttggtgtgttgagtgtgttgcagtggattgctaacacactgcacagtactt

SEQ ID NO: 55805 - DNA, 1314 bp, Zea mays
  Clone ID: MRT4577_15088C.1
atgagcagtgctaatgacttcaaggccctcgccgaggccctcaagtcgctgcaggagtccgtcggagccaatgcccaggccatcgccaacctcacagtcggcgacacgttctcccccgacatcaagatcggctccggcgagcaccataatgaccggccgccgaggttccagaagctggattttccccggtacgatggtaagacctatccccttggcttcatcaaccgctgcgaatcatactttcatcagcagcgcatcatggaggaggcgaaggtctggatggcctcctacaacttggagggcggggcgcagatgtggtacatccagccgatcggcctacctccggtgcggggctgcgaccaccacatcgtcctcaagctcggctcgtccccgatggcggtacgaccgtacatgtaccctgcggctcataaggacaaacttgagcggcagtgcgccaccatgatcacgcatggcatcgtccgttccagagactcgacgttctcgtctccggtcatcctcgttaagaagtcgaacggatcgtggcgcttctgcgtcgactaccacgcgttgaacgcgctcacggtcaaggacgcatttctgatccctgtcgtcgacgagctccacgacgagctccatggggcatgcctcttcaccaagctggacctacggtcggggtaccaccaagtacggatgcggccgaaggacttccataaaatggtgtttcatacccacgacagcctctacgagttcctgtttgtgcttgtcttctttgacaacattttgatatacaacacctcttgggcggaccacctacgacatctccgcgccgtcctcgacaccctgcgccagcactgcctctttgtgaagaggtccaagtgctcatttggcgtcggctccgtctcctacctaggcaacgtcatgtcgacggagggcatcgctgtggaccctgcaaaggtccaggccatccacgactggccccaaccacggtcggcgtgggccgtgcgcggactcctctgcttggcggactactactgcaagttcgttcacaactatggcgccattacagcacccctcacatccctcctgaaggaggggttcacatggtccgacgaggcgaccaccgctttcggtgccctaaaaggggctgtgacatccgcaccagtgctgacattgccaaacttcaccaagcctttcgtcgtcatgtgcgacgcgtctacccatggcttcgggggccgtactcatacaggaggctcatccgatcgccttcttcagccgaccgatggcgccccgccatcgctctctagcggcctatga

SEQ ID NO: 55806 - DNA, 294 bp, Zea mays
  Clone ID: MRT4577_150890C.1
aaaaaaaaaaaaaaaaaaaaaaaaaaaaaaaaaaaaaaaaaaggcaagacgaatactaaaggaaccaaaaaaaaaaaacacaaagcatgcaaaaaaaaaaaataataggggggcggctccttgaagtcccaacattggccgccctttctcaccggcgtgtacttgggttttaccctggcgtttcccatcttgatggggggggcggctttccccctttcgccaggtggaaaaccctggggacaggccccgtacttctcgtccttcccaacccccgctcgcctgtttggcgaatgg

SEQ ID NO: 55807 - DNA, 358 bp, Zea mays
  Clone ID: MRT4577_150891C.1
cctttctttttcttttttttttttttatcatcttctttttatatggtttgggtttttttataatttacaatcaattaacattccatgtgtctctttacaaaaaattcaaaccaacggaaaaaagacaaacatcgcaatggaggcattatccaaaacagcgcacaaacgaaaaaagtaaaacccaaccagccccaacattgtacaaaaccgacaaccctcttgacccacccgcactcaaaataaaactttaacccctccctccaaacaccccctcaaacaccaacaagccatcgccattggcctcccggagcggcaggggcgggccctggaataacccaatgccacccaaagcagaaaa

SEQ ID NO: 55808 - DNA, 448 bp, Zea mays
  Clone ID: MRT4577_150892C.1
attaacacatagattagaagaaagcaagcaacaatggggtcagtttcggccgcctcttccgcagtgctcctcgtcgtggtcctggtggcgagcctcgccgtcggcggcgccaacgcggcgaccttcaccatcaccaaccgttgctcgttcacggtgtggccggcggcgacgccggtgggcggcggcacgcagctgaacccggggcagacgtggaccatcaacgtgcccgccgggaccagctccggcagggtgtggggccggaccgggtgcagcttcgacggcgccggccgcggcaggtgcgccaccggcgactgcggcggcgcgctgtcgtgcaggctgtccgggcagcccgcgctgacgctggcggagttcacgctggggacgttcggcggcaaccgggacttctacaacctgtcggtgatcgacggggacaacgtcgccatgagct

SEQ ID NO: 55809 - DNA, 379 bp, Zea mays
  Clone ID: MRT4577_150893C.1
cacacactggcgcgcacgctgtctgatagactaaagatattgccagcttgtgacaagagcaaaaacaccatcatccgattcggccgtctaaactccaccccgatggcccacaacacgaggacagtgacgctggccctgagagtcctccgcgcgtggcaaggcaccatctgttcccacccccaccgggtacggctggtacagccacaggtacaagcggtgcggcaaccctaagaaagacaaccccgtcttcaacaacatgtgctttcagaggtgcggtagctccgacaagggagacggcgtacgcactgacgcttgttcaaacgggactttatactcacgcgaactcaaattgctagaccgatcatatacacttggtgct

SEQ ID NO: 55810 - DNA, 368 bp, Zea mays
  Clone ID: MRT4577_150894C.1
ccggggtgaacaataatcttaaccggtaccacagccaaagcggaatcctatctctgatgcaccaaccatacgctaaacccgaaccggaccagagcccgaacccaaagcgaacctaggcctgaaccaaacgcacatcagaacctaaacctgagcctataccgaagcctgtccctgctcacattccaccaggagatatcagctgagggagtggatatgaacaacgattgcaattgcacaaataatacgccctgttgcagtgagctgttgagggtgctgctactagtgggatatatactatattttctttgtcatgtgctgactgtcatgctattatatgatcttactgcagtgcaacttgcttcgaggat

SEQ ID NO: 55811 - DNA, 746 bp, Zea mays
  Clone ID: MRT4577_150895C.1
tagtagctatagctgactttccgaagtcaccaattagtagctatagcagactaggccacaccaaaagaagtagctagcctgccggcatgggttccatcaagcgcaactacagcgggtgggcagtcctgcctgtcgtcgccgggattcttctcctcgcagctgctgtcatggcggaggggcggtcgacgagctgcatcgcccaatgcccaaaccggaagggcttaacggcctgcctctaccgctgctggtttggccgcacgcctctgcatcttgatcttgtcgaccaggagtcaacacaagaagttgtcctcttgacggcatcagaggcggagtgcgcggtctactgcaaaacgcatgcccgagatttgccccgcaagtacagcgcatgcatggtcatgtgccaatcaggaccagatgccgcgaacgacaagatcctccacatcaacgacaggaaagaggaggagaagctgcaagaggacgtcgaagctcagcttaggaccagcgcctgcgacgagtgcggaaatacgacagaattcatggagtacatgagctgtctaatccgcaataattgtgattaattagcgtgtttcttcttgcatagaataggggccgactcagaggatgccgtggtgtgtggaacgggcttgctgatcatgcacctggagtaatgggatcccatagtgtgcacaatggtggcgatcaagttgtttacttcctattttgcatcaaataaatatggatccgtc

SEQ ID NO: 55812 - DNA, 281 bp, Zea mays
  Clone ID: MRT4577_150896C.1
cgggtgcggggcttgacgccctcaatcacatgaagcgtgatggttggtgaactgtgcggaacatgacctgttaactggttcagagcgattagcggcggacaacttcctattcagattacaaacctgtcctgcttactagtagccatggaagctggctgtacgaacacatcgggaaatgttgattaccacgtgatgcagggtgacagcgaagatagtggcttaccactttatcaaatgatgcgacctaaggctgccatgcccactgggtctgggtgcaccga

SEQ ID NO: 55813 - DNA, 389 bp, Zea mays
  Clone ID: MRT4577_150897C.1
atagaacatgaacggcaaggagctcgacggcggtaatattaccggtaaccaggcccagccccgtggcggtggcggtggcggcggtggctacggcggcggtcgcggcggcggcggctatggtggcgggcgccgtgacggtggttatggcgtgcgtggcggctacggcggtcgtcgcgagggtggtggcggcggctactgaggcggtggcggctacgggggtcggcgcgagggtggttggttggcggagtcagagtgctcaggaggcgaggggctggagggtactggggcgtgggctcatatctggttgcggccgaggttatcttattctatctatagtatccgtgtttaccgttcgtttctgttaccgagttagtgtccgctctaccttt

SEQ ID NO: 55814 - DNA, 304 bp, Zea mays
  Clone ID: MRT4577_150898C.1
tttgggttggtttaatacaacatttggatgttccatttcaatgttattgattgtacactattttgtttggtgttgccttacaggcacccaaaaaagaagagcgggggttaaattaccaagcgggggggggacagccccaaaaaaaaaacacaggcggggccccaaaaagggggggaaaccccccggaaaaacacaagccaagtaaaaaaaaagggggggaacccgacccgccaaccggaaaaaaaaaaggggggggggggaaaacgggggggcaaaaaaaaagcccccagggaacagcccgaaa

SEQ ID NO: 55815 - DNA, 349 bp, Zea mays
  Clone ID: MRT4577_150899C.1
cgcagtggtcggcgcacgagtccgcgaccgcgtcacgcccaagcgggcgtgactgaggtgctgctcaggtacaggcacgaccctctctgttactgatcaatatgcaactaggggatcattggatgatattctatatggtaaaaagggagtaaacagagcccagccagcgccagtactgcaatggatgtgacgagctaagattgctgtatgcgctgataggtatgtgcagttcttgcacgagaacgcacatcctggtgtggtccatcgctgcataaaataaaactgcatactgctctttgaccatgaggttgcgaaaataagggacttcaacatatgaaaagaagcccct

SEQ ID NO: 55816 - DNA, 279 bp, Zea mays
  Clone ID: MRT4577_15089C.1
acttatccgtcctctgctgtgccacggctggcaccgccgtcgacaccgacctctccgagtaggtcatccaaggccgcgtctattgcgagatctgctgcgcctggttcgtgaccattgtcaccgagtacatcacggagcgcagtgtgacgcgcgagtgcacgcacatcagtacctggatgccccatcgctccagcgacggcgtgacagatcggaaaggtacgtgaacgatctcactcctagacacacaggatgacgacatctgcgaagtggtcctggcgg

SEQ ID NO: 55817 - DNA, 767 bp, Zea mays
  unsure (1)..(767): unsure at all n locations
  Clone ID: MRT4577_1508C.1
cggccgctcgaggcggancggncnggggctgcgtcgttctcccgtgccctcgcgtgcgctctatctgtttctggtggcgacgacttggcggtccccgctgccgccgtgcccaggcctctacttcgggagttcgggaccttcaccggcgacgagcacccatcgggttgcttcgcaaaacttccaacatccaggatacaattaattacgattccttcaactttatctcgatttataggaggttgcacagagcccatccaacagggtgtctcagacatactgatggatggggtgcccaatatccttgagaaatcatcacatgaatgcatgtactcttggtacttcaccagggaagaactagagaaattttctccatcaaggaaagatggtattactgaaaacaaggaatcagaaattcggcatttatattgctcatttatccgggatgttggcatcaggctgaagctacctcagatgacactagcaacagcagtcatgctttgccatcgcttttatttacaccagtcccttgccaaaaatggatggcagacagttgcaacagtatgtgtatttctggcgtcgaaagttgaagatactccttgtcccctggaccatgtagttagagtggcctatgaaacaatgtataggcgggacactgctgcggctcaaaggatccggcagaaggatgtttttgagaagcagaaagcgctcattttgatcggagagagattgcttcttacaactattcgatttgattcaacattcagcat

SEQ ID NO: 55818 - DNA, 900 bp, Zea mays
  Clone ID: MRT4577_150900C.1
taattccccagagcggagaagagcgcaagatgttcggcttcgggcaccacggccagaacccgccggcgcacggcggcgtgcaccagcccaccttcaagatcttctgcaaggccgacgaggggtactgcctcaccgtccgcgacggcaacgtggtgctggcccccgccaacccgcgcgacgagcaccagcactggtacaaggacatgcgcttcagcaacagcgtcaaggacgaggaagggtacccggccttcgcgctcgtcaacagggtcaccggcgaggccatcaagcactcccagggcgagggccacccggtcaaggctggtggccctacaaccccggctaccaggacgagtcggtgctgtggacggagagccgcgacgtcggccacggcttccgctgcgtccgcatggtcaacaacatctacctcaacttcgacgccttccacggcgacaaggaccacggcggcgtgcgcgacggcaccaacatcgtgctctggaagtggtgcgagggcgacaaccagcgctggaagatcgtcccctggtaaatgtgctgttctgtggctgcactggtcatcaccatgatctggagctttgaaggcatagccacctgtggtcagcaactgctgccgtgttgctagaataaagttggtggcgatcgatcgatcgatctttggtgatgggtgtccctccctgtgtgtttgtgtttagttccagtcgtttgtgaggaagtcagttatgtttgagtgagaggggtacttcgctcttcggttaactctgtacttgtcatgaggagagttttcatacccggagtgtagaactctgtactgtactcggatccttcctttttcatccaagtgggttttattttatcaaccgtatctatactcgtggttttgctatt

SEQ ID NO: 55819 - DNA, 336 bp, Zea mays
  Clone ID: MRT4577_150901C.1
cccacgcgtccgcccacgcgtacgaccactcgtaccgcacaagtcacaacggtggccagggcgcacccatcagtcccgggttgccgacacactcctcctatagtacaatctgcttctcaatcatttcaacaactatatctcttctatctagctgcgacgccagagcacctatggaatacgaacggatcatccaggatgttgtggatagacaacaaccgtccgaaataccctagacaaacgcacctgccacgaccaattccccacaacctaacaaagttcgcgtcgcagcaggattgcccacgaatgacgctatatggaccgacctggtccgcgaag

SEQ ID NO: 55820 - DNA, 251 bp, Zea mays
  Clone ID: MRT4577_150902C.1
atcaggcgtccgggaatacagtatcaacatggggttcatgaaactatcggccatgtaactcctgagtacattcagacaggaatgccatcaatgcagactgatatcgttggttaagacgtcatcctgttagaaatgctgaccgggaaccttgaaatgcaatccatcctggacgtatatgaaaagcaagccaaattcctgcaaatggtttagggcagccttcggatggaaaagggctaatactccaccttatg

SEQ ID NO: 55821 - DNA, 1567 bp, Zea mays
  Clone ID: MRT4577_150903C.1
ggcccgggggccccgtccacaatcccctgtcccgctagcggctagtccgaccaggcgatcccccccgaaaccctcccccaaaaccccagagcggagaagagcgcaagatgttcggcttcgggcaccacggccaccacggccagaacccgccggcgcacggcggcgtgcaccagcccaccttcaagatcttctgcaaggccgacgaggggtactgcctcaccgtccgcgacggcaacgtggtgctggccccccgccaacccgcgcgacgagcaccagcactggtacaaggacatgcgcttcagcacccaggtcaaggacgaggagggcaaccctgcgttcgccctcgtcaacaaggccactgggctcgccatcaagcactccctcggccagtcccacccggtgaagctggtgccgttcaacccggagtaccaggacgagtcggtgctgtggacggagagcggcgacgtgggcaagggcttccgctgcatccgcatggtgaacaacatccgcctcaacttcgacgccttccacggcgacaagggccacggcggcgtgcacgacggcaccaccgtggtgctgtgggagtgggccaagggcgacaaccagagctggaagatcctgccctggggcgacgaggcctacgccgggggcggcagcagcgccgccaacgcgccccgcttcggcggcggcgagcccaccgtccgcatctactgcaaggccgacgaagggttcagcgccacggtccgcaacggcgccgtgtgcctcgcgcccaccaacccgcgcgacgagtaccagcactggatcaaggacatgcgccacagcaacagcgtcaaggacgaggaagggtacccggccttcgcgctcgtcaacagggtcaccggcgaggccatcaagcactcccagggcgagggccacccggtcaagctggtgccctacaaccccggctaccaggacgagtcggtgctgtggacggagagccgcgacgtcggccacggcttccgctgcgtccgcatggtcaacaacatctacctcaacttcgacgccttccacggcgacaaggaccacggcggcgtgcgcgacggcaccaacatcgtgctctggaagtggtgcgagggcgacaaccagcgctggaagatcgtcccctggtaaatgtgctgttctgtggctgcactggtcatcaccatgatctggagctttgaaggcatagccacctgtggtcagcaactgctgccgtgttgctagaataaagttggtggcgatcgatcgatcgatctttggtgatgggtgtccctccctgtgtgtttgtgtttagttccagtcgtttgtgaggaagtcagttatgtttgagtgagaggggtacttcgctcttcggttaactctgtacttgtcatgaggagagttttcatacccggagtgtaggaactctgtactgtactcggatccttcctttttcatccaagtgggttttattttatcccccggatctaaaaaaaaaaaaaaaaaaaaaaaaaaaaaaaaaaaaaaaaaaaaaaaaaaaaaaaaaaaaaaaaaaaaaaaaaaccccccc

SEQ ID NO: 55822 - DNA, 1505 bp, Zea mays
  Clone ID: MRT4577_150904C.1
cattgggtacctcgaggccggccggggccccgtcccaatccccctgtcccgctaggattcccccgaaaccctcccccaaaaccccagagcggagaagagcgcaagatgttcggcttcgggcaccacggccaccacggccagaacccgccggcgcacggcggcgtgcaccagcccaccttcaagatcttctgcaaggccgacgaggggtactgcctcaccgtccgcgacggcaacgtggtgctggcccccgccaacccgcgcgacgagcaccagcactggtacaaggacatgcgcttcagcacccaggtcaaggacgaggagggcaaccctgcgttcgccctcgtcaacaaggccactgggctcgccatcaagcactccctcggccagtcccacccggtgaagctggtgccgttcaacccggagtaccaggacgagtcggtgctgtggacggagagcggcgacgtgggcaagggcttccgctgcatccgcatggtgaacaacatccgcctcaacttcgacgccttccacggcgacaagggccacggcggcgtgcacgacggcaccaccgtggtgctgtgggagtgggccaagggagacaaccagagctggaagatcctgccctggggcgacgaagcctacgccgcgggaggcagcagcgccgccaacgcgccccgcttcggcggcggcggcgagcccaccgtccgcatctactgcaaggccgacgaggggttcagcgccacggtccgcaacggcgccgtgtgcctcgcgcccaccaacccgcgcgacgagtaccagcactggatcaaggacatgcgccacagcaacagcgtcaaggacgaggaagggtacccggccttcgcgctcgtcaacagggtcaccggcgaggccatcaagcactcccagggcgagggccacccggtcaagctggtgccctacaaccccggctaccaggacgagtcggtgctgtggacggagagccgcgacgtcggccacggcttccgctgcgtccgcatggtcaacaacatctacctcaacttcgacgccttccacggcgacaaggaccacggcggcgtgcgcgacggcaccaacatcgtgctctggaagtggtgcgagggcgacaaccagcgctggaagatcgtcccctggtaaatgtgctgttctgtggctgcactggtcatcaccatgatctggagctttgaaggcatagccacctgtggtcagcagctgctgccgtgttgctagaataaagttggtggcgatcgatcgatcgatctttggtgatgggtgtccctccctgtgtgtttgtgtttagttccagtcgtttgtgaggaagtcagttatgtttgagtgagaggggtacttcgctcttcggttaactctgtacttgtcatgaggagagttttcatacccggagtgtagaactctgtactgtactcggatccttccttttccatccaagtgggttttattttatcaaccgtatctatactcgtggttttgctgtt

SEQ ID NO: 55823 - DNA, 778 bp, Zea mays
  Clone ID: MRT4577_150905C.1
gccggccgggttgggatttcaaggctactcactcactcccactccccaagcacaaggatcgattcgatcgttcgcccaactattcatagttcattcgttcatccgatcattcgtccactaaatttattgttcatctgctatgctactgaaattccgatcgttcgtatgtttcgtctaattaatttattgtgcaattgttatgttgccgaaataccaattgttcattccaatcgtccatccaattattcattgtccgtccgattgttaattgttcatttgtctgatcaatcgttcgttcatccaactattcatcgttcttcagattgctcatccaactattcatcgtccgtctgatcattcatccaactattcgttattgttagatcatttatccaactattcatcgcccgtccattcaattatcgttcgtccatccaactattcattgttcgtttgattgttcatccaactattcaacgttcatccaatcgcccaattattcattgttcattcaacatgttgtcaactcatctaaaacctgccaaaccaatatctcagtcatacgaactttggtgactgcgattttcctttcggtgagaatttctcaattggtcacccatcctataatttctccaagttaaacatacttaaaatataggttctttcgagacaggcgtccaaaaataaaggtgaaccttgtttgtatggatgcatgggtagtcgcttcatccaagtctgcatggctgaaccctagggttatcggtggctagggagcacc

SEQ ID NO: 55824 - DNA, 726 bp, Zea mays
  unsure (1)..(726): unsure at all n locations
  Clone ID: MRT4577_150906C.1
cctcgaggccggccgggaccggcgtcccatgaagccgatgtcctccgtgttgttcgtcctgctcatcttgccgatgtgcagcaggtcgtcctccccgctgcaagacacatgcaggtccttcgccgccggccacccggccatcggttacgagtactgcattagggtcttccaggccgacaaggacagcgccgaggccacggacacgcgtggcctcgccgccatcgcggccaggatcgccgaggcgaaggccaacgcgacggcggcgcgcatcgcggccatgggcgcgctggagagggacgcgaggaggcgggaccgcctgtccgtgtgcgccgaggcatactcggacgccgtggaccagctcggccaggcagaagaggagctcgcccgcggcgcggagggcggggcggccggcatcgacgacgcggtcacgcagctcagcgcggcgctggacgcgcccgagacgtgcgaggacgcgttcggcgaggccgccgacacgtcgccgctggccggcgaggacgccgagttcaagaagctggcgaccgtcgctctcgccgtcgcggcgtcattggtgccgccaccgtcaacgccaaggccaagggttagtgattaaggcgccctgtactatatacacccgtgcttggtagtaagcaccggacactgccggcagatgttnttgcgntcttatatgtatttttggtggcgaanaaaaaaaaaaaaaaagcggcc

SEQ ID NO: 55825 - DNA, 365 bp, Zea mays
  Clone ID: MRT4577_150907C.1
tttcttttttccgggctactccaacctttggctcggtcccctgcatctgcggctgggacaccaccaagcccaacaccgcgaatccgtatccgaaccacaaggaacagatggtgaatgagataggggcgtcacgatgaactcaagctcactacgacgcctggtgcccaagaaggagattccgaccctgaggcagggactagacgccccccgaaagaccaccatcctctacaagctgaagctcggcgagatcgtcaccaccatcctgaacatgctattcaatgttctaactgtggaggacaagaacatcagctccactgtctcagatgactgaggccaggacaagatcacgccactgtgtgaggcat

SEQ ID NO: 55826 - DNA, 196 bp, Zea mays
  unsure (1)..(196): unsure at all n locations
  Clone ID: MRT4577_150908C.1
atgggncttgtgcatgctgcatcgtagcttgaactcggccgagcgcacagcctactcatatcttcctctcctcgcggtgccccaccaaactctaaccggagcacgcagccgatactcgcgactgctcgcgccgtgctcaggtgctctaactctgagcgtcatacgacccgcagtggtgcgcgtggtccaggaaaca

SEQ ID NO: 55827 - DNA, 676 bp, Zea mays
  Clone ID: MRT4577_150909C.1
ccgacctgctggctgctgccctctaattccttttactccccgccgagcgaaacaaacggccttcttggtcgcctcccccatttcgccgctgggcgctggctcaccccactggctttctcaagtttcaagcccctgctgcatcttggccagttgaagatgagcagggcatcaatcaaaatcatcccagagtgctacaggtccatgcaccttttgctagattgtcctttcatagtattttacttcatcagatatgcattgataagttaaaatgtttagcatgatagattgtatctctctgcattgtggtggcttggttgggcagactagtgatggatcttgattctaatttcttcaagaggaaggatgctaggggtagcatgttgcttgcttactccatgtcaacagcaagcagatcgaagttgttcctgtggatgctacaagcaacacttttggatgcatgctactttgctttgcattttgtagcagaggataaagttgcaagtgaactaggttcctgaacccaaaacatgtggttgcaacagtagacatttgatctatgagagctttgacaagccaaacttgttgttgcctacttattacgatttgaaaggtgacaagtagactcattattgtgaccgattattggcgctaatggaaatatgacctacgttttgct

SEQ ID NO: 55828 - DNA, 2414 bp, Zea mays
  unsure (1)..(2414): unsure at all n locations
  Clone ID: MRT4577_15090C.1
gtcttgttgggcggcggatcgtgtgggattgagcgaagatcgtcgtcaacttcgggcgctcgctgggggcgccgggcggngaggaaagcagatagggcacggaaggatcggcattgaggcaggcgtccggagatggaccgtcggagctggctgtggcggcgcaagtcgacggacaagagccccgcagagacggagacctcggcgtcctcggcgtccgagaggatcactgatgaacaggatactgccaagagctccccaaactcgactcagtcgccggaggtcacatcgaaggaactggaggacggtaacgatgtgaaggtgaaggtattgagtgagaggctctcatccgtagttctggatatccgtgcgaaggatgatctcgtgaagcagcattccaaggttgcagaggaggctgttctaggatgggagaaggccgagacagagatcgcgtcactgaaggcgcagttgaacgctgcggcggccaagaactctgcgctggaggaccgcctcgtccacctggacggcgccctcaaggaatgcgtccggcagctccggtgcgccaaggacgagcaggaccagacggtgcagggcgcgctggcacagcaagcgcggcagtgggagtcgcacaaggccgacctcgaccagttcaggatcgacaggagcggcgcgagcagcagggccgccagcctcgcgaccgcggacatcggcgtgatggacgacttcctcgagatggagaagctcgcctctgcgtcgaaaggcgacgccgtcgaggacgcgagcgggcaggtgctcaggctcgaggagaaggtcaagaagctggcagccgagaaggccgagcgggagaaggcgctgcacgaggctcagcgcgagatgaggacttcccgccagcgggtaatggtggcagaggagagatcagctgagctacagcggcagctgaaccttgccaatggcgagaaacatgccatgggggccgaggtgaaagcggctgaggcgaagagaggagagctggagggccagctcgagctcgcccacgccgagatcgcggggttgctggacaaggggcgcatcctggaggaacgtctcgagtctgagaaggcgctgacacttgagctcgcagccaagtaccaggacatggaggcgctgagggcagagaagagggagctgagcgctcagctggagacgtcacggtccgaagccaagaagctcggtgacaagatcgccctgatggagaggaagctggaggtggagaaggccttgtcgatccgactggcgacgaaatgccatggcattgatgctctggaagcaaagaagaagggcgtcgagctcgagctggagacggcgcgcgaggaaatcgcttcgctgcaaaacaaggctagcagcttggaactgcgacgagtcgaggaagagaaagcgtcgtctgctgcactcgcactgcggtgccaagaactggatgagcttagatcccagctggagtcttcgaattcacggatcgttgagctgaatgagaaggttaaaacgctcgaggatgtagtcgaggaacagaggtcagtgacggtggaattggagtctcagctccggtcgaggcgcgctgaaatcagtagcctgaaggaggatataagcctgttgcagaagaagctggagagccagaagaacctgtcatcagcttacatatctgcacttggtgcttctgaaaccgagaagaaggagctggctagtcggtttgagctcggagagaaagaagccgaggaattacgtgggaagatgagcttgcttgaggaacagatccgtaaagagagggcacggtcatccgagtttgcggtaaaatgtcagaagatggaggaacagatctcctgcagatctcttcttggccaccaaccagtgaaatcatctgccggacgcgtgggcggacgcgtgggcggacgcgtggggctggccaaggctgcagagaaactggccgactgccagaagacgatagcttcactgagcagccagctgaaatcgttggctgatttcgacgaattcccccctgaaactgagaccagtggcgctgactcagacgacgcctgggacagcgatctgaagcttctccaacccgcaagctatcccacgcagattggctgtttggcagtcacatgattcacgatcctcgttggcaagtggatagcgaaactgtttttgcttggcttccgccgcatgattgctgtgatgagattgccatgatgttccaccacatgtcatatagagttaagttaataggtgagcaaatgttcatatggaagctgtttatagagttgtttggtgaagcctcaaagggactcatattgaatattatctttgatcttccaatctccctgtcccttggaaacatcctcactgtcagaagactgcaaatagtgaaatacacatggcatgtc

SEQ ID NO: 55829 - DNA, 328 bp, Zea mays
  unsure (1)..(328): unsure at all n locations
  Clone ID: MRT4577_150910C.1
aggacaacgcacgcacgcacacgcaaactcgtaatccgcctctacccatttataaccattcactatnccgggggggggggaaacttattttattggcaaaacaaatcacacacataacacacacgcaacacaacatcaccccattgctaatcctaaggccacagccacccccctactttctgaaaagatcatggaaaggaccccactccactacccatgcttattattacatcgcacctacaccacacgcacacttcacacccaacgacgcgctctccaagtagcatctctctaatgccaacacatacgacgagaaaaaaaaaacaca

SEQ ID NO: 55830 - DNA, 503 bp, Zea mays
  Clone ID: MRT4577_150911C.1
ggttccaccaattcttttgattttcaaacaaaaacgaatccatgcccactgcaagacaagccaccgaacccccgggagggcttcgcgaattatccaaaaaaaaacaaaccgtcttccgcccaaaaaagagagccgggcgggcaaaaaacattgctatggctctaaacgccgaggttaaacatggggagggggccaaatcttccaaaagagctcctaaacgcggggggcttggttaacgaacccccctacccctgaagcaagcagtccttctgcacctggccccagggcagctggaaggctcagctgggcccacttaaaaagctccttttcagtgaagttgaacgtcttgccaatagcaggagtcaacttggggacaaagccggacttcacatcgggatcggggacaaattcttccaaaaaccgcaaaaacttcaggggcgcaagggacgaatcgccccgcaaaaggctaaatacgccctgcttgatccgtaagggaagggcca

SEQ ID NO: 55831 - DNA, 431 bp, Zea mays
  Clone ID: MRT4577_150912C.1
gggaagggactaaactttagtccttaaaaaccaaacccccttttaattagcttggtgctggaggtccatagcccgccccgccggatgaatcgaaggcatttaaaagtctagtaaaattggacgttggaagtgtaaacggaatcgggtttccatttcgccgggatgatgtttttaccgatgacctttttgccggactagctggtgaggcggataaaaaaggggcccttgagcgccttggcagtgtccatcctccaaatggggccccaaaagagcttcatgggcttccactaaaccgacaacttgtcctgaatttccatcaacacaatgtcgccattgtccgccacaaatttaaccagaacggccaggtagttggggttgcaacccttctggatgtggaacacgatcttttgcccagcggggtatttgcaccg

SEQ ID NO: 55832 - DNA, 310 bp, Zea mays
  Clone ID: MRT4577_150913C.1
gatcggatcaccttcttgcattgggtcctctgtctctcttcctactttacactcccggtatcgcatcatctcttttctactgcatgcaatggtctcttttgcttacaacaattctcctgctgatgtatccagcatggcatcatacatctacaattacgtacgtagtgcaacgactgccgattcgttgcgtgacgaacatatatgcgaatgcaagctgcgactaccatacatgcataatgagtgataaatatatatacaaaactgactaagcgccgaccatactctaataactggtccaaaacattataac

SEQ ID NO: 55833 - DNA, 4310 bp, Zea mays
  Clone ID: MRT4577_150914C.1
gtgaaacgggagggcaagaggctaaacagagatcttttacgaattgcacctgtttatataggaggctcctctgaaaatgaaaagtcatatcgtggttgggaatctgttgctgggctaagtgatgttattcagagcatgaaggaggtggtgatgttacctcttctctaccctgagttctttagttctctaggtcttactcctccaagaggtgttctgctgcatggccaccctggtactggtaagacacttgttgtaagggcactcataggggcatgttctcaaggtaacagaagaattgcttattttgctcgaaaaggtgctgattgtttgggtaagtatgttggtgatgctgagagacagttaagacttcttttccaggtagctgaacgatgccagccttctatcatattttttgatgagatagatggtttagcaccttgtagatccagacaacaagaccaaacacataattcagttgtggcaaccttgctctcgttgcttgatggtttgaaatcacgaggctcagtcgtagtgattggggctacaaatcgtcctgatgctattgatcctgcccttaggagaccaggaaggtttgatcgtgagatatactttccactaccaaccttcgaggatagatctgctattctgtcactgcatacaaaaaaatggccaagtcctatttcaggtgcattcctgtcatttgttgctagccaaactgttggatatgctggtgctgatctgcaggcaatttgcacacaagcggcaataaatgctttgaaaaggacatgcccattacatcaaattttacaatatgccgagaaaggagttcctcatgggcgagttcctctaccaacagttcttgtcgaggataaagattggctagctgctcttgcagctgctccgccaccttgttcaaaaagggaagcagggattgcttcaaatgatttggtttccactcctctagattcctgttttgtaccaagcctttttaaaccattggtacaccttcttatttctatgtatttggatgagcgtgtatggttacctccatcccttcttaaggcatgttgctctataaaggaagtggtattctcatccatggaaaagaatactgtaccccacactttatggccaacttatcttagttctttgatccaacaaaaagatattgcagatagaattggaacaatcttgtcaagctgtggccttatatctgcacaactaggaaatcgtggttcaatgttgctgagtgatgttaaaacacaggagaatttttgtggcagcagattaaatcccactggtttgcatatgaaaggagggctgccacataagttatcaggctttcgagttttagttgctggagcaccaagatcaggccaacaacacctaattcgttgtgttcttcatggttttatgggccagattgtaatacacaagcttgaccttgcaactatggtgcaggaaggaaatggtgatatccttagtggtctgacacacattctcttgaaatgtctaaaccttggaagatgcatcatctacatgcctagaattgatctgtgggcagttgataaggcccataatcaaatagaagataatatgctcaatactgggtcaggtcgtttagcatcctccaccgctgatcacaaaaaatgttcagaagtttggaatgcattgattgagcaaatggattcattgttagcttctgtatcaataagtgttctgtccaccagtgacatgaggtttcaagatcttcccagtggagtaagaggtttcttcagcacacatgttgtggatcagtgccttgtttcttcagaacatacaatacctagattttctgtgaatattgacaaccactctaattgggatgagatggttgattcatgtgctttgcagttatcacatgacttgattcgacatcatgttcaatttttgcatgatgaatctcataagaatgataatcatcaacaaaaagaagtgtttgcttccatgaatattagtgcagaaggtgaacttaagtccagtgagaatgagcgacccttgtgtggagttgcttctaaggagaatccaattcagctggctgcaggcagagctcagcaagagcctccaccatccaatgtggaagataaagtagaaaatgatcaatttttttttgaaggcatagttcaaagaaatccttctagtagacttgtaaaaggcagcgagtcatttgctattgttgcttttggaattcagatactgcagcatcctcagttctcaaaactttgttgggctacgtcaaagctacgggaaggcccctgcactgatataaatggaccatggaaaggctggccatttaattcctgtttgttgcagagcagcaccttacctggtaaatcactaaatggaggggacaatgttgtaaagggaaaggaaaagtctgtctgtgtgagagggctggttgctgttggcttattagcttatagaggtgtctatgggtctgttattgaagtttgtgctgaggtgagaaaggtgttgggactgttagtcggacagattcaaactaaaattttggaaaagagaaatcaattccggtattttcgaatcctatctcaagtagcttatctagatgatattgtgaacagttgggcatacacctaccaaagaacacatgttgatacccggacaggaacatcccgcatgaagagttcaagtgccaaagaatgtcaaaggaccaagtatgctgcaggaaccaatgtacaagttgctcctgttgccatccctgctgaggttcaagacattccagcccaacacactcaggatcatgaagttgttcctggtcctactgaggtgcaaggcaatccggttaagcatactgcagaacaacctggaagctattcgatggactgtgaccttgataatcatgtgaactctgtttccagcaaggatgcagtagaacacgatcatgtccattcagctttacctgatgtgcataggggcaatacacatgcagatacagtaacaaatgacggagaacctattggagcaaacaacaatgggaaagtgtccaggttaacctacggtgaagataaattcagaccaggtattcaaagatctgaaaaccacacagaatctatggaaggtttaagctgtttgcaaagggcaggagattccgttggatccccagcaagtattaacaatacagaattaccaaagaacaatgtttcttctgaagctcatattgatgataatgagttgaggagaaatgatcttgtgaatgatgttgaatcaaattcgatcgatggtaaacatgacaccatgatgaatctttcagttccaaaaatttcatgtctctacaaatgttgttctccatgtttccaatctatttataagatggttcatggtattatttcaaatactctaaggcctaatctgcattgcttaacagctgatgatatgcatgacattctgtcatcatggtgcttgaatctattagggtctgttagaaagttgtacagctcacatgatgaggccagctgcacagaagtttttgttagaatgtccaataaagaaacccacttagagcattgtgcttgtcagagtgatatctatctttcaagagaatgtgtatgccacttggaaagcaatggggatgttgaaactgcaaatactgattgtcatcctctatcaggacaaagcttaagttttttctttaaagatggtgtatggatgccgttggatctcactgcggaaacaaaacttcattgcagcttcaggagattctgtgtttgctcgatattaggaacagtttctatgctcagctagatcctcagttcatgatattgtctgatgcagttgcaaaagtacatatagtactctaatgctctaagtgtggctccagttgtgcacataacacaacatcatcaggatgtctttggttgattggaacttctcatccttgatgcaacttttgggcaagcttttattgcacataaattgcctctacctgttatggtcattagtggaaaactggctgttgtagttgcttcgtagactgaatatttaaaaagaagctaagatattagtcttcattttttttccaacgaagttacccatgtaggttggactgttgttgctgctggaaatttcacggttagatgatgactgagtgactgacgccatttcagttctcattgtaatatgtattatggcccaattaagcatcaagttgaaacatgattgaatcttatactcacattttgtgttgtacctccaaaaaaaaaaaaaaaattctggtcagtggtatgctttctaatggacaactgacattcagc

SEQ ID NO: 55834 - DNA, 1161 bp, Zea mays
  unsure (1)..(1161): unsure at all n locations
  Clone ID: MRT4577_150915C.1
cttaaattttggnaaaaaaaaaacaattccggtattttcgaatcctatctcaagtagcttatctagatgatattgtgaacagttgggcatacacctaccaaggtcggccagagctttatgtttttttttttatttctgttgattctgtcactcctttcttactgcttaatatcagcaaaaaatattggtgcatgatgctgatgtagatgattggcgcaattgtgttaacatttttatttatttattccaatctacagaacacatgttgatacccggacaggaacatcccgcatgaagtgttcaagtgccaaagaatgtcaaaggaccaagtatgctgcaggaaccaatgtacaagttgctcctgttgccatccctgctgaggttcaagacattccagcccaacacactcaggaccatgaagttgttcctggtcctactgaggtgcaaggcaatccggttaagtatactgcagaacaacttggaagccatacgatggactgtgaccttgataatcgtgtgagctctgtttccagcaaggatgtagtagaacacgatcatgtccattcagctttacctgatgcgcataggggcaatacacatgcagatacagtaacaaatgatggagaacccattggagcaaacaacaatgggaaagtgtcgaggttaacctacggtgaagataaattcagaccaggtattcaaagatctgaaaaccacacagaatctatggaaggtttaagttgtttgcaaagggcaggagattccgttggatccccagcaagtattaacaatacaggattaccaaagaacaatgtttcttctgaagctcatattgatgataatgatctggggagcagtggaaagaagcagaaatcagtcacatatgcctctcgccatccgagcagagcggcagcacaccatcggaagatcacctcatcctccaacctgaacggaggcatcgccgataactacctgcacacgagacatgtcaaaattgtgaaagcttggcctttacatgttcctccaatggctacagaggatacaaaaatgagcatcagagattcagttttcagcaccgacaaacagcaaaatggaggcttcgaaggactggaacttgaggaaggtgactgtatagtgtacctcagtgctgcgacatgctaa

SEQ ID NO: 55835 - DNA, 638 bp, Zea mays
  Clone ID: MRT4577_150916C.1
atgatattgtctgatgcagttgcaaaagtacatatagtactctaatgctctaagtgtggctccagttgtgcacataacacaacatcatcaggatgtctttggttgattggaacttctcatccttgatgcaacttttgggcaagcttttattgcacataaattgcctctacctgttatggtcattagtggaaaactggctgttgtagttgcttcgtagactgaatatttaaaaagaagctaagatattagtcttcattttttttccaacgaagttacccatgtaggttggactgttgttgctgctggaaatttcacggttagatgatgactgagtgactgacgccatttcagttctcattgtaatatgtattatggcccaattaagcatcaagttgaaacatgattgaatcttatactcacattttgtgttgtacctctattctggtcagtggtatgctttctaatggacaactgacattcagcatgataaatctttataggttatataagaacacactgtttagatgaggttggaattatatttttgtacctgcttataggagtgtgaactgtgaacaagtttttagtagaggccattggcaatagaaataaatttctaattgctgttggttgttgtt

SEQ ID NO: 55836 - DNA, 448 bp, Zea mays
  unsure (1)..(448): unsure at all n locations
  Clone ID: MRT4577_150917C.1
tgtaccgccttttttggcttttgggagacattctttcttacttggactgcagttacaccaagtggaaaagtaatctgagcaaacgtagtctctatatgactctagtctaagaaataatcattttgcaacttgcactgaatactttcttgactatcatcttgttaggaactactacctctgttctagaatatttgtcgcccactagttcgtttttgaactaaatcgcgacaagtaaaaaagaacggagggagtactaatgattcgatgatacatgtaaacactagaaacctcaatagattttcttcactcatgtattggaatgtttctctgtgctgtggcattctagctatccgccatttgtcgctgttgcttattggaccccgtgntgatgcaggagatggtttagctgccatgaagcaaggggatcttatcatctggtatgttgagc

SEQ ID NO: 55837 - DNA, 236 bp, Zea mays
  unsure (1)..(236): unsure at all n locations
  Clone ID: MRT4577_150918C.1
accgggannccgggaggcagagacggccgcccgncgcccgncgnccggcgncagggccgccgnggaggcgngcgcgaaggccgccacggggaagcccgacacgcgcggcgacggcccgngcncgcagagggggcngcncacgcnggaggagaagaagggccccnacgaggggggggggggcgaccncnacaccaagcccgaacggcncccgaagaacagcccagagggcaaggcgc

SEQ ID NO: 55838 - DNA, 586 bp, Zea mays
  Clone ID: MRT4577_150919C.1
cctagctacccatggggactctacaacggccttgtgacaacggtctcgtgcggatctatgctaggtaatccacccgagccggagttgttcgagccacaaaactcatactccaggtccagccatttgatccgcagtacagaggtgccaatcctgcgacgacttaaccgcacctatttgctcaggtagtacctagtaagcagtagtttatacagtacaaagagtaaacaataagttacacgacgacgaagatgatgcttaagaagttgttgtagtagtaataagaatacgagaagaggatcgtggacatgatgcatgacggtgagaagatacagatgagctagaacgtgactgtgcagtgtcgcagttaggtttatttctccaccaagaactttaaggtacagtagaatttagaccatctgaatttccagaacaatcccctgtccgtgcactaggtaaaggacgtcctttaagagtcgcacgtttacgtaaggacgatggtcggtaaggtccctccgacttaggacaccaggacaactttggatcgggtcgactactagtaagtggcgaacctgtctgactccaccca

SEQ ID NO: 55839 - DNA, 296 bp, Zea mays
  Clone ID: MRT4577_15091C.1
aaaaccaaaatctccgtttttttggggggtccaggcataagttttacaagggggtcgttttcaggagagcccttttccccccaaacaaaattttttttggagcctcaaccggtggcccctgtaaagcaaccgtttgtttttgcctgacaacccccctccgtttttaccacccatttttttttggaatgcccaaggccatttgtcccccccccttgggggtgataaacatatacctgccccgcccgggaggccccccgcttataaccattcgccggggcttaaggggctttaatttt

SEQ ID NO: 55840 - DNA, 786 bp, Zea mays
  Clone ID: MRT4577_150920C.1
gggtacctcgaggccggccgggccggagtgaacaagcagctcccttctcctgatctcctctcgagagttctgagcacttacttgtacactaagctgatcctctttctcaccgcactgcacacatggacgcgagccagggcgtcctcctgtccagctccctagtcggcggcgccaagggctccgcgtcatggccggagctgctcggctccgcgcactgggagggcctcctcgatcctctcgacctcacgctccgccgcctcatcctgctctgcggcgacctctgccaggtcacctacgattccttcaactccgacacccactccaagtactgtggcagctgccgctactccagatccacgctcttcgcccgcacgctgttcccggccgccgccgacatcttcccggcggcgtacctctacgcaacctcccagtcgtcgttcccaggcggtatcatggtgttctcgctctcccgcgaggcgtggaacaaggagtccaactggatcggctacgtctccgtgtccacagacgccgccgcggccgccacgggccagcgcgtcatctacgtcgcgtggcgcggcaccatccggacgctggagtgggttgacgtgctcaagccggagctcgtctcgcccgacgccatcctgccggaaggggacccggcccgcggccacgctcgcgtgatggaggggtggcacctcatctacacctccagcgacgagcggtcgcccttctccaagtacagcgcgcgggagcactggttcgccgcggtgcccgagctggtggccc

SEQ ID NO: 55841 - DNA, 261 bp, Zea mays
  Clone ID: MRT4577_150921C.1
atgatgtatgtagtggaatggcgcatccggtggtgcaacggtcaggggtactacctcgctgatgagcccagggtgcatttcgtttggcagcccaaccaagagtcatcgatactcgtcatgtcgcgtgcgttcgacgactactatatcgaggattgtggcgtcatcttggcgccggaggtgacacagaggaggatcgacaacagtgaccagttcgtcatcctcgccaccgtcagggtagcttttgtgccggtctgcctttaa

SEQ ID NO: 55842 - DNA, 170 bp, Zea mays
  Clone ID: MRT4577_150922C.1
gctggaggagcacctcaccagtggacattgcttcaagggcgatttcgtgtacttgcgggaaataccttccttcttcatatacacataaaagagttcaagaccggtagctacatttacgctagtgccgcacacgcagagctcataatgatcccaagagcgccaggtctatt

SEQ ID NO: 55843 - DNA, 250 bp, Zea mays
  Clone ID: MRT4577_150923C.1
cccttgtaaaaagacagtacaaacaaggggaattgataacaacattcacagcttgaatatctattccccttgtaaaaagatcagtacaaacaagattcctgcacgctccattacaaggggaatagatattcaagctgtgaatgatgttatcaattttcatttccccaacaactcttattgggggggggggggcggtgttagacctgtgagatttggccacgcttatgtgtggccgttcatgatgatcacc

SEQ ID NO: 55844 - DNA, 447 bp, Zea mays
  Clone ID: MRT4577_150924C.1
atggatcaatggttcaacttcgaccacccctgcaagtacctgctcctcattgatccagtgatccgagagaaccgggtgaagaaagtactagtggatgggggaagtagcattaacgttaccttccctcggacgctcctagccttgggggtcgcacttaaagacctcaccgagtcagatactcccttcttcggtatcatgcctactgaaggggagtacccactcgggcacatctacatgcctgtcaccttcgggacttcggagaactacagaaccgagttcctgaggttcgaggtggcacgcttcgactgcggatacaacaccatcatcggccgatcgggactggcaaagttcatggccattccgcattactcgtacatgatattgaagatgccgggacctcaaagaatcatcattgtgcgtgctgacttccaaggcgctgcggagtga

SEQ ID NO: 55845 - DNA, 633 bp, Zea mays
  unsure (1)..(633): unsure at all n locations
  Clone ID: MRT4577_150925C.1
tccgcgcaccacggggcgggctnagtcgccactcccgcaggaagatcgggacccggcgcctggcggggctctggtgttgttctagcgcggggactactaactctgggggcagatgtggagttgcccgtccagtattcgtccatggaggtccgaacgaggttaccgcaagaccgaccccgccccacccattcatccttccgaagcgcccaccccggaggccaggtctctagctacccgcgatactgtaatcccagtaggaacaacgcgaccctgtgttgtactccagtacacgacgggcgaacgagaaactcgccgctacagcgaagagggtcgagggggtgggcgaacacaagatcgactacggaagtacaaccagaactactacacacattacaacgctcggtaactgtactccttaccctcgataatcttactccccgctacagactttcaggtgagtcgaggaggattccttatgggaggtcaccagttagttagctcggactgctgacactacaataaacattgaggaactgaacatggaggactacgcgagggatctgaagacagctaacgggttcctagttcagttcaatagtttatagttaatgctccagtgctcctgctgtgtag

SEQ ID NO: 55846 - DNA, 286 bp, Zea mays
  Clone ID: MRT4577_150926C.1
tcgcggacgcgtgggcggacgcgtgggcaaaggacctgagtgtgctgtggactggcgcaccgaactgtccggtgtgccaccggacagtgttcggtgcaccatgcccggacaaattcgaagcagccactctcgggaattcaacgacgccctacggtataattaaccggactgtccggtgtgccatcggagccacggctaactcgtgccaacggtcgactctgacgggtgaacagtggttccacagaagtcacagcacaaagttaaagggtaccggattggccggtgc

SEQ ID NO: 55847 - DNA, 192 bp, Zea mays
  Clone ID: MRT4577_150927C.1
ggaacaatactttttttttttcaatccaaaacttcatacaaaggattgcttacactgacactggggcccatgtttatccactacacattattactcaatcatagccgataaatgactcaactacctagctagccagcgactatactacaccacatattttcttcattcccgtacaccaacaccaccaacctt

SEQ ID NO: 55848 - DNA, 501 bp, Zea mays
  unsure (1)..(501): unsure at all n locations
  Clone ID: MRT4577_150928C.1
ccggccgggacccgaacgcaaatccaaatatattagcgcttcagactaccctagactacgtcgtcaccatagatgatcgagggcgccttcctgggccccggccctgtgacctatgtcgatacgactccgtgcgagcaaggagcagggtaatagtaacgcgccgacgatgatgattattgattacaaacctgtatttatctaacataacgccagagtagatggagagctagccagactgcactgagcacctgtatgatatggcaatccgccgtcgtgcgccaaggatcaggcttgatcatcgcaacggagtaaatatgggatattgactacagtgagctcttgcgacaataaggaatgttacgtacctgaagtacattcacactgagcatgaggagtaactacgattatgagtgtgcaagatagataaaggaggattaaggtacagccttaattgngatgatattcgatatgaacctaaagacgatgatagcgaacccaatg

SEQ ID NO: 55849 - DNA, 371 bp, Zea mays
  Clone ID: MRT4577_150929C.1
cgtgcactctcttattaaatgagcaccgctaaagacatcacagactactcttgaccaaacacatcaacacataccaccacctgtacaacggcaccacgtaatttggcaccgggagatgggactgcctagccggcgaaaccgtgtagggtgcgggcctggcgcttgggcgcgtatacaacgtccactggcggtgacagtcttgcggcgggcgtgctcggcgtatgtgactgcgtcaagaatgacgttctcgaagaagatcttgagcacgccgagggtctcctcttatattagcccggatatgcagcttgacgccgtccctcctcgccaacctgctgatcgacgtcttggtgatgccctggatgctgtcacgc

SEQ ID NO: 55850 - DNA, 345 bp, Zea mays
  Clone ID: MRT4577_15092C.1
gtaaatttgagaccttgttattgatacttacgaagtttgttatattaatgcacagtaaattgaaactagattagaatttaaataattaagtgttataataaacgagatatttttttaataaaatattattacaaatataattaaaaattcatttatttgtaaaaatatcagaaacacaaattgattcatctattttctagagtctagtacataaacaaaactttttttaaagtgttgatcttttatgtcataataagtattggatgctgttctcgcactagaccaggtttgaaagttctacggattttatcgtgttactacatccttaatttcttactaggtgag

SEQ ID NO: 55851 - DNA, 575 bp, Zea mays
  Clone ID: MRT4577_150930C.1
gagaccagagcgacatcgcgtagagcgcgccgatggggacgacggaggaggtgtagaactgcggcgtcatggagggcgacatggggcgtgacggcggtggcggagtcgccggcggcatgtctgactcggtgctccggaaggtgctcctctcctacttctacgtggcggtgtggatcctcctctccttctccgtcatcgtctacaacaagtacattctcgacccgaagatgtacaactggacccttccccatctcgctcaccatgctgaacatgggtttctgcttatccctcgtcgtcccgcttggtgcgcgtgcttttacctactggcactgcctctgtccagcatgatgagcccgatgcctgtgctcagaagatatgacgctctgctctctgctctaattcttagctcaggctgaagtcgctttgctgcttgaatgatcgcacgtcgaattgcgatccctgcatattctatggctgtctggcttattcgctagctagactttttctgtttatacacgctctgtgagcaactgctctcggatactttgcctttcaaatctgctgctggctatttt

SEQ ID NO: 55852 - DNA, 285 bp, Zea mays
  Clone ID: MRT4577_150931C.1
tttccgactcagacctacccgtccgctgacccattaaggttccatgtcggattccttcacactactatggtgcttcaccgagcgatgggattgatcaagtggctacaggtgaatatgcacagcctgctctagagatacatcatctgctgctattcaatgtctgaaatgctcttgtctgccctaggcatcgtcatctagacaaggaaacagtctaccgtaatatcatacaccgtaatacatatgttatgaagttacagcgtactgatactgaagatccattaaatg

SEQ ID NO: 55853 - DNA, 266 bp, Zea mays
  unsure (1)..(266): unsure at all n locations
  Clone ID: MRT4577_150932C.1
cgccgcgtgcgagccaagcagaccacagcgagaggcgtagtcgtcgccggaggggaangcgcggacaagatgtcgtggcaatcgtacgtcgatgagcacctgagntgcgagagcgagggacaacatctcagcgccnccgccatcgtcggtcacgacggcagcgcttggagccantccgagagcttccccgagttaaagcctgaggaggttgctggtatcataaaggactttgatnaacctggtactcttgcaccaactggtctttt

SEQ ID NO: 55854 - DNA, 407 bp, Zea mays
  unsure (1)..(407): unsure at all n locations
  Clone ID: MRT4577_150933C.1
ttttcttcctcacttccgctcctccacccccttggggtaatgaagaggaggggggggggatgtcncaccctaagttcgagcaccctaggcacggctccctcggcttccttcccaggaagcgctcctcccgccaccgcggcaattttaagtcattccccaaggatgaccccaagaagccttgccatctcactgccttccttggctacaaggctggcatgactcacattgtccgtgaggttgagaatccaggatccaaactccataataaggaaacttgtgaggctgtggccgatattttaacccctcctcttgtcattgttgtgctcgtggcatattttaatacttctctatgtctccgcacactcaactttgttttgtcccaacatcttatctaataaattagttca

SEQ ID NO: 55855 - DNA, 197 bp, Zea mays
  Clone ID: MRT4577_150934C.1
ttttggtgttatttcgaaggacccatggctttccgttaacagaaggccaagcttacttcgggtcactggcacgaagctcacatatgtaaacaggtctacccagacttacagacagctgcccagaatatacatatatttacgttaacaccaggcactaaacccacatctatacatattcatctccaactccgtttact

SEQ ID NO: 55856 - DNA, 198 bp, Zea mays
  Clone ID: MRT4577_150935C.1
cccacgcgtccgctctcgggctatcacaacctgcaggcgcagctttacctgctggagggctctcgcaggatgaggagcacggttgagccccggggaagggaccgggccctggcgaacaaggccaccaacttggtgggggaggaccacatggagccgacgatatggtaccggagggagaacaagggcctggcgcggacg

SEQ ID NO: 55857 - DNA, 849 bp, Zea mays
  Clone ID: MRT4577_150936C.1
gggaacctcgaggccggccgggccggcagtgcacgagacacccaataaacacacacacacaagcgaggagcactacctgttggttggattctcttcagtctagctactcgatcggtcccttgtccacagttaagtttcagacacatggggagcattggcagaggcacggccaactgcgccaccgtgccgcagccgccgccgtcgacagggaagctcatcacgatcctgagcatcgatggcggcggcatccgcggccttatcccggcgaccatcattgcgtacctcgaggccaagctccaggagctggacggcccggacgctcggatcgccgactacttcgatgtgattgccgggacgagcaccggcgccctgctcgcgtcgatgctggcggcgccggacgagaacaaccggccgctgttcgccgccaaggacctcaccacgttctacctcgagaacggcccaaagatcttcccacagaaaaaggctgggttgctgacgccgctgaggaacctgctgggcctggtgcggggccccaagtacgacggtgtgttcctgcacgacaagatcaagagcctgacgcacgacgtcagggtggcggacacggtgaccaacgtcatcgtgccggcgttcgacgtcaagtacctgcagcccatcatcttctcgacgtacgaggccaagaccgacaccctcaagaacgcgcacctctccgacatctgcatcagcacgtcggcggcgcccacctacttctcggcgcacttcttcaagaccgaggccaccgacggccggcccccccgcgagtacacctcgtggacggcggcgtcgcggccaacaaccccacatggtcgccat

SEQ ID NO: 55858 - DNA, 481 bp, Zea mays
  Clone ID: MRT4577_150937C.1
gcgcgggtgggggtggtttttttttttttttttttttttttttttttttttttttttttttttttttttttttttttttttttccggggtaccctttaaatggtgaagacctggggggtcccagggggcccaaaaaatcccaaacccccccaaatgggggggggggatagcaggggtttccccatcaacctcgccccttgtaaaaggggaaacctttccattgacaaattcaaggggtaaacaggtttgtgtcccggcgagccccctcaaatgaagcattttgggggaagcaaggccccccccccaaaggggtcctgggcctcaatccttgcggtgaccccccccttttgggccccctttggggggtcccccttgggccccccggtgggccccctggtttagccccttttcctttcaaacttgggaacatcccggcgccgggggagcccaagggcctttaggttggagggggggtcaaggc

SEQ ID NO: 55859 - DNA, 839 bp, Zea mays
  Clone ID: MRT4577_150938C.1
cagtgggctccccgcgcgtcgggggacgagtggcaagaaacacaactgcaaaagcgaggatcggagcactccgatccttaattccttcttggattctcttctactctagagctctgctagaccgatctccagttaagtttcagacacatggagagcaacgcctcgtccaactgcgccaccgtgccgcagccgccgccgtcgacagggaagctgatcacgattctgagcatcgatggtggcggcatccgcggcctcatcccagccaccatcatcgcgcacctcgaggccaagctgcaggagctggacggcccagatgctcggatcgccgactacttcgacgtgatcgccgggacgagcaccggcgcccttctcacgtcgatgctggcggcgccggaccagaacaaccggccgctgttcttcgcaaaggacctcaacacgttctacctcgagaacgggcccaagatcttccctcagaaaaaggccgggttcctgacgccggtggcgaacctgctgggcctggtgaggggtcccaagtacgacggcgtgttcctgcacgacaagatcaagagcctgacgcacgacgtgagggtggcggacacggtgaccaacgtcatcgtgccggcgttcgacgtcaagtacctgcagcccatcatcttctccacgtacgaggccaagaacgacaccctcaagaacgcgcacctctccgacatctgcatcagcacgtcggcggcgcccacctacttcccggcacacttcttcaagacggaggccaccgacggcaggtcccgcgagttccacctcgtcgacggcggcgtcgcggccaacaacccaacatggtc

SEQ ID NO: 55860 - DNA, 400 bp, Zea mays
  Clone ID: MRT4577_150939C.1
gaaaggaaggaccgggacgacccacgcagacggaagaaatagtcaggagcctttgtgttttttttactgaaactacagatgcggccgttccatttacaagtagtggcaaacattgctgattactcgcaacaacaacaattgctgacattttacccaaatgttgtgggaaacattaacgcctttttgcaacatcaacagaagctgccattctacccacaggatgtggtaaacaatgtcgtctttttacaacaacaacaattgctcgcatttagcctaactagcttttgactaatcctaccaccttataacagcagtccaccattggtggagctcatttatagatttgtttatgcttaatactgttataataatattattattactgatatgtgcaactttt

SEQ ID NO: 55861 - DNA, 249 bp, Zea mays
  Clone ID: MRT4577_15093C.1
acgccgatcgtcgcacctcgcaactacccagtcgagagactatcaaaccagatcaaaccgcgctcctatatcttctgcgggggcgctgagatcacataacaagggaagtgtctgctggagcacatggtaaggcccattttcacccagggagaggcctccctgtcaccggagtgtttggctaaccgcctcatgggttatgtgcatgcctgggacaccacaggtgatgtactggccacactacaatctgga

SEQ ID NO: 55862 - DNA, 1318 bp, Zea mays
  unsure (1)..(1318): unsure at all n locations
  Clone ID: MRT4577_150940C.1
ccacgcgtccggagacacccaagaaacacacagaagcgaggagcactacttgttggttggattctcttcagtctagcagctagtccagttaagtttcagacacacatggggagcattggcagaggcacggccaactgcgccaccgtgccgcagccgccgccgtcgacagggaagctcatcacgatcctgagcatcgatggcggcggcatccgcggccttatcccggcgaccatcattgcgtacctcgaggccaagctccaggagctggacggcccggacgctcggatcgccgactacttcgatgtgattgccgggacgagcaccggcgccctgctcgcgtcgatgctggcggcgccggacgagaacaaccggccgctgttcgccgccaaggacctcaccacgttctacctcgagaacggcccaaagatcttcccacagaaaaagtaatataaatatacatatacacgccgtgttacgctcatccatccatctctgttcttctttcgtttggtgcgcggtgatctgttctactacgtacctcagcgccgcttccatctatcgatcctactcctacctaatggtgctgctgcactcactgcatatgcagggctgggttgctgacgccgctgaggaacctgctgggcctggtgcggggccccaagtacgacggcgtgttcctgcacgacaagatcaagagcctgacgcacgacgtcagggtggcggacacggtgaccaacgtcatcgtgccggcgttcgacgtcaagtacctgcagcccatcatcttctcgacgtacgaggccaagaccgacgccctcaagaacgcgcacctctccgacatctgcatcagcacgtcggcggcgcccacctacttcccggcgcacttcttcaagaccgaggccaccgacggccggcccccccgcgagtaccacctcgtggacggcggcgtcgcggccaacaaccccaccatggtcgccatgtccatgctcaccaaggaggtgcaccgccgcaaccccaacttcaacgccggcagccccaccgagtacaccaactacctcatcatctccgtcggcaccgggtcggccaagcaggcggagaagtacaccgcggagcagtgcgcgaagtggggcctcatccagtggctctacaacggcggcttcacgcctatcatcgacatcttctcgcatgccagttccgacatggttgacatccatgcgtcgatcctctttcaggccctgcactgcgagaagaagtaccttcgcatccagttgtactatgcaggatgatactttgactgngaacgcatcgtccgtggacatcg

SEQ ID NO: 55863 - DNA, 1725 bp, Zea mays
  Clone ID: MRT4577_150941C.1
cgtgcatcgtcttcgtcgccagccccccacgagacacacagaagcgaggagcactacttgttggttggattctcttcagtctagcagctagtccagttaagtttcagacacacattgggagcagagacacccaagaaacacacagaagcgaggagcactacttgttggttggattctcttcagtctagcagctagtccagttaagtttcagacacacatggggagcattggcagaggcacggccaactgcgccaccgtgccgcagccgccgccgtcgacagggaagctcatcacgatcctgagcatcgatggcggcggcatccgcggccttatcccggcgaccatcattgcgtacctcgaggccaagctccaggagctggacggcccggacgctcggatcgccgactacttcgacgtgattgccgggacgagcaccggcgccctgctcgcgtcgatgctggcggcgccggacgagaacaaccggccgctgttcgccgccaaggacctcaccacgttctacctcgagaacggcccaaagatcttcccacagaaaaaggctgggttgctgacgccgctgaggaacctgctgggcctggtgcggggccccaagtacgacggcgtgttcctgcacgacaagatcaagagcctggacgcacgacgtcagggtggcggacacggtgaccaacgtcatcgtgccgggcgttcgacgtcaagtacctgcagcccatcatcttctcgacgtacgaggccaagaccgacaccctcaagaacgcgcacctctccgacatctgcatcagcacgtcggcggcgcccacctacttcccggcgcacttcttcaagaccgaggccaccgacggccggcccccccgcgagtaccacctcgtggacggcggcgtcgcggccaacaaccccaccatggtcgccatgtccatgctcaccaaggaggtgcaccgccgcaaccccaacttcaacgccggcagccccaccgagtacaccaactacctcatcatctccgtcggcaccgggtcggcaaagcaggcggagaagtacaccgcggagcagtgcgcgaagtggggcctcatccagtggctctacaacggcggcttcacgccgatcatcgacatcttctcgcatgccagttccgacatggttgacatccatgcgtcgatcctctttcaggccctgcactgcgagaagaagtaccttcgcatccaggatgatactttgactgggaacgcatcgtccgtggacatcgccaccaaggagaacatggagtctctgatatcgatcggccaggagctgctcaagaagccagtggcgagagtgaacatcgacacagggctgtacgagtcctgcgacggtgagggcacaaatgcacagtcgctagctgacttcgccaagcaactctctgacgagcgcaagctacgcaagagcaatctcaactccaactaataaatacctctctcagtcacagcatgtgctctttctgcagattcaccgtttcttatttttaatttcaatttcaattcagtgtgtgtgtgcgtgtgtgtgtgactgtgtgtgtaccaataaacatttaagttcaatcatttgcttgtctatgatcaaaagaaccatttccttctgatgcgcacggttgatttgcctataataatctgtgtgatgcaagcaccctactttcggattgtatcttgcgatcgggaaaaaaaaaaaaaaaaagcggcc

SEQ ID NO: 55864 - DNA, 234 bp, Zea mays
  Clone ID: MRT4577_150942C.1
cacgcctataatgattgtgctacggacaaaactggactttgaacaacgacaacatgcttttcaaaaactagtgttggaggccttcatgtgcaatttgtttctgattctttgtggtttgtctatctcaagggcttgggttcctgttgaggcgtgtctaccccttagaacactcttaacaatagagtcaacttgttagctcatataaacttaaaaaagataaaaatagagtaacac

SEQ ID NO: 55865 - DNA, 590 bp, Zea mays
  Clone ID: MRT4577_150943C.1
attaccatttattctctgtctgtctagggagaagtaccgtagcaaattgtcatggaaaccaaaactaaaccaaaatatagacgactgacggtaattccttccaatccaaacctctcggaaacggacattgtggcatgcattgatgcgagtcccctcttgttgccatgtgtgatggccagatcacattgaagatacccaggctgacccagccagccagggccacggatttcttgtcacttctctcaccatggattgcgatggacggaccatcaagaagtccatgtctctctcatggactggcttggcttgggtagctctaccctcctcccatggatctgccgtgcaatgcagttacccaaaaggaccctttggccccttgcctttatttgttgctgtttggctttggcaggctggacgtacatgcacgcctcatgcttcaccttaaagttagattagactaggacatcaccttcttgctcctcctctggttctagatataaacacaccatcgtcatggttcatagttcttaatctggcacaatttgacgaataacattttcattcaaatggaaacatattgcaaaattatc

SEQ ID NO: 55866 - DNA, 840 bp, Zea mays
  Clone ID: MRT4577_150944C.1
cgcgttcagcgcaaggctcacttcgatgcccccgcgcacatccgaagaaagatcatgtcggcttcgctcaacaaggagctccgcgctgagcatggcatccgatcgctgccggtccgcaaggatgacgaggttctgatcgtccgtggctcgtccaagggcgctgagggcaaggttacccaggtctaccgcaagaagtgggtgatcaacattgagcgcatccaccgtgagaagaccaacggcgccactgttccgcttggcatccacccttccaacgttgtgatcaccagcctcaagctcgacgaggaccgcaagaagatcattgcccgcaagtctggttccaagaaggaggctgctgagaccaaggacaactaagcgcttcggcacgttggttttcctgtgaggtgattgtcagtctatccgttcttgtttcgtttgtcgcggcattcgtgattcttgtttcctccctacaccacccatcgatgctgaaggagacgtagagtcgagctctgcttggctttacgcttgtcgctcagcaacgatgcaaaacatgcttccctcggcgatccaccttgtacaacttttttcccgatcatcgcagcattttcttctcgctttaagccgagggaaggcgggtgttttgtgttcgaccacaaagacccgactcgggcgtgcaaccaggcgtggcaaggaggcagttgctaatctggctgctgcgactgcctacttgcgcttgttctactcccatccagaacatttcccgccgttggtggagatgtgtttcttgattcatatacaaccctagccagccacccaaaatatcaaacacaccagtgattctat

SEQ ID NO: 55867 - DNA, 304 bp, Zea mays
  Clone ID: MRT4577_150945C.1
acccacgcgtccgcggacgcgtggggtcgtcctcggagagaatgactacaccacttcacttcacctaataatactcgatctttgccaccagacttcttctgtggtacaagcatctatcatcaatccctttcgcatacaacatacgcagccatggccggaccaggcgcatcccgaggctacatcattaccctattgacgggctcaatcctcgccggatggatatccgtctccttcttcggcggaatgccaccatggacccctcgctctcaggatcctgctctttctcaggccctacctgaaaccc

SEQ ID NO: 55868 - DNA, 354 bp, Zea mays
  Clone ID: MRT4577_150946C.1
gaatacattgtggggtacccccccagtccgaaacctttattgtcaacctaaagaaccacgcctttgtgatacaaaggactattgtccgatgtttcagattcccacgctgctatgtatttgctaacacaacctattccccggtttttgtgcccttccttaggggattactggttctgagacatgctccaactgggccaacaaaaactcggctggtgctggaaccgcctccggtaggtctcatgcataaacaactaccggatggtgcttaacaagccggggtggacaacctgcttacttgggagctttacggtggttattcatattgtggaacaggcgcaacaagcatgttacatt

SEQ ID NO: 55869 - DNA, 480 bp, Zea mays
  Clone ID: MRT4577_150947C.1
ggtttatgactcaactgaaaaaggctttaggagaatgtcctttacttgctatttgcacagatgcttgtaaaggtcttgagattgctgttgggcaagtgtttccacaagctgaacaaagggaatgttttagacatctaatgcagaattttataaagagatatagtggtgaaagtggtggacatatgtggcctgctgcaagagcatatgacaaagaagcttatgagaaacatttggatattatttataggggtattcctgatgctaagttgtggtttgtggtatgggataattgtaaccatcggtttgtggtgaaggcacaattgcatgagtgttcatgtcttgagtggcagcacactgggaagccatgtcaacatgctttggccttgataacagctcaaaaggctagagatgtcaaaatggaagactctgtacatgaatattactctgtgcagaagtttaaaaatgcatatgcaagaatga

SEQ ID NO: 55870 - DNA, 456 bp, Zea mays
  Clone ID: MRT4577_150948C.1
attcggctcgagctctacttagcaaatcaaaatggcactttcttcttcatcttcaacatccatatttgctttagctttgttcactactcttttgcttataggaagttcttcagctcaactctctgagaacttctatgatagtaaatgtcccaaggttttctatgccgtaaaatccgttcttcaatctgctttggctaaagaacctcgccagggagcatctatcgttcgcctcttctttcatgactgctttgtcaatggttgtgatggatcagtgttacttgatggcccttcctcggagaagattgcacttcccaacaagaactctttgagaggttatgaagtcattgatgccatcaagtctaaggtggaggcactatgccctggagtggtgtcatgtgctgatatcgttaccattgctgctcgtgactcttgtgcaattcttggagggccaaattg

SEQ ID NO: 55871 - DNA, 777 bp, Zea mays
  Clone ID: MRT4577_150949C.1
ctggccgggactatctcatccgctgctgggagcttgcaatcttccggaacgtttttttggtgctagccgagagagaatcgagaggaagagagagagaaaaccatgcgctgtagcctgcttgtgaagccacaaggcctcggctggtcgctcaggagggatctcaccggtgggcgctagaaggttggacaaccgatgtcgcggggtgtgaagctcgccggacttgggatctctgcgcggtcacctgtgctcggctgagccgtggtctggagcgaccacatggcgaggggactggacatcggagtttagagcgtcgccgtgatccaagcgccacggtcggtcaactctgctccggtcgacgcgaggttacgagtcacctgaagatcatcctggtatacctggaatctcaagtcccaggtgaaactggaagaacgtatgaagctagacttgttgcaatttatagacatgtaagagagaacggagttgagggacaacctatttctgtttcaacagaacaatttgtaaactttgaatggcaaccagttatctagatctttgcctgatgcgattggttacctgatgaactttaacagattacaaataaaagataacaacatatcaggcccatacctaactctgttgccaacttaacaagaattaaacatctgtaagtgtcgagtatctttattttctgcccatcctgatgcttctgatttgtaaaattagtaaataattatggttccaattttaccttttagtcacatgaatattaactcatta

SEQ ID NO: 55872 - DNA, 336 bp, Zea mays
  Clone ID: MRT4577_15094C.1
gccggccgggtccggacgtaaagcattcttagagcaagataaattgattccacaggtccttgccgatttagcagaagttcatttaaatgaagccaacttagttttgggcgaagaaaaacaaaacaaagtatatgaacaagcaattaacgccatcaaggaagctcaaaaattgattgatgaaaagaaactcgactatgagttacctgaaggcttggttgcattcttggctgaatatgaagaggagcaataaggaggggtgtatgtagtcaacgttaaaaataaaaattgatataaatttgtgttcacttcgaaaaaaaaaaaaaaaaaaggccccta

SEQ ID NO: 55873 - DNA, 147 bp, Zea mays
  Clone ID: MRT4577_150950C.1
tggctttcactcccggtttggcaaaacgttctcacaggcctccttagtggccataccaagacctgtgccaaaactccccttgtagaaactttccaggataaactgtcggaaacttggtaccctgccccggggccggcccgcttcgaa

SEQ ID NO: 55874 - DNA, 254 bp, Zea mays
  Clone ID: MRT4577_150951C.1
accggttcggattcccggctggaacacaccgtccagaaacgaacacacattacttcacacactcataccacatggccgggctaattctcgacgacctatacatagacccacctgcaaactctattgcactcgcactatacaatcaattatacattcatctcaatcagataccaactgcctttatccactcttgagccaatctaagactctcattagcagcatgtcatagactacgacacttcacatcacaacta

SEQ ID NO: 55875 - DNA, 234 bp, Zea mays
  Clone ID: MRT4577_150952C.1
tcggaaatgtgacccgggccacactccgctgctgcgacatggcgatccgctacaaggcctgaatctcgctgctgctcgcgctgaccgtcgctctctccgtccgggcggaggaggagcccgccgccgcggctgacggcgaggcacagctcaccctccacgtgcacagcttcgacaaggccgtcggcaagcaccgctacatggacgacgagtactacgccccctggagtgcgcact

SEQ ID NO: 55876 - DNA, 369 bp, Zea mays
  Clone ID: MRT4577_150953C.1
ctggacctgtctctgcactgaaactctgctcgttctttgcctctgatcccgatgggcatcggccgtcggtccgtgaaccgaatcagctgggcaacccggtgctggagttcgcgacggacttcaactcccgcgccgagtacttctggtcgcacggcctcatctccgacgccacgttccgcgccagggtgatgaaccgggtgacgcgcgagaccagccgcttcgtcgacaagtacgacgtcacgctcgacgtctgcctctcgtccgtgctctcccagtccaagaccctctcgccgcacgagcagggtcggcagcgggtcgacgtgtgcgtggaggacgagacggtgaggtacctcaaccggcgggacgtgc

SEQ ID NO: 55877 - DNA, 872 bp, Zea mays
  Clone ID: MRT4577_150954C.1
ggatcttaacctcaaagcgtcgccctgggcaacccggtgctggagttcgcgacggacttcaactcccgcgccgagtacttctggtcgcacggcctcatctccgacgccacgttccgcgccttcacctccgcctgcaactactctcgccgcacgagcaggtcgggcagcgggtcgacgtgtgcgtggaggacgagacggtgaggtacctcaaccggcgggacgtgcaggcggcgctgcacgcgaggctcgtcggcgtcgacaagtgggcggtctgcagcagcgttctccagtacgagctgctcaacctgcagatcccgaccatcaacgtcgtcggatcgctcgtgagatccggcatccgagtgctagtttacagcggcgaccaggactcggtgatccctctgacgggcagccggacgctggtgcagaacctggcgcgcgacatggggctcaagaccaccaccccgtaccgggtgtggttcgaagggcagcaggtcggaggatggacgcaggtgtacggaggcggcgcgctgtccttcgccaccatcaggggcgcctcccacgaggcgcccttctcgcagcccgggcgctcgctcgtgctcttcagggcgttcctgcagggccagcctctgcctgaaaccttctcgtgatcagggtgcccgatgcagctccttctgcaggtggggtggggggttttgcactgtagtaatctgtaagaaggtgtttggtttggtttggcgccgcggtaggagtaggagtaggagcgagcgagcggccggcgctgttcgaggtctgtgctccgtgtttctacagcgtccgtccatggctcggcaattgcctaaagaagcggaaaggatttgtccctcgtttcgtat

SEQ ID NO: 55878 - DNA, 2087 bp, Zea mays
  Clone ID: MRT4577_150955C.1
tgaattcggcacgaggcctccctccctccctcatcctcccactgaatcattcatcttttgaaaatagttttgtgctctcaaggcaaaagagcacacttgactcttgctcgcctctctcactcactctctcactcaagctccagtcacacactctctctagctctctgccactccgtccattgggctggactggactggaggcatggccattccattgctagctccagcgcgctccaacggcagcaggccgctggcgctggcgctggggctcgtcgccgcggccgcgctgtgccgtccgggtgcttgcgacgacggagccgccgccgccgaggacaggatcaggcggctcccgggggagccggaggtgagcttcgcccagtactcgggctacgtcggcgtggacagcggcggcggcggcggcaagcgcgccctgttctactacttcgtggaggccgatgtcctggaccctgcctccaagcctctcgtcctctggctcaacggcgggcctgggtgctcgtccctgggcgtaggggccttctcagagaacgggccgttcaggcctagtggccaggtgctggtcaagaacgaatacagctggaacaaagaggccaatgtgatatacctggagacgccggctggtgttggctactcctactctgctgatgctgcttactaccagggcgtggatgacaagatgacagccatggacaacatggtgttcctgcaaaggtggctccaaaagttcccacagtacaggggcagagacctctacatcgctggagagagctacgcagggcactacatcccgcagctcgcggaggccatggtggagttcaacaagaaggacaggatcttcaacctcagaggcgtcgccctgggcaacccggtgctggagttcgcgacggacttcaacgcccgcgccgagtacttctggtcgcacggcctcatctccgacgccacctaccgcgtgttcacctccgcctgcaactactcccgctacgtcaccgagtactacggcggctcgctgtcgccgctgtgcgcccgggtgatgaaccaggtgacgcgcgagaccagccgcttcgtcgacaagtacgacgtcacgctcgacgtctgcctctcgtcggtgctctcccagtccaagatcctctcgccgcacgagcaggtcgggcagcggatcgacgtgtgcgtggaggacgagacggtgaggtacctcaaccgccgggacgtgcaggcggcgctgcacgcgaggctcgtcggcgtcgacaagtgggcggtctgcagcagcgttctcgagtacgagctgctcaacctgcagatcccgaccatcaacgtcgtcggatcgctcgtgaaatcgggcatccgagttctcgtttacagcatgcagcggcgaccaggactcggtgatccctctgacgggcagccggacgctggtgcagaacctggcgcgcgacatgggcctcaagaccaccaccccgtaccgggtgtggttcgaagggcagcaggtcggaggatggacgcaggtgtacggaggcggcgcgctgtccttcgccaccatcaggggcgcctcccacgaggcgcccttctcgcagcccgggcgctcgctcgttctcttcagggcgttcctgcagggccagcctctgcctgaaaccttctcgtgatcagggtgcccgatgcagcttcttctgcaggtggggttgggccggggttttgcactgtagtaatatgtaagaaggtgtttggtgtgtctgcctcctgctagctgatgatactagtggtttggtttggcgccgcggtaggaccgtaggagcgagcgagcggccggcgctgttcgaggtctgtgctccgtgtttctacagcgtccgtccatggctcggcaattgcctaaagaagcggaaaggatttgtctctggtttcgtataaaaaaaaaaaaaaaaaacccgggatgtgagtagatatgcaaaacactgcatattcatcgtcgttcgttcgtggacacgcagagagtggaaaagcaaaggatacaagggtgacgtttggttcacgatgttataccgtgtttgtttaggaccaaaaaaaaaaataaataa

SEQ ID NO: 55879 - DNA, 1793 bp, Zea mays
  Clone ID: MRT4577_150956C.1
ccacgcgtccgcccacgcgtccgcaacattgtgcagtgtaaattctagtagcaatattgcttcctctaatagtcaatcacatgggtacagtccaattgctgccaaaggtcacaaagattcagtttacgcattggctatgaatgatacaggaacccttcttctctctggtggcactgaaaaggttgtccgggtgtgggatccgaggacaggatcgaaaaacatgaaattgagagggcacactgacaatatcagagccttgcttgttgattctacagggaggtattgcctatcgggatcatctgattcaatgataagactatgggatctaggacagcagcgttgtgttcattcttatgctgtgcatactgattctgtttgggcacttgcaagcactcctgcatttggtcatgtctacagtggtggaagagaccaatctgtatacctaacagatttgtccacaagagagagtcttttactctgcacaaatgaataccctattctacagttgtctctgcaagatgacacaatatgggtggcaacaactgattcttctgtatatggatggccagctgaagggcgcacaccccaaaaagttttcgaaaagggtggctcattcttagctgggaatttgtcattctcaagggcaagagcatctttagaaggatcagcacctgtccctgtatacaaagagccatcttttgtcgtcccaggggttccagcaatagttcaacatgaaataatgaataatagaaggcatgtactgacaaaggataccactggttcagtcaaattgtgggagatcacccggggtgctgttattgaagactttggcaaggtttcatttgaggataagaaaaaggagttgtttgagatggtaagcatacctgcttggttcaccatggatgctcgattaggatgcttgtctgtccacctggatactccacaatgcttttctgcagaaatatatgcagttgatctaaatgtttctggagcacaagaagatctcaagattaatttggctcatgatacccgtggttgctaactatgtggttgagaaactcgttcttgacaaaccattggatggaggctctgatagtacgtttgttatgggattgagttctgctcaatcacagctctcacagctagatagttcttcgcggcttggactaaagccatggcaaaaaacaaagccatgtattgaggtattgtgcaataaccaggttctatccccagatatgagtttggctacagtgcgaacatatatatggaagaagccggaagatttgattcttcattatagagtggtccaatcgagatgatcacggcttcagatgtacatgctcacatggttctccagatatgtcccagcatgtccgcacctttagatggtgtggttgaagatgcctttggcttagagaggaagcatcatcttcacagaggaaatattttgctcttgctccgccctccccccggtagctgttcccagaatcgacttgttcgcttctctgtaaagttcctgaccttgccctggtagtaagatgtatcatagcacaggtataaggctctctgctggctgccgagcttgtaaatgtagaagattaggtgcttaataaaagatcgaaaggatatgtttttctttcgtttttctttgacagcatttgtaagaaaaaaaaagaggctgacgctcggcccagatcgtggcgctccgacgtcgattattggatttaaccccgccgaaaaaaaaaaaaaaaaaaaaaaaaaaaaaaaaaaaaaaaaaaaactcgagggagggc

SEQ ID NO: 55880 - DNA, 234 bp, Zea mays
  Clone ID: MRT4577_150957C.1
catgacgaaggcgcctggaagctgtgacatgctagtttgccgcgcacggttgctatggaagcaaggtctggacttgaagatcttgaatacagtaggcgcatgtatcgggggtcgtagctttgtccagagtatctgcgctaacacaaatgagtcatgctgtttgtgaacctattatgatgcagccgtattagctggtaatatcgacctacctgtataggaacaaaaaataaaaag

SEQ ID NO: 55881 - DNA, 650 bp, Zea mays
  Clone ID: MRT4577_150958C.1
actaaagccatggcaaaaaacaaagccatgtattgaggtattgtgccataaccaggttctatcaccagatatgagtttggctacagtgcgaacatatatatggaagaagccggaagatttgattcttcattatagagtggtccaatcgagatgatcacggcttcagatgtacatgctcacatggttctccagatatgtcccagcatgtccgcacctttagatggtgtggttgaagatgcctttggcttagagaggaagcatcatcttcccaaaggaaatattttgctcttgctccgccctccccccggtagctgttcccaaaatcgacttgttcgcttctctgtaaagttcctgcccttgccctggtagtaagatgtatcatagcccaggtataaggctctttgctggctcccgagcttgtaaatgtaaaaaattaggtgcttaataaaagatcgaaaggatatgttttttcttaaaaaaaaaaaaaaaaacatttgtaaaaaaaaaaaaaagtctgacgctcggcccagatcgtggcgctccgacgtcgattattggatttaacccccccgatccccttggaggtgtttggttgagaccagggtaaaaggtggacgggaacccgggaacaataaagctgtttttgggcc

SEQ ID NO: 55882 - DNA, 569 bp, Zea mays
  unsure (1)..(569): unsure at all n locations
  Clone ID: MRT4577_150959C.1
attggcccagttggctttttccgctatcattggcgaggacaacaacatcttgaacgatcgcaaatatggccaagagcaagctagacccatttaaagaggatcgtgcagtcaagcacacgcacacaaagcagaatgcgcgctaaaaaacaacgacagaagataatgatccaaacgaatggaacaagcacgtgtgcaagaaggaaaacaaatggctgcacctcatcgctccataaggcataaaggatacccctacctgcaatcagcgtcagacgacatacaccattcaagtgcgaggattaccacctacaactacatgaccgactggaagcgtgtgatactcgtgaagtcggaccattattatatgctctggactggcagaccacactgaatctggtgcgacaccgacaacaccagcacgaacaaccgtgacaccctgtgtgaggtcgtcagggtcggcgacgacgcggacgccgtgtacgggctccggaacctnggcaacaaccacatctgccaccggttgacctaccacggcaaggagagctgcctgaacgccagcatacccagtgtta

SEQ ID NO: 55883 - DNA, 810 bp, Zea mays
  Clone ID: MRT4577_15095C.1
gtcaaccggaaccttctctcattctccacctgcggcctctgaggaagacatgcttcgtgcttctcaagctgtgcttccgtttgcaaactccatgatatcgacggcgcaagtgattttctctggtgaaccttcaatgactctcaaagtattgcctttacttctgttcggtgctaaatatgggggccttgttacagtgtggaggcttttagctgcaggatttttcatcagttttacagtcccaaagctatatagctgttattcaagtcgtattcataaaagagttgagattttgagagatcaggctctagaagcgtggaagtcttgcccacgcaaaaaacttgttgcagctattatagtaacaatgttctggaacatgttcagtgtgaagacacgcgtcatggcagcctttgtttcacttgtaatactgcgctataataagaaacaccacaaggcagcagaagttggaagttaccgagatgagcaggggcagacaatggagatggatagctaaaattttcagtactatgcggtcctaatgatgtagggttgtcagagtgcagccacaagtactgctactatttctgtacaataatattcagttagttccatgtctagtggtcctactagctaagatgtattttctgtacgttgcataagggagcctttgcaaacaatggagatggataaccaaagttttcagtactatgcagtcctaaatgatgtatgattcccagagtgcattcctaaatgatgtattattccacagtgctgctactatttctgtgcaataatattcatttagttctgtct

SEQ ID NO: 55884 - DNA, 770 bp, Zea mays
  Clone ID: MRT4577_150960C.1
ccggccgggggctggtcaaactccttagttattttagtatattctgccatatgctcgttgaaaaatgtcttctgtttaggttttcagtaaattatgccatatgctcgttaaaaaatatcttctattccagtataagctaatagttaatagagatagtcatggaactgtatttaaatgtaaataatatgcactatagaaatgtatctgcagtaagttatccttgtcttcaggaccttatgcttatttcatgctctttccctatcattctagatttatttatgtgcctgtattacaaaacaagttgctgcatagtctgtcttttgctgttgcactgaagtgtgtcctctgtggctcaggttctatcaccagatatgagtttggctacagtgcgaacatatatatggaagaagccggaagatttgattcttcattatagagtggtccaatcgagatgatcacggcttcagatgtacatgctcacatggttctccagatatgtcccagcatgtccgcacctttagatggtgtggttgaagatgcctttggcttagagaggaagcatcatcttcacagaggaaatattttgctcttgctccgccctccccccggtagctgttcccagaatcgacttgttcgcttctctgtaagttcctgaccttgccctggtagtaagatgtatcatagcacaggtataaagctctctgctggctgccgagcttgtaaatgtagaagataggtgcttaataaagatcgaaaagatatgtttttgc

SEQ ID NO: 55885 - DNA, 1926 bp, Zea mays
  unsure (1)..(1926): unsure at all n locations
  Clone ID: MRT4577_150961C.1
gtacgcgccggtacccatctctgctcgtgttttgtatggtcgttgatgagaattattgtatgatcctctgatgggacgtttgtgatgggattgatttctgcactcatctccttttgctctcactcttcgttagttcttcgaggcttcgactttagccatggcttaacataatgccgtagattcgggtcttgtgcaatgaccaggttctatcatcagggaggataccactggttcagtcaaattgtgggagatcactcggggtgctgttattgaagattttggcaaggtttctttcgaagacaagaaaaaggaattgtttgagatggtaagcatacctgcttggttcaccatggatgctcgattagggtgcttgtctgtccacctggatactccacagtgcttttctgcagaaatatatgcggttgacctaaatgttgctggagcacaagaagatctcaagattaatttggctcaagagactcttcgtggtttgctaattcattggagtaaaagaaagcagaaatctagttcacacagcttgtgtaatggtgatagttcaatagggaaagatgttccgtcgaaagactcgccccggtcaagacctgaggtcgacgatgccactcaaaaccatgcaactcatgtgcttccatcatttgagttttctacagtttcacctccatcaattatcacggaaggttctagtggagggccatggagaaagagaattaccgatttggatgtaactgagggtgatcttccatggtggtgtgtggactgcattactctcaatcgatatccaaaggagaatacaaaatgcgggttttatttacaccctgctgaaggctcgcctgcaccaaacataactcaagggaagcttagtgctccacggatattgcgaattcacaaggtagctaactatgtggttgagaaactcgttcttgacaaaccattggatggaggctctgatgcgtttgttatgggattgagttctgctcaatcacagctctcagttctagatagttcttcgcggcttggactaaagccatggcaaaaaacaaagccatgtattgagatattgtgcaataaccaggttctatcaccagagatgagtttggctactgtgcgaacatatatatggaaaaagccagaagatttgattcttcattacagagtggtccaaccgagatgatcacggcttcagatcacatggttctcagcatgcctgcaccataaacggtgtggttgaagacacccttggcttagcgaggaaaccgtcagaaatattttgctcttgggctccggtagcctttctcctagaatcccgacttcgtttgcttctttgtaaagttccttcctgatcttgccctggtagtaagatgtatcatagcacaggtataaggccctctgcttgtacatgtagaagatttgggtgcttaataaaggtcaaatggattttttttcgtttttctttgacaaagtttgtaagaaaacgggctggttctcggctcagaccgtgacgttccgacgtcgattattggatttaaccctgtcgcatcctcttggttctgttagcgtaagaggtggacgggatgtcgggagcaataaagctgtttttttatatgaaaaagaaaaaaaaaactattggtagcttaagggcggccactcgagaggatcttcacaaaggaaatattttgctcttgctccgccctccccccggtagctgttcccagaatcgacttgcttctctgtaaagttcctgcccttgccctggtagtaagatgtatcatagcccaggtataaggctctctgctggctgccgagcttgtaaatgtagaagattaggtgcttaataaaagatcaaaagcatatgttttttctttcacaaaacaattttntgattttgntttgggttggaaaaatacaaag

SEQ ID NO: 55886 - DNA, 1885 bp, Zea mays
  Clone ID: MRT4577_150962C.1
acttcggcacgaggtaacttaaccgacacccacctgtcttcctcgggctccggcacgccggtcctctcctgccgcgtcgcgttcgcccctcgcagcgggcaactcccaccgccgccgcttcgcatccgcccatctgcttccatcgtctcacggaggtcgctcacttcgccgccgcccgccccgcctctcccggtgccacggggccctcggccgcgccgtggcgcttaaaccctagatctgtgcctccgcgctggccgcggccgcgtcccgacgccggcacgccgccgatcgccgcacgtcgctcgatcccaggttttgccgctcgagtttagataagttccttcaatgcatcgtgttgggagtgctggtaacacagctggctcgactcgaccgagaaaagagaagcgcttcacatatgtactcaatgatgctgatgataaaaagcattgtgcggggatcaattgcttggcttatctagatggttccatatttagtacaagtgatcatctttttagcgggagccgtgatggtaccttgaaaagatgggaattaaataatggggatgcaagcttctcagcaacttttgagtctcatgttgattgggttaatgatgccattatagttggagacaagcttgtttcctgctcctcagacactacaataaaggtgtggaattgcttctctgatggtgcctgtaccaggactttccgccggcattctgattatgtgatttgtcttgctgctgctgagaagaatagcaatattgtagcctctggtggtcttggtggtgaggtttttgtttgggaccttgatgctgctcttgctcctgtagccaaatctgtggacgcaaaagaagacgaggttcctaatggaaactcagggcctcctttgacaacattgtgcagtgtaaattctagtagcaatattgcttcctctaatagtcaatcacatgggtacagtccaattgctgccaaaggtcacaaagattcagtttacgcattggctatgaatgatacaggaactcttcttctctctggtggcactgaaaaggttgtccgggtgtgggatccgaggacaggttcaaaaaaacatgaaattgagggggcacactgacaatatcagggccttacttgttgattctacagggaggtattgcctatcaggatcatctgattcgatgataagactatgggatctaggacaacagcgttgtgttcattcttatgctgtgcatactgattcagtttgggcgcttgcaaccactcattcgtttggtcatgtctacagtggtggaagagaccaatctgtatacctaacagacttatccacaagagagagtgttttactttgcacaaatgaatgccctattctacagttgtctctgcaagatgacacaatatgggtggcaacaactgattcttctgtatatggatggccagctgaagggctcacaccccttaaggtcttcgaaaagggtgcctcattcttagctgggaatttgtcattctcaagggcaagagcatctttagaaggatcggcacctgtccctgtatacaaagagccatcttttgttatcccaggagttccagcaataattcaacatgagataatgaataatagaagacatgtactgacaaaggataccactggttcagtcaaattgtgggagatcactcggggtgctgttattgaagattttggcaaggtttctttcgaagacaagaaaaaggagttgtttgagatggtattactgaaatatgtcatgatttctatgttttattaaaaagttttggtacctactactgtgtaatttgttaattgattattaggtaagcatacctgcttggttcaccatggatgctcgattagggtgcttgtctgtcca

SEQ ID NO: 55887 - DNA, 298 bp, Zea mays
  Clone ID: MRT4577_150963C.1
ccgacccacacgtacgcattggctgcaaaccattagctctaggtttaccttatcgcacaacaacccgatcgacacggtcagggtgtagctcgatgcaacccgtctactggctctcactgcgagcacgaccttcacgcatacaagctgcggctgcagctgccagccaccgacgccggatcatctaccaacgccggcgcatctgccacctacggtgcaccagccacctgctgcgcgtatcacaccgccagtacacctgttgccgccagtgcacctgctatagccggtgcatgtgctcgcg

SEQ ID NO: 55888 - DNA, 429 bp, Zea mays
  Clone ID: MRT4577_150964C.1
ggccccttgggcggtccccgggcccgccgccgggcccgccgccgggccggcggccgggccggcggccgggcggccgggggggcgggggggggggcccccccgggatttccgggccggccccgggaggccccccccggtccccgggggggggccggcttcccccttggggggcccgtggacaaaggggggccccgggggaaataggtgtcccctgggggtgccgcgcaaccgcgacccggccgcaaaaaatgcaaacccgggggggcctagggaaggcccgggcccccaaaagggggggcgcccccacagcccgtttttcgggccgaaaacccgctttcccggcgggaaaactgaatcgcccaacgcccggggaaagccgccacgccctggggcgcgggggtggtttttctgtcccccgggggggcgggc

SEQ ID NO: 55889 - DNA, 527 bp, Zea mays
  Clone ID: MRT4577_150965C.1
ataaggaaagctcgacacgctccgcagagcaccgatccggaatagcgggcgcgatccacgcgttcgctgacgcgtaggcaagacgagtgggcgccgaggagcccttaagcggggggtccataaaacacgcccgctcctttggccccgccgaagacgagggcaacttgaacggacactgggtctactgcatcgtaccgctagatacgatggcatacctagctgtcctatggtacggcgacatgttcattggcaagctactaccagcaggtaatgcaccaatactaagcctaaattattcaccactccatctacgctctggatgaatggattcaaaaccggggacgagcgctcttgatactcgccacgttaaattaatggatgtatgtccatgtatatgacaatatcatagcgactttaccctgttccattcatttccgtttgtttttacggggtgaaataaatataaagatctgttcatgcctgccgcactgaagctgcgttgggaaaaaacgcgtccggccacacat

SEQ ID NO: 55890 - DNA, 686 bp, Zea mays
  Clone ID: MRT4577_150966C.1
gagtaatctctaccgaggcaggccgtacgtctccgtggatctcctgtcggagccaaccatcaacacctccgcggccggcaacatggctgaacacgacgcccccgtagggggtgacttccctccccctctactcgggaagcctatggactggttgactgctctgaacttcatgaagaagaacttggtgatcatgacagacttgtgatagtgctcccagaggctggctcggtcttccagatccacctccttcatttttgcttgcttgctgacgactgatcccatgcagattacaacacgctacaggaggaaatctgatctaacctcatagccctactacatactgttcctgtcttgaatactcttggctagtgatacagatgttatgccccattgaatcttgacccatcgtttccaagagaggaaagtgctccatgtatctgcctgaaaaactacctaaaagactcttcaagtaccaccatagtgcagggagatgatttgtcatgctagatgtgtggaacgtgtacttacgtacactcgttgcaatgttacctgagcttatcatgatgaccctgatgccgacacctgcctacgcttaaattatgttattgtaacatatgcaaacattctattgatggacgatctggacatcttgatcattatctatcctggccgtgtcaacagctact

SEQ ID NO: 55891 - DNA, 371 bp, Zea mays
  Clone ID: MRT4577_150967C.1
ctccctgggcacgctactgctctcgtggaactggcacctggctgacgggagggagaacataggcactagcgagacattcaccctcggactttccaaagcacctcctctgcacgccgtcggcacgccactgctcgtgcctagatgcatatacgcagaacctgaattatctaaactacttgtttatgcacccggtccctacatgaactatctgtctatgatagccaactatgagactgaaccatccttcctggatgcgttcgcatacactcaatatatgggttaacactacaattgatggctgtgatacaacactacatctgaacagatgatagacgatccttactcatgcgagttaactagagaattgccac

SEQ ID NO: 55892 - DNA, 304 bp, Zea mays
  Clone ID: MRT4577_150968C.1
tgtgaataaaggtaaccacaccatcgcattggttaactctttctaggggcgtgactagaccagccgtcctatgaccagtatctaaactcaaccgggactattgttcttgaaatccactgctaaccattttcttctgaataccaacaaatgcccttgtattacttcgatggtcgactaggtctagatagctgaacactcggcacatcatgtgctctgttaccctactatttatttcccaacggtacctggagtgctacaaggtctgcctatccggaacaggatcaaagcttagcataatcaccgt

SEQ ID NO: 55893 - DNA, 769 bp, Zea mays
  unsure (1)..(769): unsure at all n locations
  Clone ID: MRT4577_150969C.1
ggaccctcgaggccggccgggatcgggctctgtcccttgcaagctcaatctcacctccaaccatgggtaaagagaagtcccacatcaacattgtgcttattggccatgtcgactctgtgaagtcgaccaccacaggacaccttatctaccagcttgaaggcattgacaagcgtgcgatcgacaggtcgagaaggaggctgctgaaatgaacaagcgctccttcaagtacgcgcgggggctcgacaagctcaaggctgagcgtgagagaggtatcaccattgatatcgctctgtggaagtttgagaccaccaagtactactgcacgggcattgatgcccctggacaccgtgacttcatcaagaacatgatcactggtacctcccaggctgactgtgctgtccttatcattgactccaccactgatggctttgaggctggcatctccaaggatgtgcagacccgtgaacatgctctccttgcgttcacccttgtagtgaaccacatgatttgctgctgcaacaagatggatgccaccactcccaaatactccaaggcacgctatgaagagattgtgaaggaagtctcatcctacctcaagatacgtgtgtacaaccctgcatagattgcctttgttcccatttctggccttgagggcgacaacatgattgagaggtccaccaaccttgactggtacgatgtgccaaccctgcttgatgctcttgaccatatcaccgagccacagacggcttcagacnagcccctgcgtctg

SEQ ID NO: 55894 - DNA, 346 bp, Zea mays
  Clone ID: MRT4577_15096C.1
caacgtcaaacgagcatccgaagctgtccctcgaaccatttcaatccaatgggggcgactttaaagcgggcgactggcatcaaccgcgcttcgctgtcacacacataccatcggcgtgggttgtgcgccatcaatgccaagaacggctgtgccttctacaaggtgcgttatgactgtactcgcctgtaaccaaatgactaccctgtcgactatttaaagcctttcgttggcatttcgcgctttcatgaggcttcctagcttacgttaatcattacgcctgggacagtgtctcatccttcttgctaggcgcttcatgtggaagagagtagtgtttctcaagcattta

SEQ ID NO: 55895 - DNA, 353 bp, Zea mays
  Clone ID: MRT4577_150970C.1
ggaacgcaatctaaaatagcgttgttgattttaatcctgtctcataagaagaaagattgcccaatccaagccccaaaacacacatgagggtgttttgttttatataaaaggggggaaggtcgttccttatgtcccaccggttgctagaatctactaatccgaaccggggaggtgggcgtcatagctcatgctgggccaccacacaggacggttggtcccacgcgtggttttccttcggggatttttccctggcggggtgaatgctaaaccccgagcacgcccggtgagccacctggaatgactgttcccccgatggagatttcctttgggatgcctccctgcgggcactcctt

SEQ ID NO: 55896 - DNA, 345 bp, Zea mays
  unsure (1)..(345): unsure at all n locations
  Clone ID: MRT4577_150971C.1
ncccattcatcatctcctcccgccgccgcctcccttcccttcgttcttcttcttcgagttgggtagtttacctctacccaccagccatgggtaaggagaagactcacatcaacatcgcggtcattggccatgtcgactctggcaagtcgacgaccactggccacctgatctacaagctcggaggtatcgacaagcgtgtcatcgagaggttcgagaaggaagccgctgagatgaacaagaggcctttcaagtacgcgcgggcgcttgactaactcaacgccgaccgcgagacagctatccctatctatattgctctctggaagccgcagaccaccacgtactact

SEQ ID NO: 55897 - DNA, 536 bp, Zea mays
  unsure (1)..(536): unsure at all n locations
  Clone ID: MRT4577_150972C.1
gtgggggggggtttttttaaaaaaaataaatgtggagtcaatatattgattattttctagggaaacacatgtcggtatgagggcaccattgtcgagtacatctcatatgtaatctaaaagatggcaccttcaactatgggttgcttcaagggggttttgctcagggagaactgnttgtatggcaccaattgttgttgctgatgcaagaaggtagcgaccaatgggttagccactgccaatggattaagtaactgttgtcgctgttgtaggtacgcagcagagtttgacacagccagttggttgaatggaagcaactgttgtaagtaggcagcagggtttgccacagctagctgagtcagagctggtacaatttgttgcagcaactgttgttgtaggtacgtaggtgcattgcccaccgcgagcgggctagatgaaagtagttgtaggtagacggcagggttcaccatggctaggtgactgaacacttgcataaactgttgccactgttgttgttgctggtatgcaactactttcgc

SEQ ID NO: 55898 - DNA, 546 bp, Zea mays
  unsure (1)..(546): unsure at all n locations
  Clone ID: MRT4577_150973C.1
ttcacgcgtccgncgccggcggccttgtgcgcctccatttcggcactctgtcccttgcaagtctaatctcacctccaaccatgggctcaagagaagtcccacatcaacattgtggttattggccatgtcgactctggcaagtcgaccaccacaggacaccttatctacaagcttgggggcgggggcaagcgtgcgatcgacaggttcgagaaggaggctgctgaaatgaataagcggtccttcaagtacgcgggggtgctcgacaagctcaaggctgagcgtgagagaggtatcaccattgatattgctctgtggaagttcgagaccaccaagtcctactgcacgggcattgatgcccccggacaccgtgacttcatcaagaacatgatcactggtacctcccaggctgactgtgctgtccttatcgttgactccaccactgggggctttgaggctcggctctccaagggtggccagacccgggaacatgctctccgtgcgtccacccttggggtgcaccagatgattcaggtgctgccgcaggga

SEQ ID NO: 55899 - DNA, 322 bp, Zea mays
  Clone ID: MRT4577_150974C.1
tcggcgcgaccgcacgtccggttgatggccacctggcccgacagagccccaagactgatacatagggcgagaggggcgggcctcctcccttccatggtgttgagcgctcccttacgaggagttggcgtgcccttccagaggaggcctaagagacgtttttttccgggcgggcgaccagattggccatgccagtcatgactgaatggctggtgctttcatgatctgccacaactgtggcagccgtggacacacagcatatgagggaccctctgtgagcctcatggagaggttcccacctaggcggatctgaaggacggccaca

SEQ ID NO: 55900 - DNA, 804 bp, Zea mays
  unsure (1)..(804): unsure at all n locations
  Clone ID: MRT4577_150975C.1
atcacccatattagtgtttgagcatatcataaacacaccaagcgaagcgcactagcaacagacctaacaacaatggttaccaagatattagccctccttgcgcttctggccctttttgtgagcgcaacaaatgcgttcattattccacaatgctcacttgctcctagtgccattattccacagttcctcccaccagttacttcaatgggcttcgaacacctagctgtgcaagtccaacatgcaacaacaagcgctggcggcgagcgtcttacaacaaccaattgcccaattgcaacaacattccttgccacatgtaacattacaagccatcacaacgcagcagcaacaacagttcctaccagcactgagccacctagccatggtgaaccctgccgcatacttgcaagagcagttgcttgcatccaacccactttgctctagcgaacgtagttgcaaaccagcaacaacaacagctacaacagttttctgcaacgcttagccaactagccatggtggaccctgccgcctacgtacaacaacaactactgctttcatctagcccgctcgctgtgngcaatgcacctacatacctgcaacaacaattgatgcaacagattgtaccagctctgactcaactagctgcggcaaaccctgttgcctacttgcaacagctgcttacattcaccaactgactctgtcgactctgctgtgtacctacacagcgagcacaggtacttaatcccattggtagtggctaacccattggtcgccgtcttcctacagcagcaacaattgctgccatac

SEQ ID NO: 55901 - DNA, 721 bp, Zea mays
  unsure (1)..(721): unsure at all n locations
  Clone ID: MRT4577_150976C.1
ccggccgggatctcttcaccggaggaataccaatatatgtactcttgtacagcctccttcccagccttacgcgcgcagaccagctacccttgctgcccacaacaaatctccagcacatcccacttgcccacctgcgagtcgtcattcgcaaacttttgtcttgacgtattcacaccagcaaacatcccgtattcttgcgtagtcagcactcactagcggacacgcttctggaaaacattcggcacgacagggaaagggcaactcgtagactctcctagcgcaggcgaatccgatcgaacactggagccttccaacatggcctacaaccagcgatacaaccccgatgctctgccagcacacgccgaacccgagcaggcagcacaactcatgaaccccaacaaccgcccgcctactggagcgcagtacaacaaacccatgcctccaccaccgcaacaggcgcagaatgcgcgacccgacgaccgctacaacagcaggcctccgcctagccaaggcttccagtcgcctggccctatcccaggctcttacggatcttcgagtcccgcgcctccacaatcgcagaactgggatcagcaaactcgctacaacacatcctacaactccaacccacagccgccgnctccccgcttcagcagccagcagcagcagcagccttactcccaggcgccacctcaacagcaacagcgcccgtcattcacttcgc

SEQ ID NO: 55902 - DNA, 1093 bp, Zea mays
  Clone ID: MRT4577_150977C.1
tttccgagtgggtcaagtgggctatcttttgtgcacgagggcccatgtccctgctcgaagcgaagcccattacatgcggtgacgggtgggcgtctcgtcttctccgacgagggagccccagccagccggtaccaacccgtgaccctaaaaccaactaaagtccagaacagaggcagctctcttggcgtgctcacctgcttgctccaagatttacccctccctcggtgcctgatacctctatcctccgcatccgtctctaaagacaaggcagtcgtcaagaaagggagtttgaccaagagcctgtggtgtccgtcggctgccatccatggcaggggaggccaagaagctcttcttcgcatccgaggttactctccacgcctccaggaaggactgctgggtcgtcatcggcggcaaggtgtatgatgtgaccaagttcttggaggaccaccctgggggagaggatgtgcttctccatgcatcagcctctggggatgccacggaagcattcgaagaggtgggacacagcacttcagccgtcagcatgatggacagctacttgattggaagcatcaaggactatgttcgtccgagtgcatcgaaggccacagatccttggagcgctgatgttctaccaaattccaggacgatgcaagggaacaaagtcactcctaatccaaataccttcctggactttcttctcccattgtttgtgcttggcctggcatttgcagcttggtattacctaaccttcatctccaagaaccattaaatacagtgaagctgggaattatttctcactattatactgttagggttatatcagagaaaacattaaaagaaggcaaaccttgtattatggtattttgcacttgaaggttgctagctagggtttccttggatgtcctttcttacatgtaacaggcatgtcagtacgcagatgtatgaatgaaacaatttatccttatttttccaaaaaaaaaaaaaaaaaaaaaaaaaaaaaaaaaaaaaaaaaaaaaaaaaaaaaaaaaaaaaaaaaaaaaaaaaaaaaaaaaaaaaaaaaaaaaaaaaaaaaaaaaaaaaaaaaaaaaaaaaa

SEQ ID NO: 55903 - DNA, 358 bp, Zea mays
  Clone ID: MRT4577_150978C.1
atcgagataaatgtcaatcaatatattgattatttctaggaaacacatgccggtatgagggcaccattatcgattacatctcatatgtaatctaaaagatggcacctccaacgatgggttgctgccacgacaaggcagggttcatcaaagagaactggctgtatggtagcaattgttgctgctgtaggaaggctgtgaccaatgggttaggcactggtagtggattaagtaacttatgtcgctgttgaaggtacgcatcacagttcgacacagacactatcctgaatggaagcaactgttgcaagtaagcgcagagcatgccacagctagctgattcacagctggtacaatctgttgc

SEQ ID NO: 55904 - DNA, 323 bp, Zea mays
  Clone ID: MRT4577_150979C.1
gggaaggtgaccatattcagttcattcttcattcatccctcatcacgaaaccaaacaagagacggtgcagcttcaacccacttcaaccctgtaatcaaacaagaaattaggttcaacccatcacttaaaccaaacaaggaacatgtccgacccagcccacaaaaatgggttggtttcgacccaacccacttcattccgaaaccaaacgcactataagataactgagaggatcacagctacttgcacaaattgtttgcaggagttcagaatgtttacttgatctgcggctatttctgtaacctggtcctgaagtctgaattttg

SEQ ID NO: 55905 - DNA, 387 bp, Zea mays
  Clone ID: MRT4577_15097C.1
ctggcgctagtcacaagccgatcaagggcaagctcatacgttgccactcccgaaggaacataaccctgcttattccacactgacatgtcacccttgcttatcgcacactctcactagtgcaacaagagctttgtttatatcgatgtgcattccatcataaagggcacagtcgatgatcttggtagcatggaactaggctggtacaccattgtcgctcactaacactgcaggaagcgtctgagcgattatctcagattgcatgtactgactgccatacatacacctggagctgcattaccttggctcacgacaggccctgataacccgtatgcatccctacttaagtttgccgtgctcttgacggaacctctgaggctgaacaaaccc

SEQ ID NO: 55906 - DNA, 393 bp, Zea mays
  Clone ID: MRT4577_150980C.1
caccagttacttcaatgggcttcgaacatccagccgtgcaagcctacaggctacaactagcgcttgcggcgagcgccttacaacaaccaattgcccaattgcaacaacaatccttggcacatctaaccctacaaacaattgcaaccaaacaccaccaccaccagtttttgcattaattgaccaacttaccctgggggaaccttgcaacttactggaacaagaagttgttggattcaaaccaatttgttttgccaaccgtagttgattacaacaacaaccaccagttgaacaagttattgcaatgcttcagtcaactagccatggtgaaccctgccgtctacctacaactactttcatctagcccgctcgcggtgggcaatgcacctacgtacc

SEQ ID NO: 55907 - DNA, 522 bp, Zea mays
  Clone ID: MRT4577_150981C.1
atttttagcattcagcaaacacaccacgcgaagcgcattagcagcaacctaacaacaatggctaccaagatattatccctacttgcgcttcttgcgctttgtgcgagcgcaacaaatgcgcgcattattccacaatgctaacttgctccgagcgacatgattacacaggtcctaccaccagttacttgaatgggctgcaaacacccagctgcgcaagcctataggctacaacaagcaatagcggcgagcgtcttacaacaaccaatatgccagatgcaacaacaattcttggcacatctaacaatacataccatgcgcatcgcaacagcaacaacaattcctaccagcactgagccacctagccatggtgaaccctgccgtctacttgcaacagcagttgcttgcatgaaacccacttgctctggcaaacgtagttgcaaaccagccacatcaacagctgcaacagtttctgccagcgctcaggcaactagccatggtgaaccctgccgactacctacaaca

SEQ ID NO: 55908 - DNA, 595 bp, Zea mays
  Clone ID: MRT4577_150982C.1
ggccgggccgggttttcccccacacgccgccgtcttctgtggttactgcgcttactcctccactttggcctcctcacttgcaagtttaatcttctcctccagccatgggtaaggacaagtctcacatcaacattgtggttattggccacgtcgactctggcaagacgacaaccaccggcctcctgatctacaagcttggaggcattgacgagcgtgtgatcgacaggtttgagaaggaggtcgactgaaatgaacaagcggtgctttaagtatgcttgggtgcttgacaacctcaaggttgagcgtgagaggtgtatcaccattgctattgctctgtggaagtttgagaccccccagcactattgcaccgatattgatggccctggacactgcgactttatcaagaacatgatcactggcacctcccaggctgactgtgctgtccttatcattgactccaccactggtggtactgatgctgctatctccaaggatgggcagacacgtgagcatgctctccttgcgttcacacttggagcgaagcacatgatttgctgctgtaaccatatggatggcaccactccccaatactcca

SEQ ID NO: 55909 - DNA, 767 bp, Zea mays
  Clone ID: MRT4577_150983C.1
cccttcctaccattccccctgcccgccgccgcctcctctcggctccttcttccttcgagtttcagccatgggtaaggagaagactcacatcaacatcgtggtcattggccatgtcgactccggcaagtcgaccaccactggccatctgatctacaagcttggaggtattgacaagcgtgtgatcgagaggttcgagaaggaagccgctgagatgaacaagcggtcgttcaagtacgcctgggtgcttgacaagctgaaggccgagcgtgagaggggtatcaccattgatattgccctgtggaagttcgagaccaccaagtactactgcaccgtcattgatgcccctggtcaccgtgacttcatcaagaacatgattactggtacctcccaggctgactgtgctgtgctcatcattgactccaccactggtggttttgaggctggtatctccaaggatggccagacccgtgagcacgccctccttgctttcactcttggagtgaagcagatgatctgctgctgcaacaagatggatgccaccactcctaagtactcgaaggctcgttatgaggaaattgtcaaggaagtctcttcgtacccgaagaaggttggctacaaccctgacaaggttcccttcgtccccatctctgggtttgagggtgaccacatgatttgaagggccaccaaccttgactggctcaaggtgcctacccttcctgaggctcctgaccagatcacgaccccaaaggcccttcaaccaacccctg

SEQ ID NO: 55910 - DNA, 434 bp, Zea mays
  Clone ID: MRT4577_150984C.1
atcaaacgtacttgccaaccagcatcgccatcagccgcgacaggatcggcccaccctcggtcgggtagccatggtgagccgggccggatacatacatcatcgacggctgattaaatatacctcgttcgctgtgggctatgcacctacatacctgcaacaacaagacgatgcaacacattggacgatctctgactcaactaaatgttacaaaccctgttgtctacttgcaacagatgctcccattcaagcaactgactatgacgaactctgctgagtacgtacgactacgacatccattactgaatacaatggtagtggctaacccatcggtcgacgacttcctacagctagcacaatcgatgccatacaaacagttgcctttgactaatcctgtattgaagacgcatcaactaatacatggacgtgccatgttt

SEQ ID NO: 55911 - DNA, 246 bp, Zea mays
  Clone ID: MRT4577_150985C.1
ccttgatattccaaacaatttaaccattagtaacaacccaagggagaatttctataagtgtacacactatatacatcatgtactacaaaaaaaactacatgcttaccaagacgaatatgacacattaaacaggacaagggaacagcaccttaagaatcatccaaaagcctttgaaacaaatgataactccatacaacacatgcatacattcattgactctgtgttgtacaatgcaaaaagagcatc

SEQ ID NO: 55912 - DNA, 265 bp, Zea mays
  Clone ID: MRT4577_150986C.1
atttattaatattttttttacattttttttttttttttttgaattggaatttttttttttcaaaatcaaaggctcaaagccagctaatttaaattttttggagagccaaaaaagggtgaaaagcccaagcctaaggggggataggttttacaccaaagggagggtccagataccggaaccaaaactatggcaggcgtatcctattccatcatcaaaaaaccagttgggccatcgttccaaggggaagggggaaaaagacacgaat

SEQ ID NO: 55913 - DNA, 269 bp, Zea mays
  Clone ID: MRT4577_150987C.1
cgtatctcaccattcctctactttactatgggacaacattaatcgcgatcacgaaaccaacaccccttcattaccttacccatcttataaaaatcaccccgcggccacaaacacctcccttaccacagctgctcgaccatactctctcaccctgctaatcgcacagctcccataccagctcgctccaaatgatcttttttctgattatcaacacctcaccatgaacttcgtacttcaccatatgaaccatctcaccattgacatcacta

SEQ ID NO: 55914 - DNA, 787 bp, Zea mays
  unsure (1)..(787): unsure at all n locations
  Clone ID: MRT4577_150988C.1
tatgttgttttcgagctcatggagtcggatctccatcaggtcatcagagctaatgatgacctcacggcggagcattaccagtttttcctttaccagcttctccgtgctctcaagtacatccatggcgctaatgtatttcatcgcgatctgaagcccaagaatatactggccaacgcagactgcaaactgaaaatttgtgactttggacttgcgcgtgtatcatttaatgatgctccttcagctatattttggacggattatgtagcaacaaggtggtacagagcccctgaattatgtggctcctttttctcgaaatacactcctgctattgatatttggagtattggatgcatatttgccgagcttctcactggacggccactctttcctgggaagaatgttgtacaccagttagatataataacagatcttcttggaactccatcgtcagaaaccttatctcggattcgaaatgagaaggccaggaggtacttaagttgcatgcggaaaaaacaccctgtacccttgactcagaaatttcctaatgccgatccattggcggttcgcctactgggtcgtttacttgcatttgatcctaaagaccggccttcagctgaagaggctttagcagacccatattttgcatctcttgccaatgtggagcgtgagccatcaaggcatccaatttcgaaactcgagtttgagtttgagagacgaaggttacaaaagatgatgtttagggaattgatctatcgagnagattttggagtaccatcacagatgctgg

SEQ ID NO: 55915 - DNA, 295 bp, Zea mays
  Clone ID: MRT4577_150989C.1
ccggggggggactccacgcgtgagggaaaatgccggaggtcaagcgttcactggaaagcaacgggcacttgacttggttccaactaagatacatgataggtcaccaatatttcttggcagctatgatgatattgaagaaattaaagcactctatgctgctgaagggaaaaaggaatgagtgtacaattctcattcttctcccactctatctttactggattcaggtttcaatcatcaaagtatataattcatttcaaagcttattctgtgatgcgatactatatctatattgaac

SEQ ID NO: 55916 - DNA, 481 bp, Zea mays
  unsure (1)..(481): unsure at all n locations
  Clone ID: MRT4577_15098C.1
ctcgaggctttgccggcttttanccccgctcgatcgatcggcacccgcgcatcgcgtcggcattctctccagccgctactccctccctgcctctccacgatctcgcgaaccctgctagatccttgactcgccatgtccaacccctggggcggcatcgttggtgccggcgcgtgggcgctggacgcggagcgcgctgaggaggaggagcgcgacgcagccgcggcccccgtccccgcccccgcccccgccgcgggcttccccagcctccgcgaggccacagcgggcgccgccggcaagtccaagaagaagaacaaaggaacaacgctctcgctctcggagttcgccgggttcggcccggggcggcggcaagcgccggcgccgccggagcccaggggcctcaccacggcggagatgatgatgctgcccacggcccccagggagcggtccgtggacgatctcgaccggncccgcggcctgggcg

SEQ ID NO: 55917 - DNA, 420 bp, Zea mays
  Clone ID: MRT4577_150990C.1
gaaagggttatagcaccaaaagaactactgcaggggggggggccagacacaatgagaaactgcccacggtttgcagggtggatggccgttattgcaataccaaaggcacccgagccctgggggggggggccatagaggatgaaggtaaaacccattggaaaggccgaagagacagacccaaagttttaaggcccgggcacttttgcattcacggtagcttgtagccggtctggaacaccactgacgtgaggaagtgcttgccgaaacaagaaaacgcggggaaggacaggtcaccgggaaccgttggcatgacagataccttctttggcggaagcgcaggggctcctaactagattgcttccggcatcagttccttcctttccctaacaagggaggggcaggaggttaataattggaggc

SEQ ID NO: 55918 - DNA, 356 bp, Zea mays
  Clone ID: MRT4577_150991C.1
gcatgtcttaaaaccatagtttttttcccgaaaactgggatgccgtcatgtaatgacagaaataggactgccattcttgtggttgatgtataatgtaaaacctatgcataatttctagtgtggttgtacatttcttttgtaatactactcactatatgtattaaacttctacgagttggtccagcaaatgctaaaatttcttggtgcattacataaaacctgcttgtggattctctgttactattttttcccaagtcatcatctttcatattactgcggtaatgaccttttgtgtttcgattaacatttctgccaatgtatcataaaagcagatctcttcacaattttatcccaga

SEQ ID NO: 55919 - DNA, 239 bp, Zea mays
  unsure (1)..(239): unsure at all n locations
  Clone ID: MRT4577_150992C.1
cattcaggncgaacaaagtggctcagcccagtcgttttattgttattattacgatgattattattactgcttgctagctagctcgtgctagtcaggaaactcttggtttactttttgcgagggtgcgacgccgtgcttgggtggggggcgagctctccctagccggagccttgggtgcaccgtggccgccggctccttgcccgtgcggttgggccctgggtctgcgcggggctgttggc

SEQ ID NO: 55920 - DNA, 595 bp, Zea mays
  Clone ID: MRT4577_150993C.1
cgggcgctccttatcctcttctcccacaggcgcgctcagattttcttcatcccgtgcccaaccttcatcttccagccgccgcccgacgagcacttctccatctccctccgcgccctggctcctctgctggccgctggacgcgcgtgtgccagggagcgctccctcctcccttgtttccctggcgcatggacttctctttaccccagttccttgccatggcgcacccgaagctcccttctgcttcctgcccggcgtcctgctccagcgatgcagctcgcctagccgagctccctcagctcgccctatccatggccgcggtgcccctctgcctgctggaacttccttgtccgcgagccctccctcgtccaagcgcccgaccgccccagctcgcgcccaaactccctgcttggatttcgtccagatcgagctgctcccatggcgatttcccctcggattcctccctgttcgcgcccctctctctctctctctctcgagtctctgtgccgcgccctggctcggattctgctcgacgcccctgcttccctcaactccggtatgcgttgcgttctgtcgtgctcctccctcgtgggagctc

SEQ ID NO: 55921 - DNA, 1063 bp, Zea mays
  Clone ID: MRT4577_150994C.1
caaccccgtctctctcgcgtctgtctgttccttggagccgcccgccgcccacgccccgtccgccgcagacgcccctgtcccgccccttccaccgcagccgcccccgcctccggccccgcccctggcctcagcttgcggcgtcggagtgtgcggtcggggacagcgctgcctaccagaggtcctcctccttcagggacgatgtcgtcgtcgtcgcaaaccatccctgttaaaactgtcaaccaccagtgttcatctgggctacaggcagtagccgatgtcgcaggctcgcagctgctataaaggctggttactatgacataggattggtgctggtttgcaatccatgtccataaattccattgcttgggaaggacatgttaacccaaaaataagcgcattccagaaagcacatgattgtcttctgcccatgggaattacttctaaaaatgttgcccatcgatatggtgtaactaggcaagagcaagatcaggccgctgctgagtctcataggagagctggtgcagccacggcctctagaaaattcaaggatgagatcgtccccatgccaacaaagatcgttgatcctaaaactggagaggagaaggaagttgtgatattagttgatgatgggattaggccatctacttacctgctatattttttctgagcaaagtcggttaaacttgtgattctttgtatgttcaggtgcccggtgcgtggctactcttctaaatgaaatgaactgccggggcagagactgcagtttgggggttgcccccatgtgttttggttctggaatagggcccccgggtgtgttccagttgtgtccggcccgggtggaggttttgcccccccctggcccctgtaccccgatggtgtttggcccccgtgagctcccatgtggggttttgacccttgggcctttttttaggcctaggtatgagattttgtctctttttggtactagatgctgcgatgtgtctttttatgcctagggatgagccttttgtgaggtaattgatgggcctagggatgtgccttttgtgaggtaattgatgggccc

SEQ ID NO: 55922 - DNA, 179 bp, Zea mays
  Clone ID: MRT4577_150995C.1
tgcacggcatctccccttaggtgtgcctacagtataagagatccgcaatgtcgacggaggaggatgatgcgcactgacgccccggggaccgacgtgccagcgattgccacgtgggcccgggtgggcgaggcgcccaaggcaaacaggttgccagggagaagaaatttcctagggagaag

SEQ ID NO: 55923 - DNA, 235 bp, Zea mays
  Clone ID: MRT4577_150996C.1
gacgcatcgaggttagcacgcgaacaagcgaccacgagggccaagtggaagaagaagcgcatcacgaagctcaagaccgaacccaacaaagatgaggcagagatccaagtaggcagatcgagatcggattgtggacatgatgacatgcgtgggtacacacatttcatcggatgcgaaggagagcatgtggagacatcgtcaacatgccatggagacacggaccgccatcagttga

SEQ ID NO: 55924 - DNA, 810 bp, Zea mays
  Clone ID: MRT4577_150997C.1
gctccttttttcccactacgcggtcttcgctcgctcctcgagttcagtcctcacctccccaccgagctccattaatggcgcctcccctaattttgccataagtgccgagaccacgtggggtctgggaaggaaaggctactgccacttcagaggtcggcctgggaggctgcatcgcatccacatggggtaccagcccatgcacggcaacggcgggacagccggtgccgggacatcaggctccggcggcggcggcggcggagaccacttgcgccaccaccagcagcagcgcctgcacagcccccgcatggccggcggaggctccatgacgcgccgggccagctcgttcaagcgcggcgggggcggcgagatcgagctccagatcggctctccgcgctcgccgaggtgcgacgggttggggagccctccctcggactccgtggagtcgtccggtagcggcctcctcctccaccagagccagcagaaccagcacctccggttccggctcttcaagccgccggtctccggcggcagcgcggtcggacttgggtctggggatccgcgagaggaggaagctcgggaacatgctgttcctcgccttctgcggcgtgtgcttgctcctcggcgtcgtcagaatcttggccgggcggctggttcgccctccctggcaatgacaaagacgccgattttgaaggatctctctatctccttctctggtgagaaagtgcatcaagctgatcatcacttcgtatacatgggaggaaaaagagagtgacaggactttgatgacaggggaatctagcatcggtggaa

SEQ ID NO: 55925 - DNA, 831 bp, Zea mays
  Clone ID: MRT4577_150998C.1
gccgctgccgcactcccgacggccaccttaaaagcctctggcggaggaccaaatactctcgcgatcgccgtagcgccaccgcgtcgcccaatccgttgggagccgtcgcgcgatgcaggctgacgagcaggcggaggcgccgcgccgcgccaaggaggccggcaacgacgcctaccgcaaatccttgctcgaggaggccgaggagcactacaccctcggcgcgctccttgaccccagcgacatctccttcctctcctttcttgtctcctcctacctccgcatgggcatgtacgatgtattcatgatttactgtcattatcccctttcgtgtttttttgatctcttctctctccgcgtgttgctctttatttttcttttttttaccgtttccctcctcctcccttttcctctgctccttccttccttactccttctcctctcctcctttctttatcgctcttctttttttttcttcctttctcctttcccttccatttattctgtttctcttctttcctcttttctttcttttttctttttctctatatttctctctcttttcttttctctttttttttttttttttcttttcatttctctttttttctttttctttttctgcttctcttttttttttctttttttctcttcttcttcccctcctttttattcttttcttcccccatttcttccgtccctcctcctttcttcttcctccccctcttttcttctttttctttctccttctcttccttaccttctcttcctcctttttcttcctttcttttctttatttacacctcccttcttcctcttcttttttcttctttt

SEQ ID NO: 55926 - DNA, 479 bp, Zea mays
  unsure (1)..(479): unsure at all n locations
  Clone ID: MRT4577_150999C.1
tcgcccacgcgtncgcccacgcgtccgcccacgcgtccgcagaaacacaccaagcgaagcacattagcaacaacctaacaacaatggctaccaagaattatccctccttgcgcttcttgcgctttttgcgagcgcaacaaatgcggtcattattncacaatgctcacttgctccaagttccattattacacagatnctcccaccagntacttcaatgggcttngaacacccaactgtgcaagcctataggctacaacaagcaattgcggggagcgtgttacaacaaccaattttccagttggaacaacaatacttgggacatttaacaatacaaaccattgtaacgcaacagnaacaacaattnctaccancactgagccacctaaccctggggaaccctgtcggctacttgctacaacagttgtttgggttaaacccacttgcttttgttaacgtaggtggaaaacagccacaacaac

SEQ ID NO: 55927 - DNA, 873 bp, Zea mays
  Clone ID: MRT4577_15099C.1
atagtctttctgccgctgcctcccccacgctcgctctcaccgctaacacttcgccgctgctctactcctactcggcgcggcggctccggaggggggattccgtcgagcaggatgaacgcattggcggccaccagccggaacttcaagcaggcggccaagctgctgggcctggactccaagctcgagaagagcttgctcatccccttcagggagatcaaggttgagtgcacaattcctaaagatgatgggacattagcatcctatgttgggtttagggtgcagcatgacaatgccaggggccctatgaagggtggaatcagataccaccatgaggttgatcctgacgaggtcaatgccttggcgcaactgatgacatggaaaacagccgtggccaatattccatatggaggcgctaaaggtggcataggatgcagtcctggagacctgagcatatcagagctcgagcggcttacccgagttttcacccagaaaattcatgacttaattggcattcacaccgatgttccggctcctgacatgggcaccaacgcacagacaatggcatggattctggatgagtactcaaagttccatggttactcacctgctgtggtgacaggaaagcctgtggaccttggaggatcactgggaagagatgcagctactggaaggggagttctgtttgccactgatgccctacttgcagagcatggcaaaggcattgcaggccagcgttttgtaatccagggatttggtaatgttggctcctgggctgctcactgatcactgaagctggaagcaaggtgatcgccatcagcgatgtcacaggggccgtcaagaactcccatggcattgacatagcccagctgatga

SEQ ID NO: 55928 - DNA, 849 bp, Zea mays
  Clone ID: MRT4577_1509C.1
gctatcatctagagtagccccgttaaagcccaaacaaaaaccccgctgcgagatctgcgcatctcgctacaccaccaccacgacggccatggcggcgccgcgcgtcctcctcctcctcgccgccgcggcccttctcgccgtctcctccctcggggacgcttcgggcgagggcccccgcgggcgcaagctgctggtgctcgtcgacgatctggccgtccgctcatcccactcggccttcttcggctcgctccaggcccgcgggctagatctggagttccgcctcgccgacgaccccaagctctcgctccaccgctacggtcagtacctctacgacggcctcgtgctcttcgccccatcgaccccgcgcttcggcggatcggtggaccagaatgctgttctggagtttatcgacgccgggcacgatatgattctggcagcagatcattcggcttcagatctgatccgcggcatcgcaacggagtgtggggttgactttgatgaggacccggaagcaatggttattgaccacatcaattatgcctccagtgaggttgaaggtgaccacaccttgattgctggcgatgacctgatccagtcagatgtgatattggggtccaaaaagattgaggctcctgttctgtttcgagggattgggcatgcggccaatccatccaacagcttggttttaaaggttctatctgcctcgccatcagcgtattcagcaaatccggaggctaagttggcatcccgttcatctctcacagggtcggccatatcactgggtttctggtatgcaggctaggaataatgctcgtgtgttgatatctggatccactggatttgtttagc

SEQ ID NO: 55929 - DNA, 2368 bp, Zea mays
  Clone ID: MRT4577_150C.1
gcgtccgcccacgcgtccgcccacgcgttcgcggacgcttgggcggacgcgtgagtgccaacttcacgagcttgtgtgaatagtcttgggtacctcgaggccggccgccgtctcctccctctctcgtcatttccccatctcccagatccaattcgcgagttctccctcctctgccgccatggcgctctctgtggagaagacctcgtctggacgggagtacaaggtcaaggatctctcgcagggacttcggccgcctcgattgagctggtcgagtaatgcccggcctcatggcgtgccgcgccgagtgggcccgaagcccttcgctggcgctaggatctcggagtctctccacatgaccatccagaccccgtctgcactcttggcctcactctctgggccccccgcggggggcccgggcgcaccgtccctcaccgccggcctctgctcctcttccgccgccgcaggatctcgtatcgccggagaccatgtaccgcgccgccgggagccacctccgctccctcaagcatcatggtgcttctaggcttgccagtacaagtgttgcgaagcagtcctcaggtggtctgttcagctggcttcttggtggaaaatcaagcgaactccctccccttgatgttccactcccaggcattagcattccctcacctctaccagattttgtagagccatctaagacaaaagtcactactcttccaaatggcgtcaagatcgcctcggagacatcatcgagcccagcagcatctgtgggtctgtacattgactgtggttccatttacgaaacacctgcttcatctggagtatcacatctgttggagagaatggccttcaagagcacagtgaatcggactcacttacggttagttcgtgaggtagaagccattggaggaaatgtctctgcatcagcttcccgtgaacaaatgagctatacctatgatgcattgaagagctatacaccagaaatggttgaagttctcattgacagtgtgaggaatccagcattcctcgattgggaggtcaaagagcagctccagaacataaaatctgaaatagctgatgcgtctgctaatcctcaaggtctacttctggaggcccttcattcggttggatattccggggcactggcaaaacctttgatggcttcagaatctgctgtaaaccggttggatgttagcagcttggaggaatttgttgctgaacattacactgctcccaggatggttcttgcagcatcaggagttgatcatgatgcgctgatttcagttgtagaaccacttctgtctgaccttccgtgcgtgaaacgtcctgaagagccaaaatctgtgtacgtgggaggagactatcgctgccaagcagattctccaaacacacacatcgcacttgcttttgaggtgccaggtggttggaatcaagagaaaactgcaatggttgtgacagtgcttcagatgctcatgggaggaggagggtccttctctgctggtgggcctggaaagggaatgcattctcgattgtatctccgtgtcttgaccaacttccaacagattgaatcattctctgctttcaatagcgtctataacaattcgggcctttttggaatttatgcagtcactagcccagacttttcatcgaaggctgtggatttggcagcaggggaactcctggagattgcgacacctggataaagttacacaagaacaacttgatcgtgctaaagaggcaaccaaatctgcagttctgatgaacttggaatcaaggtctatagcatctgaagatattggaagacaggttcttacttatggggaaaggaagcccatcgagtatttcctgaaaacagttgaggagatcactttgaatgacattttgtcaaccgcaaaggagatgatgtctacaccactcacaatggcatcgtggggcgacgttattcatgttcctagctacgagtctgttagccgcaagtttcactcgaagtgagaggatccagcatcggacttgcatgacctgttccaacaactgatgtgaagcctgcaacggccctcagctgggacagttactctccccacagaataaaaaagcatgtggtttctagcgccccccctaattactccctctgcatgtatacgccaaacatgttttttttttgtggtaagaatcatcaagccccttggcgactcgtttctgagtttcgcagcggcgctagattttattttatgtggacaagcgagctttcggggtgcgctcgtgcagaaatattttgccaacgtattttgcagtttagaccagaagcagaaaggaccagcgtatcacttttcctgttgttggatgcatgagttcatgacgtccacatttttgcctc

SEQ ID NO: 55930 - DNA, 499 bp, Zea mays
  Clone ID: MRT4577_151000C.1
acgcggcgacctataatattttgagcatttagaaacacaccaagcgaagcgcactagcaacaacctaacaccaatggctaccaagatattaaccctccttgcgcttgttgcccttgtagtgagcgcaacaaatgcgctcattattacacagtgctcacttgctcctagtgccattattacacagttactgccaccagctacttcaatgggcttggaacatgcagacgtgcaagcctacaggctacaactagcgcttgcggtgagcgccttacaacaaccaaatgcccaattgcaacaacaatccttggcacatgtaaacctacaaaccattgccacggaacaacaacaacaacagcttttgccgtcactgaggcacctagccgcggtgaagcctgctacctacttgttacagcagctgcttgcatccaacccacttgctctggtgaacgtagctgcttaccaccaacaacaacagctgctacagcttatgccagcgctc

SEQ ID NO: 55931 - DNA, 629 bp, Zea mays
  Clone ID: MRT4577_151001C.1
tctctacttgccctctccctgccactggcttgccggaaccctagcctcatcgcccctcccctcccggcccgatctccctatcgccggattcgtgctgcgggatggactccgacgtggagatgaacgccgccagcgacgaggaggtgatggacgatgaggattactacgactactgctacagcgacgtgggtgacgacggcgacggcgggagcgaggaggagctggtgcccgtggactacgacgagggccttgaggccgagggtaccgacgaggtggtgtccagacgcgagcagacatttgtggttctaaatgaagaagttatatctgagcgtcaagaggaagatgtaagcaaggtatcagccgtgttactgattacaagggaagaggcatgtgccctcctgcatcactataaatggaacatcagcaagttgagtgatgaatggtttgcagatgaagaaaaagtccgccatactgttggcttacttttgaatggaaatcatgagcccggctctaggaagctaacctgtggaatatgttttgaagggtattcttctgatacgatgagctctgctggttgtgctcatttttattgccatgaatgttgggaaggctacattagcgctgcaata

SEQ ID NO: 55932 - DNA, 406 bp, Zea mays
  Clone ID: MRT4577_151002C.1
gccgtctgccttctgcgcctccatttagagctctgtccctcgcaagttcaatcggacctgggaccatgggtaaagtgaactcccacatcaacattgagggtattggccatgtcgactctggcaagtcgaccaccacaggacaccttatctacaagcctggaggcattgacaagcgtgtgatcgacaggttcgagaaggaggctgctgaaatgaacaagcggtccttcaagtacgcgtacggtgctcgacaagctcaaggctcaccgtgagagaggtatgaccatggatatggttctgtggacgattgagaccaccaagtgctactgcacggccattgatgcccatggacaccgtgacttcatcaagaacatgatctctcggtcctcacaagctgactgtgctgtcc

SEQ ID NO: 55933 - DNA, 697 bp, Zea mays
  Clone ID: MRT4577_151003C.1
ttccgccgcggagcacgatggatcgcgcgcagttgctcctcgtcggactcccgggcttgctcttcttctccgacctcactcacatattcgcgccggcgcctccccacctccgccaacccaataacaaccctcctcaccacaaccatacgactacaacaaataatccccactcagctcatgaacaccctcacccagctcatcattatcactggcacccggtacaccctgaacaagaaccaaaggcctacaaggacccgatacaacgagcacggggagcgagaaaggaaaggtggacgcgtggacgtctgatttcgcgcgtcctggtcttacaacggaactgcaaggacaatgacagcaatagatacaaacacaactgattggtatcaaggtgactcagccgaagcatcatcactatcttcccgaatggtgtatcatctgttctcccaccctctgcttcagctactgtgggccgaacaagactggatgtgaagctttgatctaccgatatttgcacggacgtacgaactgggttgtacctcggtgttcttggatcaagatcaaatcatggcttcaataagtgtgtgtgtgcgcatatatccgtgtggtaaaatttatctctttttttttggatcgagagatgctcggaataatgcgaattgacaggcggcgatagaaaaaaaaaaaaaaaaaagcggcc

SEQ ID NO: 55934 - DNA, 961 bp, Zea mays
  Clone ID: MRT4577_151004C.1
gacacggggctaactaccattatattcctagtatcgagaatcagcaccatgcgaagcgcactaccggcgacctaacgacagtggctgccaagatattaggccttgttgtgcttgttgcccttttagtgagcgcaacatgatgcgctcattattccacagggctcacttgctcctagtgccattgttccaccggtcctcccaccagttactctaatgggctcacagcatccatccgcgcaagcctataggctacaactagcgcttgcggtgagcgccttacaacaaccaattgtccaattgcaacaacaagtccttggcacatataaccctacagaccatcgcaacgcaacggcgacaacattttctgccatcactgagccacctagcagtggtgaaccctgtcgcctacttggcacagcagatgcttgcatccaacccacttgctctggcgaacgtaggtgcataccagcaacaacaacagctgcaagagagtatacaagagctcagtcaactagccatggtgaaccctgccgtctacctacaacttcttttatttagcccgctcgcggtgggcaatgcacctgcgtacctacaacaacagttggtgcaacaaattggaccagctttgactcagctaggtgtggcaaaccctggtgcctacttacaacagttgcttccattcaaccaactggttgtgtcaaactttggtggggacctacaacagcgacaacagttacttaatccattggcagtggctaacccattggtcgctaccttcctgcagcagcaacaacaattggtgccaaacaaccagttctttttgatgaaccctgccttgcagcaacccatcgttggaggggccttttttagattacaaatgaaatggactcgacaatggggccctcaaaccgacatgtgtttcctaaaaaaaatcaaaatattgattgagatttttctcgat

SEQ ID NO: 55935 - DNA, 183 bp, Zea mays
  Clone ID: MRT4577_151005C.1
atagaatctcgaggaacggggcgttagctgaccactaccgtaccacccctgtggcgtcttcgttgccattccgcccttatactgattcatgatatttgggaaatctcctgtatccatctttctctatctatatatgtaataatgcagtaagacgacgcacatggtggggtgtggtattaccaa

SEQ ID NO: 55936 - DNA, 927 bp, Zea mays
  Clone ID: MRT4577_151006C.1
atcgggataaatcccaatcaatattttgtttttttctaggaaacacatgtcggtttgagggccccattggcgagtccatctcatttgtaatctaaaagatggcccctccaacgatgggttgctgcaaggcagggttcatcaaaaaaaactggttgtatggcaccaattgttgttgctgctgcaggaaggtaccccccaatgggttacccactgccaatggattaagtaactgttgcccctgttgtaggtccccaccaaattttgacacacccagttggttgaatggaaccaactgttgtaagtaggcaccagggtttgccacagctagctgagtcaaagctggtccaatttgttgcaccaactgttgttgtaggtccctaggtccattgcccaccgcgagcgggctaaataaaagtagttgtaggtagacggcagggttcaccatggctagttgactgaccactggcataaactgttgcagctgttgttgttgctggtatgtagctacgttcgccagagcaagagggttggatccaagcagctgctgttgcaagtaggcgacagggttcagcattgataggtggctcagtgatggcagaaaatgttgttgttgttgcgttcagatggtttgtagggtcacatgtgccaaggattgttgttgcaattgggcaattggttgctgtaaggcgctctccgcaagccctagttgtagcctataggcttgcacggctgcatgttagaagctccaatgaagtaactgctggcagtaactgtggaataatggccctaggagcaagtgagctcctgtgcaataatgaacgcatttgttgcgatcactaaaacaactaggaagcgcaagttgggctacccccgagttgccctgttcctaggacattgctaggcgcttagcttggtgtgtttatcaat

SEQ ID NO: 55937 - DNA, 620 bp, Zea mays
  Clone ID: MRT4577_151007C.1
cctcgaggccggccgggaagtatttgcacgagagtgagacgaaaccaccagtattgccctcacctccaccgatcctctcctcgctggagaacatgcgcgaccgtccgcctccgctactctacgcgtcggcaatcccacccagctctgacgtccccgcgcttcactgtctaaatcggcgaaagggattgctctgaatatgctccgcgaacgctgccaacgaatgattgagtgtcacacgaagagcagcatctcacgcctagcgagataccccaatggataaccgtgaggtgatgaacctcctcctcctctacgtcatctcagtgaccaccgacacgatgtccgctctatacggtctcttcttcaacactgcctctactaccgaacaaccgactcctgcacctacacgaagcaccagctgtctaatgacatcaagcggaaggtgtggctcaacattcatctgaacaacgcacgcacgatcgcgcatgtcttcatggctgatcccacatacctggtggcggagcaagacaacatcctatccacctacctcatcaacgacgtgagcactcagctcggctgctgagagccatgtaatgccgcccataacaaacatctctgtccat

SEQ ID NO: 55938 - DNA, 1566 bp, Zea mays
  Clone ID: MRT4577_151008C.1
gcggggattcacatctctaccctagtgcgcttcccttataaaacctagctcctcaagctccagacgcagtcgaccgccgcagaccgggagtagtcgacgcgccgtcactgaatcctcagatcacggctagccgtaatcacgccactctgctggctcccggcgagcagtgtaacatctttccttcagccatgggcaaggagaagactcacatcaacattgtggtcattggacatgtcgactctggcaagtcgaccaccactggccacctgatctacaagctcggcggtattgacaagcgtgtgattgagaggttcgagaaagaggccgcggagatgaacaagcggtcattcaagtatgcctgggtgcttgacaagctcaaggccgagcgtgagagaggtatcacaattgatattgctttgtggaagttcgagaccaccaagtactactgcactgtcattgatgcccctggacaccgtgacttcatcaagaatatgattactggcacttcccaggtcatcatcatgaaccaccctgggcagattggcaacggctatgccccagtgctggactgccacacctcgcacattgctgtcaagtttgcggagctcattaccaagattgataggcggtctggcaaggagcttgagaaggagcccaaatttctcaagaatggtgatgctggtatggtgaagatggttcccactaagcccatggtagtggagaccttttctgaatatcctcctcttggtcgctttgctgtccgtgacatgaggcaaacggtggctgtcggagtcatcaaaagtgtggagaagaaggacccaactggagccaaggtgaccaaggctgccgcaaagaagaaatgatgtgtctggctggttctgtgtttgcttgagggatacctagtggaaacataaaatatctcgtcttgttcacgtcattgtctgaactatgctcgcaacgtttgcctggtcgatttagaactgttattttcgttaaaaccagactaccagagtgttatttaagacttaaccgaacatctggtgagccatatatggttactagttttgttactacccttgttggtgttgtgtgcttctttaaaaaaaaaaaaaaaaaaaaaaaaaaaaaaaaaaaaaaaaaaaaaaaaaaaaaaaaaaaaaaaaaaaaaaaaaaaaaaaaaaaaaaaaaaaaaaaaaaaaaaaaaaaaaaaaaaaaaaaagggggggcccgttttaaaaaaatcaaattttacttacccttgattgaaaagtaaaagtttttttttagggccaccaaaattaaattaattggccgggttttaaaaacgtgggaattgaaaaaaccttgggttaaccaaattaaatcgctttgaaaaaaatccccttttcccaagttgggtaaaaaacaaaaaggccccaaccaatcgcctttccaaaaatttgccaaccctaaatggaaaatggaaccccccttttagcggccaataaagcccggggggtgtggggtttaccccaagggtaaccgttaaatttgcaagggccttagcgcccgctcttttggtttttt

SEQ ID NO: 55939 - DNA, 884 bp, Zea mays
  Clone ID: MRT4577_151009C.1
gcgcttcttgcccttttagtgagcgcatctaaatgcgttcattattccacagtgctcactggcactaggagcaagtgagcactgtggaataatgaacgcattccacagtctctcccaccagttacttcaatgggcttccaacatccagccgtgcaagcctacacgctacaactagcgcttgctgcgagcgccttacaacaaccaattgcccaattgcaacaacaatccttggcacatctaaccctacaaaccattgcaacgcaacaacaacttcaacagtttctgccatcactgagccacctagccgtggtgaaccctgtcacctacttgcaacagcagctgcttgcatccaacccacttgctctggcgaacgtatctgcataccagcaacaacatcagcttgaacagtttatgccagtgctcagtcaactagccatggtgaaccctgccgtctacctacaactactttcatgtaggccgctcacggtgggcaatgcacgtccgtacgtacatctccagatgatgcagcaaattgtaccagctttggctcagctaggtgtggcaaaccgtcctgcgtacttccatcagctgcttccattcgccaagcaggttgtggcgaactttgtgggggaccatcaccactccagactagatacttaattcattggcagtggctaacccattggtagatgcctacatgcagcatcagcaacaatagttaccagtcagtctgttatggttaagtttcagctgcgctagagtggctgggcgctctagtcgctgtcatgtgttgtgcaagcttcaactgtatgcccgtcgtgtgttatggaaaatattgggcttcatgaatcatcatgctgaataatttgtgacatctaattgtt

SEQ ID NO: 55940 - DNA, 2121 bp, Zea mays
  Clone ID: MRT4577_15100C.1
atggaaaggaccaaagtagaaaaaatcactaatgaaatgttatctgggctatctggtgattcgagcgacatcgagagcttcgatgttgagagtgggaacgaagatgtcgaagatcggccgtggaggacaagccatgttgtttttgggaagtcgactatcagacaagggcaaattgaagcgatgaaagacaaatattttcaggatgtgtccatagtgagggctgggaagtggccaggttcttggatgaaggaatggttttacgtgaagaatgacctgaatcagagggaggatgtgagaggcgttatccaacgtcctatatggtcacgttttggcattagaaggccatccatcgcacttgggaatgaagtgcaggcgtgccaaattgctttcaacaccatatgcacctacattggaacgagagatttagttcaagagcacattacttataaagtatggcctcttgcaaatgaaggggaaatgcctaaggaagccgctgctggctccagccagagtggcctggcaatgagtgatgaactacttgtagcgtactcgagggcagaagacaaagctatgacagctgccttcggcgctcgtgggaaaaagaggttgaatagggtgttcgatgttattgggtttgtttacccagattactgctttcccgtccaaaagcaagggagaaaaaggaaagtcattgctttgacatcttctggtgcgccgaaggcgaagaaagtcaagggcagaaactatcccctagccacagagagggctcttgtgatgtcgattgaagctagtgcacacccggtcgaagagccagaattagagaaagcaacagagcaaccaaaggtgctggtgacagcgttgccaaagctatcagctactgcaacaactctgaggaagaggaggatggctagtgttttggatgctattttggtatctgtgaaaacgccacctcctgcttctgccgaagcttctggagggaaaattgaagatgccagagaagtggtcactgcaagcatttcttctgttcacgctaaagcaggaccttcagaagctgcgccagaaaaacttgtggaagatagccttccagaaaaacccacaacacctgctcccaaagcacctccctacgaggtgataatgaagatgacttcctctactgtctaccgggcacttgaacttggtttgtctgcgatgatgaaggatcagcttgcagatagccttgcctacaacagcttgaagatcataacattgagaaacaaagctcctgagaaggataagatcctactctctttggtggagagattaaaatctagcaaagccaggctttccgctcaagctgaagcccatgaagccgacatgcaagagctaaagaagaaagttgctgaagcaactgagaattttaatgttgaagtagtaaaacacgaaatatgtgaaattgaaagatcaagggcacagaaaaatgttgatgaacttcgtgctactaaggaaaaatgctatgatatggctatggaatgtgctaaaaatctgaagaacaacttttctaaagttggtgcatgttctttcgagcataatttcatccgtggcaaccctgatgaagttattcaatggataaacggcgaggttgaagctttcgaggaaattcttagtgatagaggggacttctgtgccttttccggtgcccgtggggctgcgttcattttggagaaggttgcttgtgatcatgccaaggctgtagctcagccagattttgccttctctgctgacgatcttagaaacccttcagccgaagctactactttgggtgggaagttttattctgaaaatgaaaaagaacctcatgatgccttagaagaggctaaaagagtcgaggaagctgatgagcgggccggacttaaaggtataccctttataactcagctttgtaagtttttcaacttcggcactaatagatatttgtgtttcaatgcaactgagctttctccccctcccgagccatatgatcctgaaactgacccatctgtcaaggaggcgctcgatataatcaagattgctaatgatgctattgacaaaactgtcgacaagctgctgaacgaagctgccgacaaagtcctaaaggaagactga

SEQ ID NO: 55941 - DNA, 837 bp, Zea mays
  Clone ID: MRT4577_151010C.1
aaatctaaccatttttgttattttagaaaccctgcccgtttaaggcaccttttcaatccttttattttgtattttaaaaaagggcccttccaccgatgggtggttgcctcaacagaacaggattcatcaaaaaaaaccggttgtttggcaccatttgttgctgttgtaggaaggcagcaaccaatgggttagccactgccaatggattaagtaactgttgccgttgttgtaggtccccaccaaagttcgacatagttagttggttgaatggaaccagctgttgcaagtaggcaacagggtttgccacagctagctgagttagagctggtacaatctgttgcaacaattcttgttgcaggtttgtaggtgcattggccacagcgagcgggctaaatgaaagcagttgttgctgttgtaggtaggcggcagggttcaccatggctagttgactaagcgctggcagaaactgttgcagttgttgttgttgctggtttgcaactgcgtttgctagagcaagtgggttggatgcaagcagctgctgttgcaagtaggcgacagggttcaccatggatagttggctcagtgctggtaggatctgttgttgctgttgcgttgcgatggtctgtattgttaggtgccccaagtattgttgctgcaattgggcacttggctgttgtgccccgctccccgcagttgcttgttgtaaaatataggcttgctcagttgggtgttccccgcccaaaaaaagaaatggtggaagaaaaatgaaaaaaaaagaaaataaaaacaaaaaaaaaaagaaaaataataaaaacaaaaaaaaaaaaaaagagagtc

SEQ ID NO: 55942 - DNA, 780 bp, Zea mays
  Clone ID: MRT4577_151011C.1
aagggggttttttttccaggccaattaatttggtaaaccccgggtttttccagttaccacgttttaaaaccgcggccaattaatttaatttaggtggccctataaaaaaacttttaccttgcaagcccggggaagtaaactttggttctttaaaacggccccccccttttttttttttttttttttttttttttttttttttttttttttttttttttttttttttttttttttttttttttttttttttttttttttttttttttttttttatatccagataaatctcaatcaatatattgattatttctaggaaacacatgccggtatgagggcaccattatcaagtacatttcatatgtaatctaaaagaaggcacctccaacgatgggttgctgccacgataaggcagggttcatcaaagagaactggttgtatggcagcaattgttgctgctgttggaaggcaccgaccaatggattagccactgccagtggattaagtaatggttgtcgctgttgtaggtacgcagcagagttcgacacagtcagttggttgaatggaagctgctgttgcaagtaggcagcagggtttgccacagctagctgagtcagagctggtacaatctgttgcaccacctgttgttgccggtttgtcggtgccttaaccatcgcgagagggcttgatgaaagctgttgttgctgttgttggtcggcggcagggttcaccatggctagttgcctatgcgctggtcgaaactgttgcccccgtttgttgttg

SEQ ID NO: 55943 - DNA, 182 bp, Zea mays
  unsure (1)..(182): unsure at all n locations
  Clone ID: MRT4577_151012C.1
tccgncatcccggtcgaccccgcgtccgcgacctgactggcctcaccgcctgcgcaactgcctccggccgccgcttgtccttgcctcaggtgaagtgctnacatgaaacagctactctccgggatcgaacactgccacaacaacggcgttctgcaccgtgccctcnagacctccaacttact

SEQ ID NO: 55944 - DNA, 439 bp, Zea mays
  unsure (1)..(439): unsure at all n locations
  Clone ID: MRT4577_151013C.1
agtagtgaagcttgtttgttagtactgagaacaactaatcacagttgattagccatggttctctacaaactcaaaccaacacatgagcaattacactatttttttttgttttaaatataccaatggtagaaggtggggggggtgggaatcttttctctggtcgattcattgcctagtggggggggggtgagaagtgaagtccaaaactgggatggatcagttgtcgcngaatgcatgaagggttttatcgngtgctttccggtcttaatcccccgtnaggacacagcacccttgtggtgctttcaggaggatgagtcttatttgaccattagcttccttcttttcaacagccatgatgtttttaaactttttcacggtcntgggctttggnggtgcgntgggaacggncgcgtggggtngcccggggatttcgggccgg

SEQ ID NO: 55945 - DNA, 826 bp, Zea mays
  Clone ID: MRT4577_151014C.1
atcctcaatctcctcccgccgccgcctcccctcccttcgttcttcttcttcgagttgggtagtttagctctacccaccagccatgggtaaggagaagactcacatcaacatcgtggtcattggccacgtcgactctggcaagtcgacgaccactggccacctgatctacaagcttggaggcattgacaagcgtgtcatcgagaggttcgagaaggaagccgctgagatgaacaagaggtctttcaagtacgcgtgggtgcttgacaagctcaaggccgagcgtgagagaggtatcaccatcgatattgctctctggaagtttgagaccaccaagtactactgcaccgtcattgatgcccctggtcaccgtgacttcatcaagaacatgatcaccggtacctcccaggctgactgtgctgttctcatcatcgactccaccactggtggttttgaggctggtatctccaaggacggccagacacgtgagcatgccctccttgctttcactcttggagtgaagcagatgatctgctgctgcaacaagatggacgccaccactcccaagtactcgaaggcgcgttatgaagaaattgtcaaggaggtctcttcctacctgaagaaggtcggctacaaccctgacaaggttcccttcgtccccatctctggggtttgagggtgacaacatgattgagaggtccaccaaccttgactggtacaagggcccaaccctccttgaggcgcttgaccagatcaacgagcccaagagagccgtcagacaagcccctccgcttcccctcagacgttaacagattgtggcatggaactg
